United States Patent Application Publication US 2025/0333767 A1 - sequence listing, part 12

SEQ ID NO: 42949 - protein, 977 aa, synthetic construct
  REGION 1..977: note = engineered CasX variant
QEIKRINKIRRRLVKDSNTKKAGKTGPMKTLLVRVMTPDLRERLENLRKKPENIPQPISNTSRANLNKLLTDYTEMKKAILHVYWEEFQKDPVGLMSRVAQPASKKIDQNKLKPEMDEKGNLTTAGFACSQCGQPLFVYKLEQVSEKGKAYTNYFGRCNVAEHEKLIKLAQLKPEKDSDEAVTYSLGKFGQRALDFYSIHVTKESTHPVKPLAQIAGNRYASPVGKALSDACMGTIASFLSKYQDIIIEHQKVVKGNQKRLESLRELAGKENLEYPSVTLPPQPHTKEGVDAYNEVIARVRMWVNLNLWQKLKLSRDDAKPLLRLKGFPSFPLVERQANEVDWWDMVCNVKKLINEKKEDGKVFWQNLAGYKRQEALRPYLSSEEDRKKGKKFARYQLGDLLLHLEKKHGEDWGKVYDEAWERIDKKVEGLSKHIKLEEERRSEDAQSKAALTDWLRAKASFVIEGLKEADKDEFCRCELKLQKWYGDLRGKPFAIEAENSILDISGFSKQYNCAFIWQKDGVKKLNLYLIINYFKGGKLRFKKIKPEAFEANRFYTVINKKSGEIVIMEVNFNFDDPNLIILPLAFGKRQGREFIWNDLLSLETGSLKLANGRVIEKTLYNRRTRQDEPALFVALTFERREVLDSSNIKPMNLIGVDRGENIPAVIALTDPEGCPLSRFKDSLGNPTHILRIGESYKEKQRTIQAKKEVEQRRAGGYSRKYASKAKNLADDMVRNTARDLLYYAVTQDAMLIFENLSRGFGRQGKRTFMAERQYTRMEDWLTAKLAYEGLPSKTYLSKTLAQYTSKTCSNCGFTITSADYDRVLEKLKKTATGWMTTINGKELKVEGQITYYNRYKRQNVVKDLSVELDRLSEESVNNDISSWTKGRSGEALSLLKKRFSHRPVQEKFVCLNCGFETHADEQAALNIARSWLFLRSQEYKKYQTNKTTGNTDKRAFVETWQSFYRKKLKEVWKPAV

SEQ ID NO: 42950 - protein, 978 aa, synthetic construct
  REGION 1..978: note = engineered CasX variant
QEIKRINKIRRRLVKDSNTKKAGKTGPMKTLLVRVMTPDLRERLENLRKKPENIPQPISNTSRANLNKLLTDYTEMKKAILHVYWEEFQKDPVGLMSRVAQPASKKIDQNKLKPEMDEKGNLTTAGFACSQCGQPLFVYKLEQVSEKGKAYTNYFGRCNVAEHEKLILLYQLKPEKDSDEAVTYSLGKFGQRALDFYSIHVTKESTHPVKPLAQIAGNRYASYPVGKALSGACMGTIASFLSKYQDIIIEHQKVVKGNQKRLESLRELAGKENLEYPSVTLPPQPHTKEGVDAYNEVIARVRMWVNLNLWQKLKLSRDDAKPLLRLKGFPSFPLVERQANEVDWWDMVCNVKKLINEKKEDGKVFWQNLAGYKRQEALRPYLSSEEDRKKGKKFARYQLGDLLLHLEKKHGEDWGKVYDEAWERIDKKVEGLSKHIKLEEERRSEDAQSKAALTDWLRAKASFVIEGLKEADKDEFCRCELKLQKWYGDLRGKPFAIEAENSILDISGFSKQYNCAFIWQKDGVKKLNLYLIINYFKGGKLRFKKIKPEAFEANRFYTVINKKSGEIVPMEVNFNFDDPNLIILPLAFGKRQGREFIWNDLLSLETGSLKLANGRVIEKTLYNRRTRQDEPALFVALTFERREVLDSSNIKPMNLIGVDRGENIPAVIALTDPEGCPLSRFKDSLGNPTHILRIGESYKEKQRTIQAKKEVEQRRAGGYSRKYASKAKNLADDMVRNTARDLLYYAVTQDAMLIFENLSRGFGRQGKRTFMAERQYTRMEDWLTAKLAYEGLPSKTYLSKTLAQYTSKTCSNCGFTITSADYDRVLEKLKKTATGWMTTINGKELKVEGQITYYNRYKRQNVVKDLSVELDRLSEESVNNDISSWTKGRSGEALSLLKKRFSHRPVQEKFVCLNCGFETHADEQAALNIARSWLFLRSQEYKKYQTNKTTGNTDKRAFVETWQSFYRKKLKEVWKPAV

SEQ ID NO: 42951 - protein, 978 aa, synthetic construct
  REGION 1..978: note = engineered CasX variant
QEIKRINKIRRRLVKDSNTKKAGKTGPMKTLLVRVMTPDLRERLENLRKKPENIPQPISNTSRANLNKLLTDYTEMKKAILHVYWEEFQKDPVGLMSRVAQPASKKIDQNKLKPEMDEKGNLTTAGFACSQCGQPLFVYKLEQVSEKGKAYTNYFGRCNVAEHEKLILLYQLKPEKDSDEAVTYSLGKFGQRALDFYSIHVTKESTHPVKPLAQIAGNRYASHPVGKALSGACMGTIASFLSKYQDIIIEHQKVVKGNQKRLESLRELAGKENLEYPSVTLPPQPHTKEGVDAYNEVIARVRMWVNLNLWQKLKLSRDDAKPLLRLKGFPSFPLVERQANEVDWWDMVCNVKKLINEKKEDGKVFWQNLAGYKRQEALRPYLSSEEDRKKGKKFARYQLGDLLLHLEKKHGEDWGKVYDEAWERIDKKVEGLSKHIKLEEERRSEDAQSKAALTDWLRAKASFVIEGLKEADKDEFCRCELKLQKWYGDLRGKPFAIEAENSILDISGFSKQYNCAFIWQKDGVKKLNLYLIINYFKGGKLRFKKIKPEAFEANRFYTVINKKSGEIVPMEVNFNFDDPNLIILPLAFGKRQGREFIWNDLLSLETGSLKLANGRVIEKTLYNRRTRQDEPALFVALTFERREVLDSSNIKPMNLIGVDRGENIPAVIALTDPEGCPLSRFKDSLGNPTHILRIGESYKEKQRTIQAKKEVEQRRAGGYSRKYASKAKNLADDMVRNTARDLLYYAVTQDAMLIFENLSRGFGRQGKRTFMAERQYTRMEDWLTAKLAYEGLPSKTYLSKTLAQYTSKTCSNCGFTITSADYDRVLEKLKKTATGWMTTINGKELKVEGQITYYNRYKRQNVVKDLSVELDRLSEESVNNDISSWTKGRSGEALSLLKKRFSHRPVQEKFVCLNCGFETHADEQAALNIARSWLFLRSQEYKKYQTNKTTGNTDKRAFVETWQSFYRKKLKEVWKPAV

SEQ ID NO: 42952 - protein, 978 aa, synthetic construct
  REGION 1..978: note = engineered CasX variant
QEIKRINKIRRRLVKDSNTKKAGKTGPMKTLLVRVMTPDLRERLENLRKKPENIPQPISNTSRANLNKLLTDYTEMKKAILHVYWEEFQKDPVGLMSRVAQPASKKIDQNKLKPEMDEKGNLTTAGFACSQCGQPLFVYKLEQVSEKGKAYTNYFGRCNVAEHEKLILLYQLKPEKDSDEAVTYSLGKFGQRALDFYSIHVTKESTHPVKPLAQIAGNRYASSPVGKALSGACMGTIASFLSKYQDIIIEHQKVVKGNQKRLESLRELAGKENLEYPSVTLPPQPHTKEGVDAYNEVIARVRMWVNLNLWQKLKLSRDDAKPLLRLKGFPSFPLVERQANEVDWWDMVCNVKKLINEKKEDGKVFWQNLAGYKRQEALRPYLSSEEDRKKGKKFARYQLGDLLLHLEKKHGEDWGKVYDEAWERIDKKVEGLSKHIKLEEERRSEDAQSKAALTDWLRAKASFVIEGLKEADKDEFCRCELKLQKWYGDLRGKPFAIEAENSILDISGFSKQYNCAFIWQKDGVKKLNLYLIINYFKGGKLRFKKIKPEAFEANRFYTVINKKSGEIVPMEVNFNFDDPNLIILPLAFGKRQGREFIWNDLLSLETGSLKLANGRVIEKTLYNRRTRQDEPALFVALTFERREVLDSSNIKPMNLIGVDRGENIPAVIALTDPEGCPLSRFKDSLGNPTHILRIGESYKEKQRTIQAKKEVEQRRAGGYSRKYASKAKNLADDMVRNTARDLLYYAVTQDAMLIFENLSRGFGRQGKRTFMAERQYTRMEDWLTAKLAYEGLPSKTYLSKTLAQYTSKTCSNCGFTITSADYDRVLEKLKKTATGWMTTINGKELKVEGQITYYNRYKRQNVVKDLSVELDRLSEESVNNDISSWTKGRSGEALSLLKKRFSHRPVQEKFVCLNCGFETHADEQAALNIARSWLFLRSQEYKKYQTNKTTGNTDKRAFVETWQSFYRKKLKEVWKPAV

SEQ ID NO: 42953 - protein, 978 aa, synthetic construct
  REGION 1..978: note = engineered CasX variant
QEIKRINKIRRRLVKDSNTKKAGKTGPMKTLLVRVMTPDLRERLENLRKKPENIPQPISNTSRANLNKLLTDYTEMKKAILHVYWEEFQKDPVGLMSRVAQPASKKIDQNKLKPEMDEKGNLTTAGFACSQCGQPLFVYKLEQVSEKGKAYTNYFGRCNVAEHEKLILLYQLKPEKDSDEAVTYSLGKFGQRALDFYSIHVTKESTHPVKPLAQIAGNRYASTPVGKALSGACMGTIASFLSKYQDIIIEHQKVVKGNQKRLESLRELAGKENLEYPSVTLPPQPHTKEGVDAYNEVIARVRMWVNLNLWQKLKLSRDDAKPLLRLKGFPSFPLVERQANEVDWWDMVCNVKKLINEKKEDGKVFWQNLAGYKRQEALRPYLSSEEDRKKGKKFARYQLGDLLLHLEKKHGEDWGKVYDEAWERIDKKVEGLSKHIKLEEERRSEDAQSKAALTDWLRAKASFVIEGLKEADKDEFCRCELKLQKWYGDLRGKPFAIEAENSILDISGFSKQYNCAFIWQKDGVKKLNLYLIINYFKGGKLRFKKIKPEAFEANRFYTVINKKSGEIVPMEVNFNFDDPNLIILPLAFGKRQGREFIWNDLLSLETGSLKLANGRVIEKTLYNRRTRQDEPALFVALTFERREVLDSSNIKPMNLIGVDRGENIPAVIALTDPEGCPLSRFKDSLGNPTHILRIGESYKEKQRTIQAKKEVEQRRAGGYSRKYASKAKNLADDMVRNTARDLLYYAVTQDAMLIFENLSRGFGRQGKRTFMAERQYTRMEDWLTAKLAYEGLPSKTYLSKTLAQYTSKTCSNCGFTITSADYDRVLEKLKKTATGWMTTINGKELKVEGQITYYNRYKRQNVVKDLSVELDRLSEESVNNDISSWTKGRSGEALSLLKKRFSHRPVQEKFVCLNCGFETHADEQAALNIARSWLFLRSQEYKKYQTNKTTGNTDKRAFVETWQSFYRKKLKEVWKPAV

SEQ ID NO: 42954 - protein, 978 aa, synthetic construct
  REGION 1..978: note = engineered CasX variant
QEIKRINKIRRRLVKDSNTKKAGKTGPMKTLLVRVMTPDLRERLENLRKKPENIPQPISNTSRANLNKLLTDYTEMKKAILHVYWEEFQKDPVGLMSRVAQPASKKIDQNKLKPEMDEKGNLTTAGFACSQCGQPLFVYKLEQVSEKGKAYTNYFGRCNVAEHEKLILLYQLKPEKDSDEAVTYSLGKFGQRALDFYSIHVTKESTHPVKPLAQIAGNRYASAPVGKALSGACMGTIASFLSKYQDIIIEHQKVVKGNQKRLESLRELAGKENLEYPSVTLPPQPHTKEGVDAYNEVIARVRMWVNLNLWQKLKLSRDDAKPLLRLKGFPSFPLVERQANEVDWWDMVCNVKKLINEKKEDGKVFWQNLAGYKRQEALRPYLSSEEDRKKGKKFARYQLGDLLLHLEKKHGEDWGKVYDEAWERIDKKVEGLSKHIKLEEERRSEDAQSKAALTDWLRAKASFVIEGLKEADKDEFCRCELKLQKWYGDLRGKPFAIEAENSILDISGFSKQYNCAFIWQKDGVKKLNLYLIINYFKGGKLRFKKIKPEAFEANRFYTVINKKSGEIVPMEVNFNFDDPNLIILPLAFGKRQGREFIWNDLLSLETGSLKLANGRVIEKTLYNRRTRQDEPALFVALTFERREVLDSSNIKPMNLIGVDRGENIPAVIALTDPEGCPLSRFKDSLGNPTHILRIGESYKEKQRTIQAKKEVEQRRAGGYSRKYASKAKNLADDMVRNTARDLLYYAVTQDAMLIFENLSRGFGRQGKRTFMAERQYTRMEDWLTAKLAYEGLPSKTYLSKTLAQYTSKTCSNCGFTITSADYDRVLEKLKKTATGWMTTINGKELKVEGQITYYNRYKRQNVVKDLSVELDRLSEESVNNDISSWTKGRSGEALSLLKKRFSHRPVQEKFVCLNCGFETHADEQAALNIARSWLFLRSQEYKKYQTNKTTGNTDKRAFVETWQSFYRKKLKEVWKPAV

SEQ ID NO: 42955 - protein, 978 aa, synthetic construct
  REGION 1..978: note = engineered CasX variant
QEIKRINKIRRRLVKDSNTKKAGKTGPMKTLLVRVMTPDLRERLENLRKKPENIPQPISNTSRANLNKLLTDYTEMKKAILHVYWEEFQKDPVGLMSRVAQPASKKIDQNKLKPEMDEKGNLTTAGFACSQCGQPLFVYKLEQVSEKGKAYTNYFGRCNVAEHEKLILLYQLKPEKDSDEAVTYSLGKFGQRALDFYSIHVTKESTHPVKPLAQIAGNRYASVPVGKALSGACMGTIASFLSKYQDIIIEHQKVVKGNQKRLESLRELAGKENLEYPSVTLPPQPHTKEGVDAYNEVIARVRMWVNLNLWQKLKLSRDDAKPLLRLKGFPSFPLVERQANEVDWWDMVCNVKKLINEKKEDGKVFWQNLAGYKRQEALRPYLSSEEDRKKGKKFARYQLGDLLLHLEKKHGEDWGKVYDEAWERIDKKVEGLSKHIKLEEERRSEDAQSKAALTDWLRAKASFVIEGLKEADKDEFCRCELKLQKWYGDLRGKPFAIEAENSILDISGFSKQYNCAFIWQKDGVKKLNLYLIINYFKGGKLRFKKIKPEAFEANRFYTVINKKSGEIVPMEVNFNFDDPNLIILPLAFGKRQGREFIWNDLLSLETGSLKLANGRVIEKTLYNRRTRQDEPALFVALTFERREVLDSSNIKPMNLIGVDRGENIPAVIALTDPEGCPLSRFKDSLGNPTHILRIGESYKEKQRTIQAKKEVEQRRAGGYSRKYASKAKNLADDMVRNTARDLLYYAVTQDAMLIFENLSRGFGRQGKRTFMAERQYTRMEDWLTAKLAYEGLPSKTYLSKTLAQYTSKTCSNCGFTITSADYDRVLEKLKKTATGWMTTINGKELKVEGQITYYNRYKRQNVVKDLSVELDRLSEESVNNDISSWTKGRSGEALSLLKKRFSHRPVQEKFVCLNCGFETHADEQAALNIARSWLFLRSQEYKKYQTNKTTGNTDKRAFVETWQSFYRKKLKEVWKPAV

SEQ ID NO: 42956 - protein, 978 aa, synthetic construct
  REGION 1..978: note = engineered CasX variant
QEIKRINKIRRRLVKDSNTKKAGKTGPMKTLLVRVMTPDLRERLENLRKKPENIPQPISNTSRANLNKLLTDYTEMKKAILHVYWEEFQKDPVGLMSRVAQPASKKIDQNKLKPEMDEKGNLTTAGFACSQCGQPLFVYKLEQVSEKGKAYTNYFGRCNVAEHEKLIKLYQLKPEKDSDEAVTYSLGKFGQRALDFYSIHVTKESTHPVKPLAQIAGNRYASGPVGKALSGACMGTIASFLSKYQDIIIEHQKVVKGNQKRLESLRELAGKENLEYPSVTLPPQPHTKEGVDAYNEVIARVRMWVNLNLWQKLKLSRDDAKPLLRLKGFPSFPLVERQANEVDWWDMVCNVKKLINEKKEDGKVFWQNLAGYKRQEALRPYLSSEEDRKKGKKFARYQLGDLLLHLEKKHGEDWGKVYDEAWERIDKKVEGLSKHIKLEEERRSEDAQSKAALTDWLRAKASFVIEGLKEADKDEFCRCELKLQKWYGDLRGKPFAIEAENSILDISGFSKQYNCAFIWQKDGVKKLNLYLIINYFKGGKLRFKKIKPEAFEANRFYTVINKKSGEIVPMEVNFNFDDPNLIILPLAFGKRQGREFIWNDLLSLETGSLKLANGRVIEKTLYNRRTRQDEPALFVALTFERREVLDSSNIKPMNLIGVDRGENIPAVIALTDPEGCPLSRFKDSLGNPTHILRIGESYKEKQRTIQAKKEVEQRRAGGYSRKYASKAKNLADDMVRNTARDLLYYAVTQDAMLIFENLSRGFGRQGKRTFMAERQYTRMEDWLTAKLAYEGLPSKTYLSKTLAQYTSKTCSNCGFTITSADYDRVLEKLKKTATGWMTTINGKELKVEGQITYYNRYKRQNVVKDLSVELDRLSEESVNNDISSWTKGRSGEALSLLKKRFSHRPVQEKFVCLNCGFETHADEQAALNIARSWLFLRSQEYKKYQTNKTTGNTDKRAFVETWQSFYRKKLKEVWKPAV

SEQ ID NO: 42957 - protein, 977 aa, synthetic construct
  REGION 1..977: note = engineered CasX variant
QEIKRINKIRRRLVKDSNTKKAGKTGPMKTLLVRVMTPDLRERLENLRKKPENIPQPISNTSRANLNKLLTDYTEMKKAILHVYWEEFQKDPVGLMSRVAQPASKKIDQNKLKPEMDEKGNLTTAGFACSQCGQPLFVYKLEQVSEKGKAYTNYFGRCNVAEHEKLILLYQLKPEKDSDEAVTYSLGKFGQRALDFYSIHVTKESTHPVKPLAQIAGNRYASPVGKALSGACMGTIASFLSKYQDIIIEHQKVVKGNQKRLESLRELAGKENLEYPSVTLPPQPHTKEGVDAYNEVIARVRMWVNLNLWQKLKLSRDDAKPLLRLKGFPSFPLVERQANEVDWWDMVCNVKKLINEKKEDGKVFWQNLAGYKRQEALRPYLSSEEDRKKGKKFARYQLGDLLLHLEKKHGEDWGKVYDEAWERIDKKVEGLSKHIKLEEERRSEDAQSKAALTDWLRAKASFVIEGLKEADKDEFCRCELKLQKWYGDLRGKPFAIEAENSILDISGFSKQYNCAFIWQKDGVKKLNLYLIINYFKGGKLRFKKIKPEAFEANRFYTVINKKSGEIVPMEVNFNFDDPNLIILPLAFGKRQGREFIWNDLLSLETGSLKLANGRVIEKTLYNRRTRQDEPALFVALTFERREVLDSSNIKPMNLIGVDRGENIPAVIALTDPEGCPLSRFKDSLGNPTHILRIGESYKEKQRTIQAKKEVEQRRAGGYSRKYASKAKNLADDMVRNTARDLLYYAVTQDAMLIFENLSRGFGRQGKRTFMAERQYTRMEDWLTAKLAYEGLPSKTYLSKTLAQYTSKTCSNCGFTITSADYDRVLEKLKKTATGWMTTINGKELKVEGQITYYNRYKRQNVVKDLSVELDRLSEESVNNDISSWTKGRSGEALSLLKKRFSHRPVQEKFVCLNCGFETHADEQAALNIARSWLFLRSQEYKKYQTNKTTGNTDKRAFVETWQSFYRKKLKEVWKPAV

SEQ ID NO: 42958 - protein, 978 aa, synthetic construct
  REGION 1..978: note = engineered CasX variant
QEIKRINKIRRRLVKDSNTKKAGKTGPMKTLLVRVMTPDLRERLENLRKKPENIPQPISNTSRANLNKLLTDYTEMKKAILHVYWEEFQKDPVGLMSRVAQPASKKIDQNKLKPEMDEKGNLTTAGFACSQCGQPLFVYKLEQVSEKGKAYTNYFGRCNVAEHEKLILLYQLKPEKDSDEAVTYSLGKFGQRALDFYSIHVTKESTHPVKPLAQIAGNRYASYPVGKALSDACMGTIASFLSKYQDIIIEHQKVVKGNQKRLESLRELAGKENLEYPSVTLPPQPHTKEGVDAYNEVIARVRMWVNLNLWQKLKLSRDDAKPLLRLKNFPSFPLVERQANEVDWWDMVCNVKKLINEKKEDGKVFWQNLAGYKRQEALRPYLSSEEDRKKGKKFARYQLGDLLLHLEKKHGEDWGKVYDEAWERIDKKVEGLSKHIKLEEERRSEDAQSKAALTDWLRAKASFVIEGLKEADKDEFCRCELKLQKWYGDLRGKPFAIEAENSILDISGFSKQYNCAFIWQKDGVKKLNLYLIINYFKGGKLRFKKIKPEAFEANRFYTVINKKSGEIVPMEVNFNFDDPNLIILPLAFGKRQGREFIWNDLLSLETGSLKLANGRVIEKTLYNRRTRQDEPALFVALTFERREVLDSSNIKPMNLIGVDRGENIPAVIALTDPEGCPLSRFKDSLGNPTHILRIGESYKEKQRTIQAKKEVEQRRAGGYSRKYASKAKNLADDMVRNTARDLLYYAVTQDAMLIFENLSRGFGRQGKRTFMAERQYTRMEDWLTAKLAYEGLPSKTYLSKTLAQYTSKTCSNCGFTITSADYDRVLEKLKKTATGWMTTINGKELKVEGQITYYNRYKRQNVVKDLSVELDRLSEESVNNDISSWTKGRSGEALSLLKKRFSHRPVQEKFVCLNCGFETHADEQAALNIARSWLFLRSQEYKKYQTNKTTGNTDKRAFVETWQSFYRKKLKEVWKPAV

SEQ ID NO: 42959 - protein, 978 aa, synthetic construct
  REGION 1..978: note = engineered CasX variant
QEIKRINKIRRRLVKDSNTKKAGKTGPMKTLLVRVMTPDLRERLENLRKKPENIPQPISNTSRANLNKLLTDYTEMKKAILHVYWEEFQKDPVGLMSRVAQPASKKIDQNKLKPEMDEKGNLTTAGFACSQCGQPLFVYKLEQVSEKGKAYTNYFGRCNVAEHEKLILLYQLKPEKDSDEAVTYSLGKFGQRALDFYSIHVTKESTHPVKPLAQIAGNRYASHPVGKALSDACMGTIASFLSKYQDIIIEHQKVVKGNQKRLESLRELAGKENLEYPSVTLPPQPHTKEGVDAYNEVIARVRMWVNLNLWQKLKLSRDDAKPLLRLKNFPSFPLVERQANEVDWWDMVCNVKKLINEKKEDGKVFWQNLAGYKRQEALRPYLSSEEDRKKGKKFARYQLGDLLLHLEKKHGEDWGKVYDEAWERIDKKVEGLSKHIKLEEERRSEDAQSKAALTDWLRAKASFVIEGLKEADKDEFCRCELKLQKWYGDLRGKPFAIEAENSILDISGFSKQYNCAFIWQKDGVKKLNLYLIINYFKGGKLRFKKIKPEAFEANRFYTVINKKSGEIVPMEVNFNFDDPNLIILPLAFGKRQGREFIWNDLLSLETGSLKLANGRVIEKTLYNRRTRQDEPALFVALTFERREVLDSSNIKPMNLIGVDRGENIPAVIALTDPEGCPLSRFKDSLGNPTHILRIGESYKEKQRTIQAKKEVEQRRAGGYSRKYASKAKNLADDMVRNTARDLLYYAVTQDAMLIFENLSRGFGRQGKRTFMAERQYTRMEDWLTAKLAYEGLPSKTYLSKTLAQYTSKTCSNCGFTITSADYDRVLEKLKKTATGWMTTINGKELKVEGQITYYNRYKRQNVVKDLSVELDRLSEESVNNDISSWTKGRSGEALSLLKKRFSHRPVQEKFVCLNCGFETHADEQAALNIARSWLFLRSQEYKKYQTNKTTGNTDKRAFVETWQSFYRKKLKEVWKPAV

SEQ ID NO: 42960 - protein, 978 aa, synthetic construct
  REGION 1..978: note = engineered CasX variant
QEIKRINKIRRRLVKDSNTKKAGKTGPMKTLLVRVMTPDLRERLENLRKKPENIPQPISNTSRANLNKLLTDYTEMKKAILHVYWEEFQKDPVGLMSRVAQPASKKIDQNKLKPEMDEKGNLTTAGFACSQCGQPLFVYKLEQVSEKGKAYTNYFGRCNVAEHEKLILLYQLKPEKDSDEAVTYSLGKFGQRALDFYSIHVTKESTHPVKPLAQIAGNRYASSPVGKALSDACMGTIASFLSKYQDIIIEHQKVVKGNQKRLESLRELAGKENLEYPSVTLPPQPHTKEGVDAYNEVIARVRMWVNLNLWQKLKLSRDDAKPLLRLKNFPSFPLVERQANEVDWWDMVCNVKKLINEKKEDGKVFWQNLAGYKRQEALRPYLSSEEDRKKGKKFARYQLGDLLLHLEKKHGEDWGKVYDEAWERIDKKVEGLSKHIKLEEERRSEDAQSKAALTDWLRAKASFVIEGLKEADKDEFCRCELKLQKWYGDLRGKPFAIEAENSILDISGFSKQYNCAFIWQKDGVKKLNLYLIINYFKGGKLRFKKIKPEAFEANRFYTVINKKSGEIVPMEVNFNFDDPNLIILPLAFGKRQGREFIWNDLLSLETGSLKLANGRVIEKTLYNRRTRQDEPALFVALTFERREVLDSSNIKPMNLIGVDRGENIPAVIALTDPEGCPLSRFKDSLGNPTHILRIGESYKEKQRTIQAKKEVEQRRAGGYSRKYASKAKNLADDMVRNTARDLLYYAVTQDAMLIFENLSRGFGRQGKRTFMAERQYTRMEDWLTAKLAYEGLPSKTYLSKTLAQYTSKTCSNCGFTITSADYDRVLEKLKKTATGWMTTINGKELKVEGQITYYNRYKRQNVVKDLSVELDRLSEESVNNDISSWTKGRSGEALSLLKKRFSHRPVQEKFVCLNCGFETHADEQAALNIARSWLFLRSQEYKKYQTNKTTGNTDKRAFVETWQSFYRKKLKEVWKPAV

SEQ ID NO: 42961 - protein, 978 aa, synthetic construct
  REGION 1..978: note = engineered CasX variant
QEIKRINKIRRRLVKDSNTKKAGKTGPMKTLLVRVMTPDLRERLENLRKKPENIPQPISNTSRANLNKLLTDYTEMKKAILHVYWEEFQKDPVGLMSRVAQPASKKIDQNKLKPEMDEKGNLTTAGFACSQCGQPLFVYKLEQVSEKGKAYTNYFGRCNVAEHEKLILLYQLKPEKDSDEAVTYSLGKFGQRALDFYSIHVTKESTHPVKPLAQIAGNRYASTPVGKALSDACMGTIASFLSKYQDIIIEHQKVVKGNQKRLESLRELAGKENLEYPSVTLPPQPHTKEGVDAYNEVIARVRMWVNLNLWQKLKLSRDDAKPLLRLKNFPSFPLVERQANEVDWWDMVCNVKKLINEKKEDGKVFWQNLAGYKRQEALRPYLSSEEDRKKGKKFARYQLGDLLLHLEKKHGEDWGKVYDEAWERIDKKVEGLSKHIKLEEERRSEDAQSKAALTDWLRAKASFVIEGLKEADKDEFCRCELKLQKWYGDLRGKPFAIEAENSILDISGFSKQYNCAFIWQKDGVKKLNLYLIINYFKGGKLRFKKIKPEAFEANRFYTVINKKSGEIVPMEVNFNFDDPNLIILPLAFGKRQGREFIWNDLLSLETGSLKLANGRVIEKTLYNRRTRQDEPALFVALTFERREVLDSSNIKPMNLIGVDRGENIPAVIALTDPEGCPLSRFKDSLGNPTHILRIGESYKEKQRTIQAKKEVEQRRAGGYSRKYASKAKNLADDMVRNTARDLLYYAVTQDAMLIFENLSRGFGRQGKRTFMAERQYTRMEDWLTAKLAYEGLPSKTYLSKTLAQYTSKTCSNCGFTITSADYDRVLEKLKKTATGWMTTINGKELKVEGQITYYNRYKRQNVVKDLSVELDRLSEESVNNDISSWTKGRSGEALSLLKKRFSHRPVQEKFVCLNCGFETHADEQAALNIARSWLFLRSQEYKKYQTNKTTGNTDKRAFVETWQSFYRKKLKEVWKPAV

SEQ ID NO: 42962 - protein, 978 aa, synthetic construct
  REGION 1..978: note = engineered CasX variant
QEIKRINKIRRRLVKDSNTKKAGKTGPMKTLLVRVMTPDLRERLENLRKKPENIPQPISNTSRANLNKLLTDYTEMKKAILHVYWEEFQKDPVGLMSRVAQPASKKIDQNKLKPEMDEKGNLTTAGFACSQCGQPLFVYKLEQVSEKGKAYTNYFGRCNVAEHEKLILLYQLKPEKDSDEAVTYSLGKFGQRALDFYSIHVTKESTHPVKPLAQIAGNRYASAPVGKALSDACMGTIASFLSKYQDIIIEHQKVVKGNQKRLESLRELAGKENLEYPSVTLPPQPHTKEGVDAYNEVIARVRMWVNLNLWQKLKLSRDDAKPLLRLKNFPSFPLVERQANEVDWWDMVCNVKKLINEKKEDGKVFWQNLAGYKRQEALRPYLSSEEDRKKGKKFARYQLGDLLLHLEKKHGEDWGKVYDEAWERIDKKVEGLSKHIKLEEERRSEDAQSKAALTDWLRAKASFVIEGLKEADKDEFCRCELKLQKWYGDLRGKPFAIEAENSILDISGFSKQYNCAFIWQKDGVKKLNLYLIINYFKGGKLRFKKIKPEAFEANRFYTVINKKSGEIVPMEVNFNFDDPNLIILPLAFGKRQGREFIWNDLLSLETGSLKLANGRVIEKTLYNRRTRQDEPALFVALTFERREVLDSSNIKPMNLIGVDRGENIPAVIALTDPEGCPLSRFKDSLGNPTHILRIGESYKEKQRTIQAKKEVEQRRAGGYSRKYASKAKNLADDMVRNTARDLLYYAVTQDAMLIFENLSRGFGRQGKRTFMAERQYTRMEDWLTAKLAYEGLPSKTYLSKTLAQYTSKTCSNCGFTITSADYDRVLEKLKKTATGWMTTINGKELKVEGQITYYNRYKRQNVVKDLSVELDRLSEESVNNDISSWTKGRSGEALSLLKKRFSHRPVQEKFVCLNCGFETHADEQAALNIARSWLFLRSQEYKKYQTNKTTGNTDKRAFVETWQSFYRKKLKEVWKPAV

SEQ ID NO: 42963 - protein, 978 aa, synthetic construct
  REGION 1..978: note = engineered CasX variant
QEIKRINKIRRRLVKDSNTKKAGKTGPMKTLLVRVMTPDLRERLENLRKKPENIPQPISNTSRANLNKLLTDYTEMKKAILHVYWEEFQKDPVGLMSRVAQPASKKIDQNKLKPEMDEKGNLTTAGFACSQCGQPLFVYKLEQVSEKGKAYTNYFGRCNVAEHEKLILLYQLKPEKDSDEAVTYSLGKFGQRALDFYSIHVTKESTHPVKPLAQIAGNRYASVPVGKALSDACMGTIASFLSKYQDIIIEHQKVVKGNQKRLESLRELAGKENLEYPSVTLPPQPHTKEGVDAYNEVIARVRMWVNLNLWQKLKLSRDDAKPLLRLKNFPSFPLVERQANEVDWWDMVCNVKKLINEKKEDGKVFWQNLAGYKRQEALRPYLSSEEDRKKGKKFARYQLGDLLLHLEKKHGEDWGKVYDEAWERIDKKVEGLSKHIKLEEERRSEDAQSKAALTDWLRAKASFVIEGLKEADKDEFCRCELKLQKWYGDLRGKPFAIEAENSILDISGFSKQYNCAFIWQKDGVKKLNLYLIINYFKGGKLRFKKIKPEAFEANRFYTVINKKSGEIVPMEVNFNFDDPNLIILPLAFGKRQGREFIWNDLLSLETGSLKLANGRVIEKTLYNRRTRQDEPALFVALTFERREVLDSSNIKPMNLIGVDRGENIPAVIALTDPEGCPLSRFKDSLGNPTHILRIGESYKEKQRTIQAKKEVEQRRAGGYSRKYASKAKNLADDMVRNTARDLLYYAVTQDAMLIFENLSRGFGRQGKRTFMAERQYTRMEDWLTAKLAYEGLPSKTYLSKTLAQYTSKTCSNCGFTITSADYDRVLEKLKKTATGWMTTINGKELKVEGQITYYNRYKRQNVVKDLSVELDRLSEESVNNDISSWTKGRSGEALSLLKKRFSHRPVQEKFVCLNCGFETHADEQAALNIARSWLFLRSQEYKKYQTNKTTGNTDKRAFVETWQSFYRKKLKEVWKPAV

SEQ ID NO: 42964 - protein, 978 aa, synthetic construct
  REGION 1..978: note = engineered CasX variant
QEIKRINKIRRRLVKDSNTKKAGKTGPMKTLLVRVMTPDLRERLENLRKKPENIPQPISNTSRANLNKLLTDYTEMKKAILHVYWEEFQKDPVGLMSRVAQPASKKIDQNKLKPEMDEKGNLTTAGFACSQCGQPLFVYKLEQVSEKGKAYTNYFGRCNVAEHEKLIKLYQLKPEKDSDEAVTYSLGKFGQRALDFYSIHVTKESTHPVKPLAQIAGNRYASGPVGKALSDACMGTIASFLSKYQDIIIEHQKVVKGNQKRLESLRELAGKENLEYPSVTLPPQPHTKEGVDAYNEVIARVRMWVNLNLWQKLKLSRDDAKPLLRLKNFPSFPLVERQANEVDWWDMVCNVKKLINEKKEDGKVFWQNLAGYKRQEALRPYLSSEEDRKKGKKFARYQLGDLLLHLEKKHGEDWGKVYDEAWERIDKKVEGLSKHIKLEEERRSEDAQSKAALTDWLRAKASFVIEGLKEADKDEFCRCELKLQKWYGDLRGKPFAIEAENSILDISGFSKQYNCAFIWQKDGVKKLNLYLIINYFKGGKLRFKKIKPEAFEANRFYTVINKKSGEIVPMEVNFNFDDPNLIILPLAFGKRQGREFIWNDLLSLETGSLKLANGRVIEKTLYNRRTRQDEPALFVALTFERREVLDSSNIKPMNLIGVDRGENIPAVIALTDPEGCPLSRFKDSLGNPTHILRIGESYKEKQRTIQAKKEVEQRRAGGYSRKYASKAKNLADDMVRNTARDLLYYAVTQDAMLIFENLSRGFGRQGKRTFMAERQYTRMEDWLTAKLAYEGLPSKTYLSKTLAQYTSKTCSNCGFTITSADYDRVLEKLKKTATGWMTTINGKELKVEGQITYYNRYKRQNVVKDLSVELDRLSEESVNNDISSWTKGRSGEALSLLKKRFSHRPVQEKFVCLNCGFETHADEQAALNIARSWLFLRSQEYKKYQTNKTTGNTDKRAFVETWQSFYRKKLKEVWKPAV

SEQ ID NO: 42965 - protein, 977 aa, synthetic construct
  REGION 1..977: note = engineered CasX variant
QEIKRINKIRRRLVKDSNTKKAGKTGPMKTLLVRVMTPDLRERLENLRKKPENIPQPISNTSRANLNKLLTDYTEMKKAILHVYWEEFQKDPVGLMSRVAQPASKKIDQNKLKPEMDEKGNLTTAGFACSQCGQPLFVYKLEQVSEKGKAYTNYFGRCNVAEHEKLILLYQLKPEKDSDEAVTYSLGKFGQRALDFYSIHVTKESTHPVKPLAQIAGNRYASPVGKALSDACMGTIASFLSKYQDIIIEHQKVVKGNQKRLESLRELAGKENLEYPSVTLPPQPHTKEGVDAYNEVIARVRMWVNLNLWQKLKLSRDDAKPLLRLKNFPSFPLVERQANEVDWWDMVCNVKKLINEKKEDGKVFWQNLAGYKRQEALRPYLSSEEDRKKGKKFARYQLGDLLLHLEKKHGEDWGKVYDEAWERIDKKVEGLSKHIKLEEERRSEDAQSKAALTDWLRAKASFVIEGLKEADKDEFCRCELKLQKWYGDLRGKPFAIEAENSILDISGFSKQYNCAFIWQKDGVKKLNLYLIINYFKGGKLRFKKIKPEAFEANRFYTVINKKSGEIVPMEVNFNFDDPNLIILPLAFGKRQGREFIWNDLLSLETGSLKLANGRVIEKTLYNRRTRQDEPALFVALTFERREVLDSSNIKPMNLIGVDRGENIPAVIALTDPEGCPLSRFKDSLGNPTHILRIGESYKEKQRTIQAKKEVEQRRAGGYSRKYASKAKNLADDMVRNTARDLLYYAVTQDAMLIFENLSRGFGRQGKRTFMAERQYTRMEDWLTAKLAYEGLPSKTYLSKTLAQYTSKTCSNCGFTITSADYDRVLEKLKKTATGWMTTINGKELKVEGQITYYNRYKRQNVVKDLSVELDRLSEESVNNDISSWTKGRSGEALSLLKKRFSHRPVQEKFVCLNCGFETHADEQAALNIARSWLFLRSQEYKKYQTNKTTGNTDKRAFVETWQSFYRKKLKEVWKPAV

SEQ ID NO: 42966 - protein, 978 aa, synthetic construct
  REGION 1..978: note = engineered CasX variant
QEIKRINKIRRRLVKDSNTKKAGKTGPMKTLLVRVMTPDLRERLENLRKKPENIPQPISNTSRANLNKLLTDYTEMKKAILHVYWEEFQKDPVGLMSRVAQPASKKIDQNKLKPEMDEKGNLTTAGFACSQCGQPLFVYKLEQVSEKGKAYTNYFGRCNVAEHEKLILLYQLKPEKDSDEAVTYSLGKFGQRALDFYSIHVTKESTHPVKPLAQIAGNRYASYPVGKALSDACMGTIASFLSKYQDIIIEHQKVVKGNQKRLESLRELAGKENLEYPSVTLPPQPHTKEGVDAYNEVIARVRMWVNLNLWQKLKLSRDDAKPLLRLKGFPSFPLVERQANEVDWWDMVCNVKKLINEKKEDGKVFWQNLAGYKRQEALRPYLSSEEDRKKGKKFARYQLGDLLNHLEKKHGEDWGKVYDEAWERIDKKVEGLSKHIKLEEERRSEDAQSKAALTDWLRAKASFVIEGLKEADKDEFCRCELKLQKWYGDLRGKPFAIEAENSILDISGFSKQYNCAFIWQKDGVKKLNLYLIINYFKGGKLRFKKIKPEAFEANRFYTVINKKSGEIVPMEVNFNFDDPNLIILPLAFGKRQGREFIWNDLLSLETGSLKLANGRVIEKTLYNRRTRQDEPALFVALTFERREVLDSSNIKPMNLIGVDRGENIPAVIALTDPEGCPLSRFKDSLGNPTHILRIGESYKEKQRTIQAKKEVEQRRAGGYSRKYASKAKNLADDMVRNTARDLLYYAVTQDAMLIFENLSRGFGRQGKRTFMAERQYTRMEDWLTAKLAYEGLPSKTYLSKTLAQYTSKTCSNCGFTITSADYDRVLEKLKKTATGWMTTINGKELKVEGQITYYNRYKRQNVVKDLSVELDRLSEESVNNDISSWTKGRSGEALSLLKKRFSHRPVQEKFVCLNCGFETHADEQAALNIARSWLFLRSQEYKKYQTNKTTGNTDKRAFVETWQSFYRKKLKEVWKPAV

SEQ ID NO: 42967 - protein, 978 aa, synthetic construct
  REGION 1..978: note = engineered CasX variant
QEIKRINKIRRRLVKDSNTKKAGKTGPMKTLLVRVMTPDLRERLENLRKKPENIPQPISNTSRANLNKLLTDYTEMKKAILHVYWEEFQKDPVGLMSRVAQPASKKIDQNKLKPEMDEKGNLTTAGFACSQCGQPLFVYKLEQVSEKGKAYTNYFGRCNVAEHEKLILLYQLKPEKDSDEAVTYSLGKFGQRALDFYSIHVTKESTHPVKPLAQIAGNRYASHPVGKALSDACMGTIASFLSKYQDIIIEHQKVVKGNQKRLESLRELAGKENLEYPSVTLPPQPHTKEGVDAYNEVIARVRMWVNLNLWQKLKLSRDDAKPLLRLKGFPSFPLVERQANEVDWWDMVCNVKKLINEKKEDGKVFWQNLAGYKRQEALRPYLSSEEDRKKGKKFARYQLGDLLNHLEKKHGEDWGKVYDEAWERIDKKVEGLSKHIKLEEERRSEDAQSKAALTDWLRAKASFVIEGLKEADKDEFCRCELKLQKWYGDLRGKPFAIEAENSILDISGFSKQYNCAFIWQKDGVKKLNLYLIINYFKGGKLRFKKIKPEAFEANRFYTVINKKSGEIVPMEVNFNFDDPNLIILPLAFGKRQGREFIWNDLLSLETGSLKLANGRVIEKTLYNRRTRQDEPALFVALTFERREVLDSSNIKPMNLIGVDRGENIPAVIALTDPEGCPLSRFKDSLGNPTHILRIGESYKEKQRTIQAKKEVEQRRAGGYSRKYASKAKNLADDMVRNTARDLLYYAVTQDAMLIFENLSRGFGRQGKRTFMAERQYTRMEDWLTAKLAYEGLPSKTYLSKTLAQYTSKTCSNCGFTITSADYDRVLEKLKKTATGWMTTINGKELKVEGQITYYNRYKRQNVVKDLSVELDRLSEESVNNDISSWTKGRSGEALSLLKKRFSHRPVQEKFVCLNCGFETHADEQAALNIARSWLFLRSQEYKKYQTNKTTGNTDKRAFVETWQSFYRKKLKEVWKPAV

SEQ ID NO: 42968 - protein, 978 aa, synthetic construct
  REGION 1..978: note = engineered CasX variant
QEIKRINKIRRRLVKDSNTKKAGKTGPMKTLLVRVMTPDLRERLENLRKKPENIPQPISNTSRANLNKLLTDYTEMKKAILHVYWEEFQKDPVGLMSRVAQPASKKIDQNKLKPEMDEKGNLTTAGFACSQCGQPLFVYKLEQVSEKGKAYTNYFGRCNVAEHEKLILLYQLKPEKDSDEAVTYSLGKFGQRALDFYSIHVTKESTHPVKPLAQIAGNRYASSPVGKALSDACMGTIASFLSKYQDIIIEHQKVVKGNQKRLESLRELAGKENLEYPSVTLPPQPHTKEGVDAYNEVIARVRMWVNLNLWQKLKLSRDDAKPLLRLKGFPSFPLVERQANEVDWWDMVCNVKKLINEKKEDGKVFWQNLAGYKRQEALRPYLSSEEDRKKGKKFARYQLGDLLNHLEKKHGEDWGKVYDEAWERIDKKVEGLSKHIKLEEERRSEDAQSKAALTDWLRAKASFVIEGLKEADKDEFCRCELKLQKWYGDLRGKPFAIEAENSILDISGFSKQYNCAFIWQKDGVKKLNLYLIINYFKGGKLRFKKIKPEAFEANRFYTVINKKSGEIVPMEVNFNFDDPNLIILPLAFGKRQGREFIWNDLLSLETGSLKLANGRVIEKTLYNRRTRQDEPALFVALTFERREVLDSSNIKPMNLIGVDRGENIPAVIALTDPEGCPLSRFKDSLGNPTHILRIGESYKEKQRTIQAKKEVEQRRAGGYSRKYASKAKNLADDMVRNTARDLLYYAVTQDAMLIFENLSRGFGRQGKRTFMAERQYTRMEDWLTAKLAYEGLPSKTYLSKTLAQYTSKTCSNCGFTITSADYDRVLEKLKKTATGWMTTINGKELKVEGQITYYNRYKRQNVVKDLSVELDRLSEESVNNDISSWTKGRSGEALSLLKKRFSHRPVQEKFVCLNCGFETHADEQAALNIARSWLFLRSQEYKKYQTNKTTGNTDKRAFVETWQSFYRKKLKEVWKPAV

SEQ ID NO: 42969 - protein, 978 aa, synthetic construct
  REGION 1..978: note = engineered CasX variant
QEIKRINKIRRRLVKDSNTKKAGKTGPMKTLLVRVMTPDLRERLENLRKKPENIPQPISNTSRANLNKLLTDYTEMKKAILHVYWEEFQKDPVGLMSRVAQPASKKIDQNKLKPEMDEKGNLTTAGFACSQCGQPLFVYKLEQVSEKGKAYTNYFGRCNVAEHEKLILLYQLKPEKDSDEAVTYSLGKFGQRALDFYSIHVTKESTHPVKPLAQIAGNRYASTPVGKALSDACMGTIASFLSKYQDIIIEHQKVVKGNQKRLESLRELAGKENLEYPSVTLPPQPHTKEGVDAYNEVIARVRMWVNLNLWQKLKLSRDDAKPLLRLKGFPSFPLVERQANEVDWWDMVCNVKKLINEKKEDGKVFWQNLAGYKRQEALRPYLSSEEDRKKGKKFARYQLGDLLNHLEKKHGEDWGKVYDEAWERIDKKVEGLSKHIKLEEERRSEDAQSKAALTDWLRAKASFVIEGLKEADKDEFCRCELKLQKWYGDLRGKPFAIEAENSILDISGFSKQYNCAFIWQKDGVKKLNLYLIINYFKGGKLRFKKIKPEAFEANRFYTVINKKSGEIVPMEVNFNFDDPNLIILPLAFGKRQGREFIWNDLLSLETGSLKLANGRVIEKTLYNRRTRQDEPALFVALTFERREVLDSSNIKPMNLIGVDRGENIPAVIALTDPEGCPLSRFKDSLGNPTHILRIGESYKEKQRTIQAKKEVEQRRAGGYSRKYASKAKNLADDMVRNTARDLLYYAVTQDAMLIFENLSRGFGRQGKRTFMAERQYTRMEDWLTAKLAYEGLPSKTYLSKTLAQYTSKTCSNCGFTITSADYDRVLEKLKKTATGWMTTINGKELKVEGQITYYNRYKRQNVVKDLSVELDRLSEESVNNDISSWTKGRSGEALSLLKKRFSHRPVQEKFVCLNCGFETHADEQAALNIARSWLFLRSQEYKKYQTNKTTGNTDKRAFVETWQSFYRKKLKEVWKPAV

SEQ ID NO: 42970 - protein, 978 aa, synthetic construct
  REGION 1..978: note = engineered CasX variant
QEIKRINKIRRRLVKDSNTKKAGKTGPMKTLLVRVMTPDLRERLENLRKKPENIPQPISNTSRANLNKLLTDYTEMKKAILHVYWEEFQKDPVGLMSRVAQPASKKIDQNKLKPEMDEKGNLTTAGFACSQCGQPLFVYKLEQVSEKGKAYTNYFGRCNVAEHEKLILLYQLKPEKDSDEAVTYSLGKFGQRALDFYSIHVTKESTHPVKPLAQIAGNRYASAPVGKALSDACMGTIASFLSKYQDIIIEHQKVVKGNQKRLESLRELAGKENLEYPSVTLPPQPHTKEGVDAYNEVIARVRMWVNLNLWQKLKLSRDDAKPLLRLKGFPSFPLVERQANEVDWWDMVCNVKKLINEKKEDGKVFWQNLAGYKRQEALRPYLSSEEDRKKGKKFARYQLGDLLNHLEKKHGEDWGKVYDEAWERIDKKVEGLSKHIKLEEERRSEDAQSKAALTDWLRAKASFVIEGLKEADKDEFCRCELKLQKWYGDLRGKPFAIEAENSILDISGFSKQYNCAFIWQKDGVKKLNLYLIINYFKGGKLRFKKIKPEAFEANRFYTVINKKSGEIVPMEVNFNFDDPNLIILPLAFGKRQGREFIWNDLLSLETGSLKLANGRVIEKTLYNRRTRQDEPALFVALTFERREVLDSSNIKPMNLIGVDRGENIPAVIALTDPEGCPLSRFKDSLGNPTHILRIGESYKEKQRTIQAKKEVEQRRAGGYSRKYASKAKNLADDMVRNTARDLLYYAVTQDAMLIFENLSRGFGRQGKRTFMAERQYTRMEDWLTAKLAYEGLPSKTYLSKTLAQYTSKTCSNCGFTITSADYDRVLEKLKKTATGWMTTINGKELKVEGQITYYNRYKRQNVVKDLSVELDRLSEESVNNDISSWTKGRSGEALSLLKKRFSHRPVQEKFVCLNCGFETHADEQAALNIARSWLFLRSQEYKKYQTNKTTGNTDKRAFVETWQSFYRKKLKEVWKPAV

SEQ ID NO: 42971 - protein, 978 aa, synthetic construct
  REGION 1..978: note = engineered CasX variant
QEIKRINKIRRRLVKDSNTKKAGKTGPMKTLLVRVMTPDLRERLENLRKKPENIPQPISNTSRANLNKLLTDYTEMKKAILHVYWEEFQKDPVGLMSRVAQPASKKIDQNKLKPEMDEKGNLTTAGFACSQCGQPLFVYKLEQVSEKGKAYTNYFGRCNVAEHEKLILLYQLKPEKDSDEAVTYSLGKFGQRALDFYSIHVTKESTHPVKPLAQIAGNRYASVPVGKALSDACMGTIASFLSKYQDIIIEHQKVVKGNQKRLESLRELAGKENLEYPSVTLPPQPHTKEGVDAYNEVIARVRMWVNLNLWQKLKLSRDDAKPLLRLKGFPSFPLVERQANEVDWWDMVCNVKKLINEKKEDGKVFWQNLAGYKRQEALRPYLSSEEDRKKGKKFARYQLGDLLNHLEKKHGEDWGKVYDEAWERIDKKVEGLSKHIKLEEERRSEDAQSKAALTDWLRAKASFVIEGLKEADKDEFCRCELKLQKWYGDLRGKPFAIEAENSILDISGFSKQYNCAFIWQKDGVKKLNLYLIINYFKGGKLRFKKIKPEAFEANRFYTVINKKSGEIVPMEVNFNFDDPNLIILPLAFGKRQGREFIWNDLLSLETGSLKLANGRVIEKTLYNRRTRQDEPALFVALTFERREVLDSSNIKPMNLIGVDRGENIPAVIALTDPEGCPLSRFKDSLGNPTHILRIGESYKEKQRTIQAKKEVEQRRAGGYSRKYASKAKNLADDMVRNTARDLLYYAVTQDAMLIFENLSRGFGRQGKRTFMAERQYTRMEDWLTAKLAYEGLPSKTYLSKTLAQYTSKTCSNCGFTITSADYDRVLEKLKKTATGWMTTINGKELKVEGQITYYNRYKRQNVVKDLSVELDRLSEESVNNDISSWTKGRSGEALSLLKKRFSHRPVQEKFVCLNCGFETHADEQAALNIARSWLFLRSQEYKKYQTNKTTGNTDKRAFVETWQSFYRKKLKEVWKPAV

SEQ ID NO: 42972 - protein, 978 aa, synthetic construct
  REGION 1..978: note = engineered CasX variant
QEIKRINKIRRRLVKDSNTKKAGKTGPMKTLLVRVMTPDLRERLENLRKKPENIPQPISNTSRANLNKLLTDYTEMKKAILHVYWEEFQKDPVGLMSRVAQPASKKIDQNKLKPEMDEKGNLTTAGFACSQCGQPLFVYKLEQVSEKGKAYTNYFGRCNVAEHEKLIKLYQLKPEKDSDEAVTYSLGKFGQRALDFYSIHVTKESTHPVKPLAQIAGNRYASGPVGKALSDACMGTIASFLSKYQDIIIEHQKVVKGNQKRLESLRELAGKENLEYPSVTLPPQPHTKEGVDAYNEVIARVRMWVNLNLWQKLKLSRDDAKPLLRLKGFPSFPLVERQANEVDWWDMVCNVKKLINEKKEDGKVFWQNLAGYKRQEALRPYLSSEEDRKKGKKFARYQLGDLLNHLEKKHGEDWGKVYDEAWERIDKKVEGLSKHIKLEEERRSEDAQSKAALTDWLRAKASFVIEGLKEADKDEFCRCELKLQKWYGDLRGKPFAIEAENSILDISGFSKQYNCAFIWQKDGVKKLNLYLIINYFKGGKLRFKKIKPEAFEANRFYTVINKKSGEIVPMEVNFNFDDPNLIILPLAFGKRQGREFIWNDLLSLETGSLKLANGRVIEKTLYNRRTRQDEPALFVALTFERREVLDSSNIKPMNLIGVDRGENIPAVIALTDPEGCPLSRFKDSLGNPTHILRIGESYKEKQRTIQAKKEVEQRRAGGYSRKYASKAKNLADDMVRNTARDLLYYAVTQDAMLIFENLSRGFGRQGKRTFMAERQYTRMEDWLTAKLAYEGLPSKTYLSKTLAQYTSKTCSNCGFTITSADYDRVLEKLKKTATGWMTTINGKELKVEGQITYYNRYKRQNVVKDLSVELDRLSEESVNNDISSWTKGRSGEALSLLKKRFSHRPVQEKFVCLNCGFETHADEQAALNIARSWLFLRSQEYKKYQTNKTTGNTDKRAFVETWQSFYRKKLKEVWKPAV

SEQ ID NO: 42973 - protein, 977 aa, synthetic construct
  REGION 1..977: note = engineered CasX variant
QEIKRINKIRRRLVKDSNTKKAGKTGPMKTLLVRVMTPDLRERLENLRKKPENIPQPISNTSRANLNKLLTDYTEMKKAILHVYWEEFQKDPVGLMSRVAQPASKKIDQNKLKPEMDEKGNLTTAGFACSQCGQPLFVYKLEQVSEKGKAYTNYFGRCNVAEHEKLILLYQLKPEKDSDEAVTYSLGKFGQRALDFYSIHVTKESTHPVKPLAQIAGNRYASPVGKALSDACMGTIASFLSKYQDIIIEHQKVVKGNQKRLESLRELAGKENLEYPSVTLPPQPHTKEGVDAYNEVIARVRMWVNLNLWQKLKLSRDDAKPLLRLKGFPSFPLVERQANEVDWWDMVCNVKKLINEKKEDGKVFWQNLAGYKRQEALRPYLSSEEDRKKGKKFARYQLGDLLNHLEKKHGEDWGKVYDEAWERIDKKVEGLSKHIKLEEERRSEDAQSKAALTDWLRAKASFVIEGLKEADKDEFCRCELKLQKWYGDLRGKPFAIEAENSILDISGFSKQYNCAFIWQKDGVKKLNLYLIINYFKGGKLRFKKIKPEAFEANRFYTVINKKSGEIVPMEVNFNFDDPNLIILPLAFGKRQGREFIWNDLLSLETGSLKLANGRVIEKTLYNRRTRQDEPALFVALTFERREVLDSSNIKPMNLIGVDRGENIPAVIALTDPEGCPLSRFKDSLGNPTHILRIGESYKEKQRTIQAKKEVEQRRAGGYSRKYASKAKNLADDMVRNTARDLLYYAVTQDAMLIFENLSRGFGRQGKRTFMAERQYTRMEDWLTAKLAYEGLPSKTYLSKTLAQYTSKTCSNCGFTITSADYDRVLEKLKKTATGWMTTINGKELKVEGQITYYNRYKRQNVVKDLSVELDRLSEESVNNDISSWTKGRSGEALSLLKKRFSHRPVQEKFVCLNCGFETHADEQAALNIARSWLFLRSQEYKKYQTNKTTGNTDKRAFVETWQSFYRKKLKEVWKPAV

SEQ ID NO: 42974 - protein, 978 aa, synthetic construct
  REGION 1..978: note = engineered CasX variant
QEIKRINKIRRRLVKDSNTKKAGKTGPMKTLLVRVMTPDLRERLENLRKKPENIPQPISNTSRANLNKLLTDYTEMKKAILHVYWEEFQKDPVGLMSRVAQPASKKIDQNKLKPEMDEKGNLTTAGFACSQCGQPLFVYKLEQVSEKGKAYTNYFGRCNVAEHEKLILLYQLKPEKDSDEAVTYSLGKFGQRALDFYSIHVTKESTHPVKPLAQIAGNRYASYPVGKALSDACMGTIASFLSKYQDIIIEHQKVVKGNQKRLESLRELAGKENLEYPSVTLPPQPHTKEGVDAYNEVIARVRMWVNLNLWQKLKLSRDDAKPLLRLKGFPSFPLVERQANEVDWWDMVCNVKKLINEKKEDGKVFWQNLAGYKRQEALRPYLSSEEDRKKGKKFARYQLGDLLWHLEKKHGEDWGKVYDEAWERIDKKVEGLSKHIKLEEERRSEDAQSKAALTDWLRAKASFVIEGLKEADKDEFCRCELKLQKWYGDLRGKPFAIEAENSILDISGFSKQYNCAFIWQKDGVKKLNLYLIINYFKGGKLRFKKIKPEAFEANRFYTVINKKSGEIVPMEVNFNFDDPNLIILPLAFGKRQGREFIWNDLLSLETGSLKLANGRVIEKTLYNRRTRQDEPALFVALTFERREVLDSSNIKPMNLIGVDRGENIPAVIALTDPEGCPLSRFKDSLGNPTHILRIGESYKEKQRTIQAKKEVEQRRAGGYSRKYASKAKNLADDMVRNTARDLLYYAVTQDAMLIFENLSRGFGRQGKRTFMAERQYTRMEDWLTAKLAYEGLPSKTYLSKTLAQYTSKTCSNCGFTITSADYDRVLEKLKKTATGWMTTINGKELKVEGQITYYNRYKRQNVVKDLSVELDRLSEESVNNDISSWTKGRSGEALSLLKKRFSHRPVQEKFVCLNCGFETHADEQAALNIARSWLFLRSQEYKKYQTNKTTGNTDKRAFVETWQSFYRKKLKEVWKPAV

SEQ ID NO: 42975 - protein, 978 aa, synthetic construct
  REGION 1..978: note = engineered CasX variant
QEIKRINKIRRRLVKDSNTKKAGKTGPMKTLLVRVMTPDLRERLENLRKKPENIPQPISNTSRANLNKLLTDYTEMKKAILHVYWEEFQKDPVGLMSRVAQPASKKIDQNKLKPEMDEKGNLTTAGFACSQCGQPLFVYKLEQVSEKGKAYTNYFGRCNVAEHEKLILLYQLKPEKDSDEAVTYSLGKFGQRALDFYSIHVTKESTHPVKPLAQIAGNRYASHPVGKALSDACMGTIASFLSKYQDIIIEHQKVVKGNQKRLESLRELAGKENLEYPSVTLPPQPHTKEGVDAYNEVIARVRMWVNLNLWQKLKLSRDDAKPLLRLKGFPSFPLVERQANEVDWWDMVCNVKKLINEKKEDGKVFWQNLAGYKRQEALRPYLSSEEDRKKGKKFARYQLGDLLWHLEKKHGEDWGKVYDEAWERIDKKVEGLSKHIKLEEERRSEDAQSKAALTDWLRAKASFVIEGLKEADKDEFCRCELKLQKWYGDLRGKPFAIEAENSILDISGFSKQYNCAFIWQKDGVKKLNLYLIINYFKGGKLRFKKIKPEAFEANRFYTVINKKSGEIVPMEVNFNFDDPNLIILPLAFGKRQGREFIWNDLLSLETGSLKLANGRVIEKTLYNRRTRQDEPALFVALTFERREVLDSSNIKPMNLIGVDRGENIPAVIALTDPEGCPLSRFKDSLGNPTHILRIGESYKEKQRTIQAKKEVEQRRAGGYSRKYASKAKNLADDMVRNTARDLLYYAVTQDAMLIFENLSRGFGRQGKRTFMAERQYTRMEDWLTAKLAYEGLPSKTYLSKTLAQYTSKTCSNCGFTITSADYDRVLEKLKKTATGWMTTINGKELKVEGQITYYNRYKRQNVVKDLSVELDRLSEESVNNDISSWTKGRSGEALSLLKKRFSHRPVQEKFVCLNCGFETHADEQAALNIARSWLFLRSQEYKKYQTNKTTGNTDKRAFVETWQSFYRKKLKEVWKPAV

SEQ ID NO: 42976 - protein, 978 aa, synthetic construct
  REGION 1..978: note = engineered CasX variant
QEIKRINKIRRRLVKDSNTKKAGKTGPMKTLLVRVMTPDLRERLENLRKKPENIPQPISNTSRANLNKLLTDYTEMKKAILHVYWEEFQKDPVGLMSRVAQPASKKIDQNKLKPEMDEKGNLTTAGFACSQCGQPLFVYKLEQVSEKGKAYTNYFGRCNVAEHEKLILLYQLKPEKDSDEAVTYSLGKFGQRALDFYSIHVTKESTHPVKPLAQIAGNRYASSPVGKALSDACMGTIASFLSKYQDIIIEHQKVVKGNQKRLESLRELAGKENLEYPSVTLPPQPHTKEGVDAYNEVIARVRMWVNLNLWQKLKLSRDDAKPLLRLKGFPSFPLVERQANEVDWWDMVCNVKKLINEKKEDGKVFWQNLAGYKRQEALRPYLSSEEDRKKGKKFARYQLGDLLWHLEKKHGEDWGKVYDEAWERIDKKVEGLSKHIKLEEERRSEDAQSKAALTDWLRAKASFVIEGLKEADKDEFCRCELKLQKWYGDLRGKPFAIEAENSILDISGFSKQYNCAFIWQKDGVKKLNLYLIINYFKGGKLRFKKIKPEAFEANRFYTVINKKSGEIVPMEVNFNFDDPNLIILPLAFGKRQGREFIWNDLLSLETGSLKLANGRVIEKTLYNRRTRQDEPALFVALTFERREVLDSSNIKPMNLIGVDRGENIPAVIALTDPEGCPLSRFKDSLGNPTHILRIGESYKEKQRTIQAKKEVEQRRAGGYSRKYASKAKNLADDMVRNTARDLLYYAVTQDAMLIFENLSRGFGRQGKRTFMAERQYTRMEDWLTAKLAYEGLPSKTYLSKTLAQYTSKTCSNCGFTITSADYDRVLEKLKKTATGWMTTINGKELKVEGQITYYNRYKRQNVVKDLSVELDRLSEESVNNDISSWTKGRSGEALSLLKKRFSHRPVQEKFVCLNCGFETHADEQAALNIARSWLFLRSQEYKKYQTNKTTGNTDKRAFVETWQSFYRKKLKEVWKPAV

SEQ ID NO: 42977 - protein, 978 aa, synthetic construct
  REGION 1..978: note = engineered CasX variant
QEIKRINKIRRRLVKDSNTKKAGKTGPMKTLLVRVMTPDLRERLENLRKKPENIPQPISNTSRANLNKLLTDYTEMKKAILHVYWEEFQKDPVGLMSRVAQPASKKIDQNKLKPEMDEKGNLTTAGFACSQCGQPLFVYKLEQVSEKGKAYTNYFGRCNVAEHEKLILLYQLKPEKDSDEAVTYSLGKFGQRALDFYSIHVTKESTHPVKPLAQIAGNRYASTPVGKALSDACMGTIASFLSKYQDIIIEHQKVVKGNQKRLESLRELAGKENLEYPSVTLPPQPHTKEGVDAYNEVIARVRMWVNLNLWQKLKLSRDDAKPLLRLKGFPSFPLVERQANEVDWWDMVCNVKKLINEKKEDGKVFWQNLAGYKRQEALRPYLSSEEDRKKGKKFARYQLGDLLWHLEKKHGEDWGKVYDEAWERIDKKVEGLSKHIKLEEERRSEDAQSKAALTDWLRAKASFVIEGLKEADKDEFCRCELKLQKWYGDLRGKPFAIEAENSILDISGFSKQYNCAFIWQKDGVKKLNLYLIINYFKGGKLRFKKIKPEAFEANRFYTVINKKSGEIVPMEVNFNFDDPNLIILPLAFGKRQGREFIWNDLLSLETGSLKLANGRVIEKTLYNRRTRQDEPALFVALTFERREVLDSSNIKPMNLIGVDRGENIPAVIALTDPEGCPLSRFKDSLGNPTHILRIGESYKEKQRTIQAKKEVEQRRAGGYSRKYASKAKNLADDMVRNTARDLLYYAVTQDAMLIFENLSRGFGRQGKRTFMAERQYTRMEDWLTAKLAYEGLPSKTYLSKTLAQYTSKTCSNCGFTITSADYDRVLEKLKKTATGWMTTINGKELKVEGQITYYNRYKRQNVVKDLSVELDRLSEESVNNDISSWTKGRSGEALSLLKKRFSHRPVQEKFVCLNCGFETHADEQAALNIARSWLFLRSQEYKKYQTNKTTGNTDKRAFVETWQSFYRKKLKEVWKPAV

SEQ ID NO: 42978 - protein, 978 aa, synthetic construct
  REGION 1..978: note = engineered CasX variant
QEIKRINKIRRRLVKDSNTKKAGKTGPMKTLLVRVMTPDLRERLENLRKKPENIPQPISNTSRANLNKLLTDYTEMKKAILHVYWEEFQKDPVGLMSRVAQPASKKIDQNKLKPEMDEKGNLTTAGFACSQCGQPLFVYKLEQVSEKGKAYTNYFGRCNVAEHEKLILLYQLKPEKDSDEAVTYSLGKFGQRALDFYSIHVTKESTHPVKPLAQIAGNRYASAPVGKALSDACMGTIASFLSKYQDIIIEHQKVVKGNQKRLESLRELAGKENLEYPSVTLPPQPHTKEGVDAYNEVIARVRMWVNLNLWQKLKLSRDDAKPLLRLKGFPSFPLVERQANEVDWWDMVCNVKKLINEKKEDGKVFWQNLAGYKRQEALRPYLSSEEDRKKGKKFARYQLGDLLWHLEKKHGEDWGKVYDEAWERIDKKVEGLSKHIKLEEERRSEDAQSKAALTDWLRAKASFVIEGLKEADKDEFCRCELKLQKWYGDLRGKPFAIEAENSILDISGFSKQYNCAFIWQKDGVKKLNLYLIINYFKGGKLRFKKIKPEAFEANRFYTVINKKSGEIVPMEVNFNFDDPNLIILPLAFGKRQGREFIWNDLLSLETGSLKLANGRVIEKTLYNRRTRQDEPALFVALTFERREVLDSSNIKPMNLIGVDRGENIPAVIALTDPEGCPLSRFKDSLGNPTHILRIGESYKEKQRTIQAKKEVEQRRAGGYSRKYASKAKNLADDMVRNTARDLLYYAVTQDAMLIFENLSRGFGRQGKRTFMAERQYTRMEDWLTAKLAYEGLPSKTYLSKTLAQYTSKTCSNCGFTITSADYDRVLEKLKKTATGWMTTINGKELKVEGQITYYNRYKRQNVVKDLSVELDRLSEESVNNDISSWTKGRSGEALSLLKKRFSHRPVQEKFVCLNCGFETHADEQAALNIARSWLFLRSQEYKKYQTNKTTGNTDKRAFVETWQSFYRKKLKEVWKPAV

SEQ ID NO: 42979 - protein, 978 aa, synthetic construct
  REGION 1..978: note = engineered CasX variant
QEIKRINKIRRRLVKDSNTKKAGKTGPMKTLLVRVMTPDLRERLENLRKKPENIPQPISNTSRANLNKLLTDYTEMKKAILHVYWEEFQKDPVGLMSRVAQPASKKIDQNKLKPEMDEKGNLTTAGFACSQCGQPLFVYKLEQVSEKGKAYTNYFGRCNVAEHEKLILLYQLKPEKDSDEAVTYSLGKFGQRALDFYSIHVTKESTHPVKPLAQIAGNRYASVPVGKALSDACMGTIASFLSKYQDIIIEHQKVVKGNQKRLESLRELAGKENLEYPSVTLPPQPHTKEGVDAYNEVIARVRMWVNLNLWQKLKLSRDDAKPLLRLKGFPSFPLVERQANEVDWWDMVCNVKKLINEKKEDGKVFWQNLAGYKRQEALRPYLSSEEDRKKGKKFARYQLGDLLWHLEKKHGEDWGKVYDEAWERIDKKVEGLSKHIKLEEERRSEDAQSKAALTDWLRAKASFVIEGLKEADKDEFCRCELKLQKWYGDLRGKPFAIEAENSILDISGFSKQYNCAFIWQKDGVKKLNLYLIINYFKGGKLRFKKIKPEAFEANRFYTVINKKSGEIVPMEVNFNFDDPNLIILPLAFGKRQGREFIWNDLLSLETGSLKLANGRVIEKTLYNRRTRQDEPALFVALTFERREVLDSSNIKPMNLIGVDRGENIPAVIALTDPEGCPLSRFKDSLGNPTHILRIGESYKEKQRTIQAKKEVEQRRAGGYSRKYASKAKNLADDMVRNTARDLLYYAVTQDAMLIFENLSRGFGRQGKRTFMAERQYTRMEDWLTAKLAYEGLPSKTYLSKTLAQYTSKTCSNCGFTITSADYDRVLEKLKKTATGWMTTINGKELKVEGQITYYNRYKRQNVVKDLSVELDRLSEESVNNDISSWTKGRSGEALSLLKKRFSHRPVQEKFVCLNCGFETHADEQAALNIARSWLFLRSQEYKKYQTNKTTGNTDKRAFVETWQSFYRKKLKEVWKPAV

SEQ ID NO: 42980 - protein, 978 aa, synthetic construct
  REGION 1..978: note = engineered CasX variant
QEIKRINKIRRRLVKDSNTKKAGKTGPMKTLLVRVMTPDLRERLENLRKKPENIPQPISNTSRANLNKLLTDYTEMKKAILHVYWEEFQKDPVGLMSRVAQPASKKIDQNKLKPEMDEKGNLTTAGFACSQCGQPLFVYKLEQVSEKGKAYTNYFGRCNVAEHEKLIKLYQLKPEKDSDEAVTYSLGKFGQRALDFYSIHVTKESTHPVKPLAQIAGNRYASGPVGKALSDACMGTIASFLSKYQDIIIEHQKVVKGNQKRLESLRELAGKENLEYPSVTLPPQPHTKEGVDAYNEVIARVRMWVNLNLWQKLKLSRDDAKPLLRLKGFPSFPLVERQANEVDWWDMVCNVKKLINEKKEDGKVFWQNLAGYKRQEALRPYLSSEEDRKKGKKFARYQLGDLLWHLEKKHGEDWGKVYDEAWERIDKKVEGLSKHIKLEEERRSEDAQSKAALTDWLRAKASFVIEGLKEADKDEFCRCELKLQKWYGDLRGKPFAIEAENSILDISGFSKQYNCAFIWQKDGVKKLNLYLIINYFKGGKLRFKKIKPEAFEANRFYTVINKKSGEIVPMEVNFNFDDPNLIILPLAFGKRQGREFIWNDLLSLETGSLKLANGRVIEKTLYNRRTRQDEPALFVALTFERREVLDSSNIKPMNLIGVDRGENIPAVIALTDPEGCPLSRFKDSLGNPTHILRIGESYKEKQRTIQAKKEVEQRRAGGYSRKYASKAKNLADDMVRNTARDLLYYAVTQDAMLIFENLSRGFGRQGKRTFMAERQYTRMEDWLTAKLAYEGLPSKTYLSKTLAQYTSKTCSNCGFTITSADYDRVLEKLKKTATGWMTTINGKELKVEGQITYYNRYKRQNVVKDLSVELDRLSEESVNNDISSWTKGRSGEALSLLKKRFSHRPVQEKFVCLNCGFETHADEQAALNIARSWLFLRSQEYKKYQTNKTTGNTDKRAFVETWQSFYRKKLKEVWKPAV

SEQ ID NO: 42981 - protein, 977 aa, synthetic construct
  REGION 1..977: note = engineered CasX variant
QEIKRINKIRRRLVKDSNTKKAGKTGPMKTLLVRVMTPDLRERLENLRKKPENIPQPISNTSRANLNKLLTDYTEMKKAILHVYWEEFQKDPVGLMSRVAQPASKKIDQNKLKPEMDEKGNLTTAGFACSQCGQPLFVYKLEQVSEKGKAYTNYFGRCNVAEHEKLILLYQLKPEKDSDEAVTYSLGKFGQRALDFYSIHVTKESTHPVKPLAQIAGNRYASPVGKALSDACMGTIASFLSKYQDIIIEHQKVVKGNQKRLESLRELAGKENLEYPSVTLPPQPHTKEGVDAYNEVIARVRMWVNLNLWQKLKLSRDDAKPLLRLKGFPSFPLVERQANEVDWWDMVCNVKKLINEKKEDGKVFWQNLAGYKRQEALRPYLSSEEDRKKGKKFARYQLGDLLWHLEKKHGEDWGKVYDEAWERIDKKVEGLSKHIKLEEERRSEDAQSKAALTDWLRAKASFVIEGLKEADKDEFCRCELKLQKWYGDLRGKPFAIEAENSILDISGFSKQYNCAFIWQKDGVKKLNLYLIINYFKGGKLRFKKIKPEAFEANRFYTVINKKSGEIVPMEVNFNFDDPNLIILPLAFGKRQGREFIWNDLLSLETGSLKLANGRVIEKTLYNRRTRQDEPALFVALTFERREVLDSSNIKPMNLIGVDRGENIPAVIALTDPEGCPLSRFKDSLGNPTHILRIGESYKEKQRTIQAKKEVEQRRAGGYSRKYASKAKNLADDMVRNTARDLLYYAVTQDAMLIFENLSRGFGRQGKRTFMAERQYTRMEDWLTAKLAYEGLPSKTYLSKTLAQYTSKTCSNCGFTITSADYDRVLEKLKKTATGWMTTINGKELKVEGQITYYNRYKRQNVVKDLSVELDRLSEESVNNDISSWTKGRSGEALSLLKKRFSHRPVQEKFVCLNCGFETHADEQAALNIARSWLFLRSQEYKKYQTNKTTGNTDKRAFVETWQSFYRKKLKEVWKPAV

SEQ ID NO: 42982 - protein, 978 aa, synthetic construct
  REGION 1..978: note = engineered CasX variant
QEIKRINKIRRRLVKDSNTKKAGKTGPMKTLLVRVMTPDLRERLENLRKKPENIPQPISNTSRANLNKLLTDYTEMKKAILHVYWEEFQKDPVGLMSRVAQPASKKIDQNKLKPEMDEKGNLTTAGFACSQCGQPLFVYKLEQVSEKGKAYTNYFGRCNVAEHEKLILLYQLKPEKDSDEAVTYSLGKFGQRALDFYSIHVTKESTHPVKPLAQIAGNRYASYPVGKALSDACMGTIASFLSKYQDIIIEHQKVVKGNQKRLESLRELAGKENLEYPSVTLPPQPHTKEGVDAYNEVIARVRMWVNLNLWQKLKLSRDDAKPLLRLKGFPSFPLVERQANEVDWWDMVCNVKKLINEKKEDGKVFWQNLAGYKRQEALRPYLSSEEDRKKGKKFARYQLGDLLLHLYKKHGEDWGKVYDEAWERIDKKVEGLSKHIKLEEERRSEDAQSKAALTDWLRAKASFVIEGLKEADKDEFCRCELKLQKWYGDLRGKPFAIEAENSILDISGFSKQYNCAFIWQKDGVKKLNLYLIINYFKGGKLRFKKIKPEAFEANRFYTVINKKSGEIVPMEVNFNFDDPNLIILPLAFGKRQGREFIWNDLLSLETGSLKLANGRVIEKTLYNRRTRQDEPALFVALTFERREVLDSSNIKPMNLIGVDRGENIPAVIALTDPEGCPLSRFKDSLGNPTHILRIGESYKEKQRTIQAKKEVEQRRAGGYSRKYASKAKNLADDMVRNTARDLLYYAVTQDAMLIFENLSRGFGRQGKRTFMAERQYTRMEDWLTAKLAYEGLPSKTYLSKTLAQYTSKTCSNCGFTITSADYDRVLEKLKKTATGWMTTINGKELKVEGQITYYNRYKRQNVVKDLSVELDRLSEESVNNDISSWTKGRSGEALSLLKKRFSHRPVQEKFVCLNCGFETHADEQAALNIARSWLFLRSQEYKKYQTNKTTGNTDKRAFVETWQSFYRKKLKEVWKPAV

SEQ ID NO: 42983 - protein, 978 aa, synthetic construct
  REGION 1..978: note = engineered CasX variant
QEIKRINKIRRRLVKDSNTKKAGKTGPMKTLLVRVMTPDLRERLENLRKKPENIPQPISNTSRANLNKLLTDYTEMKKAILHVYWEEFQKDPVGLMSRVAQPASKKIDQNKLKPEMDEKGNLTTAGFACSQCGQPLFVYKLEQVSEKGKAYTNYFGRCNVAEHEKLILLYQLKPEKDSDEAVTYSLGKFGQRALDFYSIHVTKESTHPVKPLAQIAGNRYASHPVGKALSDACMGTIASFLSKYQDIIIEHQKVVKGNQKRLESLRELAGKENLEYPSVTLPPQPHTKEGVDAYNEVIARVRMWVNLNLWQKLKLSRDDAKPLLRLKGFPSFPLVERQANEVDWWDMVCNVKKLINEKKEDGKVFWQNLAGYKRQEALRPYLSSEEDRKKGKKFARYQLGDLLLHLYKKHGEDWGKVYDEAWERIDKKVEGLSKHIKLEEERRSEDAQSKAALTDWLRAKASFVIEGLKEADKDEFCRCELKLQKWYGDLRGKPFAIEAENSILDISGFSKQYNCAFIWQKDGVKKLNLYLIINYFKGGKLRFKKIKPEAFEANRFYTVINKKSGEIVPMEVNFNFDDPNLIILPLAFGKRQGREFIWNDLLSLETGSLKLANGRVIEKTLYNRRTRQDEPALFVALTFERREVLDSSNIKPMNLIGVDRGENIPAVIALTDPEGCPLSRFKDSLGNPTHILRIGESYKEKQRTIQAKKEVEQRRAGGYSRKYASKAKNLADDMVRNTARDLLYYAVTQDAMLIFENLSRGFGRQGKRTFMAERQYTRMEDWLTAKLAYEGLPSKTYLSKTLAQYTSKTCSNCGFTITSADYDRVLEKLKKTATGWMTTINGKELKVEGQITYYNRYKRQNVVKDLSVELDRLSEESVNNDISSWTKGRSGEALSLLKKRFSHRPVQEKFVCLNCGFETHADEQAALNIARSWLFLRSQEYKKYQTNKTTGNTDKRAFVETWQSFYRKKLKEVWKPAV

SEQ ID NO: 42984 - protein, 978 aa, synthetic construct
  REGION 1..978: note = engineered CasX variant
QEIKRINKIRRRLVKDSNTKKAGKTGPMKTLLVRVMTPDLRERLENLRKKPENIPQPISNTSRANLNKLLTDYTEMKKAILHVYWEEFQKDPVGLMSRVAQPASKKIDQNKLKPEMDEKGNLTTAGFACSQCGQPLFVYKLEQVSEKGKAYTNYFGRCNVAEHEKLILLYQLKPEKDSDEAVTYSLGKFGQRALDFYSIHVTKESTHPVKPLAQIAGNRYASSPVGKALSDACMGTIASFLSKYQDIIIEHQKVVKGNQKRLESLRELAGKENLEYPSVTLPPQPHTKEGVDAYNEVIARVRMWVNLNLWQKLKLSRDDAKPLLRLKGFPSFPLVERQANEVDWWDMVCNVKKLINEKKEDGKVFWQNLAGYKRQEALRPYLSSEEDRKKGKKFARYQLGDLLLHLYKKHGEDWGKVYDEAWERIDKKVEGLSKHIKLEEERRSEDAQSKAALTDWLRAKASFVIEGLKEADKDEFCRCELKLQKWYGDLRGKPFAIEAENSILDISGFSKQYNCAFIWQKDGVKKLNLYLIINYFKGGKLRFKKIKPEAFEANRFYTVINKKSGEIVPMEVNFNFDDPNLIILPLAFGKRQGREFIWNDLLSLETGSLKLANGRVIEKTLYNRRTRQDEPALFVALTFERREVLDSSNIKPMNLIGVDRGENIPAVIALTDPEGCPLSRFKDSLGNPTHILRIGESYKEKQRTIQAKKEVEQRRAGGYSRKYASKAKNLADDMVRNTARDLLYYAVTQDAMLIFENLSRGFGRQGKRTFMAERQYTRMEDWLTAKLAYEGLPSKTYLSKTLAQYTSKTCSNCGFTITSADYDRVLEKLKKTATGWMTTINGKELKVEGQITYYNRYKRQNVVKDLSVELDRLSEESVNNDISSWTKGRSGEALSLLKKRFSHRPVQEKFVCLNCGFETHADEQAALNIARSWLFLRSQEYKKYQTNKTTGNTDKRAFVETWQSFYRKKLKEVWKPAV

SEQ ID NO: 42985 - protein, 978 aa, synthetic construct
  REGION 1..978: note = engineered CasX variant
QEIKRINKIRRRLVKDSNTKKAGKTGPMKTLLVRVMTPDLRERLENLRKKPENIPQPISNTSRANLNKLLTDYTEMKKAILHVYWEEFQKDPVGLMSRVAQPASKKIDQNKLKPEMDEKGNLTTAGFACSQCGQPLFVYKLEQVSEKGKAYTNYFGRCNVAEHEKLILLYQLKPEKDSDEAVTYSLGKFGQRALDFYSIHVTKESTHPVKPLAQIAGNRYASTPVGKALSDACMGTIASFLSKYQDIIIEHQKVVKGNQKRLESLRELAGKENLEYPSVTLPPQPHTKEGVDAYNEVIARVRMWVNLNLWQKLKLSRDDAKPLLRLKGFPSFPLVERQANEVDWWDMVCNVKKLINEKKEDGKVFWQNLAGYKRQEALRPYLSSEEDRKKGKKFARYQLGDLLLHLYKKHGEDWGKVYDEAWERIDKKVEGLSKHIKLEEERRSEDAQSKAALTDWLRAKASFVIEGLKEADKDEFCRCELKLQKWYGDLRGKPFAIEAENSILDISGFSKQYNCAFIWQKDGVKKLNLYLIINYFKGGKLRFKKIKPEAFEANRFYTVINKKSGEIVPMEVNFNFDDPNLIILPLAFGKRQGREFIWNDLLSLETGSLKLANGRVIEKTLYNRRTRQDEPALFVALTFERREVLDSSNIKPMNLIGVDRGENIPAVIALTDPEGCPLSRFKDSLGNPTHILRIGESYKEKQRTIQAKKEVEQRRAGGYSRKYASKAKNLADDMVRNTARDLLYYAVTQDAMLIFENLSRGFGRQGKRTFMAERQYTRMEDWLTAKLAYEGLPSKTYLSKTLAQYTSKTCSNCGFTITSADYDRVLEKLKKTATGWMTTINGKELKVEGQITYYNRYKRQNVVKDLSVELDRLSEESVNNDISSWTKGRSGEALSLLKKRFSHRPVQEKFVCLNCGFETHADEQAALNIARSWLFLRSQEYKKYQTNKTTGNTDKRAFVETWQSFYRKKLKEVWKPAV

SEQ ID NO: 42986 - protein, 978 aa, synthetic construct
  REGION 1..978: note = engineered CasX variant
QEIKRINKIRRRLVKDSNTKKAGKTGPMKTLLVRVMTPDLRERLENLRKKPENIPQPISNTSRANLNKLLTDYTEMKKAILHVYWEEFQKDPVGLMSRVAQPASKKIDQNKLKPEMDEKGNLTTAGFACSQCGQPLFVYKLEQVSEKGKAYTNYFGRCNVAEHEKLILLYQLKPEKDSDEAVTYSLGKFGQRALDFYSIHVTKESTHPVKPLAQIAGNRYASAPVGKALSDACMGTIASFLSKYQDIIIEHQKVVKGNQKRLESLRELAGKENLEYPSVTLPPQPHTKEGVDAYNEVIARVRMWVNLNLWQKLKLSRDDAKPLLRLKGFPSFPLVERQANEVDWWDMVCNVKKLINEKKEDGKVFWQNLAGYKRQEALRPYLSSEEDRKKGKKFARYQLGDLLLHLYKKHGEDWGKVYDEAWERIDKKVEGLSKHIKLEEERRSEDAQSKAALTDWLRAKASFVIEGLKEADKDEFCRCELKLQKWYGDLRGKPFAIEAENSILDISGFSKQYNCAFIWQKDGVKKLNLYLIINYFKGGKLRFKKIKPEAFEANRFYTVINKKSGEIVPMEVNFNFDDPNLIILPLAFGKRQGREFIWNDLLSLETGSLKLANGRVIEKTLYNRRTRQDEPALFVALTFERREVLDSSNIKPMNLIGVDRGENIPAVIALTDPEGCPLSRFKDSLGNPTHILRIGESYKEKQRTIQAKKEVEQRRAGGYSRKYASKAKNLADDMVRNTARDLLYYAVTQDAMLIFENLSRGFGRQGKRTFMAERQYTRMEDWLTAKLAYEGLPSKTYLSKTLAQYTSKTCSNCGFTITSADYDRVLEKLKKTATGWMTTINGKELKVEGQITYYNRYKRQNVVKDLSVELDRLSEESVNNDISSWTKGRSGEALSLLKKRFSHRPVQEKFVCLNCGFETHADEQAALNIARSWLFLRSQEYKKYQTNKTTGNTDKRAFVETWQSFYRKKLKEVWKPAV

SEQ ID NO: 42987 - protein, 978 aa, synthetic construct
  REGION 1..978: note = engineered CasX variant
QEIKRINKIRRRLVKDSNTKKAGKTGPMKTLLVRVMTPDLRERLENLRKKPENIPQPISNTSRANLNKLLTDYTEMKKAILHVYWEEFQKDPVGLMSRVAQPASKKIDQNKLKPEMDEKGNLTTAGFACSQCGQPLFVYKLEQVSEKGKAYTNYFGRCNVAEHEKLILLYQLKPEKDSDEAVTYSLGKFGQRALDFYSIHVTKESTHPVKPLAQIAGNRYASVPVGKALSDACMGTIASFLSKYQDIIIEHQKVVKGNQKRLESLRELAGKENLEYPSVTLPPQPHTKEGVDAYNEVIARVRMWVNLNLWQKLKLSRDDAKPLLRLKGFPSFPLVERQANEVDWWDMVCNVKKLINEKKEDGKVFWQNLAGYKRQEALRPYLSSEEDRKKGKKFARYQLGDLLLHLYKKHGEDWGKVYDEAWERIDKKVEGLSKHIKLEEERRSEDAQSKAALTDWLRAKASFVIEGLKEADKDEFCRCELKLQKWYGDLRGKPFAIEAENSILDISGFSKQYNCAFIWQKDGVKKLNLYLIINYFKGGKLRFKKIKPEAFEANRFYTVINKKSGEIVPMEVNFNFDDPNLIILPLAFGKRQGREFIWNDLLSLETGSLKLANGRVIEKTLYNRRTRQDEPALFVALTFERREVLDSSNIKPMNLIGVDRGENIPAVIALTDPEGCPLSRFKDSLGNPTHILRIGESYKEKQRTIQAKKEVEQRRAGGYSRKYASKAKNLADDMVRNTARDLLYYAVTQDAMLIFENLSRGFGRQGKRTFMAERQYTRMEDWLTAKLAYEGLPSKTYLSKTLAQYTSKTCSNCGFTITSADYDRVLEKLKKTATGWMTTINGKELKVEGQITYYNRYKRQNVVKDLSVELDRLSEESVNNDISSWTKGRSGEALSLLKKRFSHRPVQEKFVCLNCGFETHADEQAALNIARSWLFLRSQEYKKYQTNKTTGNTDKRAFVETWQSFYRKKLKEVWKPAV

SEQ ID NO: 42988 - protein, 978 aa, synthetic construct
  REGION 1..978: note = engineered CasX variant
QEIKRINKIRRRLVKDSNTKKAGKTGPMKTLLVRVMTPDLRERLENLRKKPENIPQPISNTSRANLNKLLTDYTEMKKAILHVYWEEFQKDPVGLMSRVAQPASKKIDQNKLKPEMDEKGNLTTAGFACSQCGQPLFVYKLEQVSEKGKAYTNYFGRCNVAEHEKLIKLYQLKPEKDSDEAVTYSLGKFGQRALDFYSIHVTKESTHPVKPLAQIAGNRYASGPVGKALSDACMGTIASFLSKYQDIIIEHQKVVKGNQKRLESLRELAGKENLEYPSVTLPPQPHTKEGVDAYNEVIARVRMWVNLNLWQKLKLSRDDAKPLLRLKGFPSFPLVERQANEVDWWDMVCNVKKLINEKKEDGKVFWQNLAGYKRQEALRPYLSSEEDRKKGKKFARYQLGDLLLHLYKKHGEDWGKVYDEAWERIDKKVEGLSKHIKLEEERRSEDAQSKAALTDWLRAKASFVIEGLKEADKDEFCRCELKLQKWYGDLRGKPFAIEAENSILDISGFSKQYNCAFIWQKDGVKKLNLYLIINYFKGGKLRFKKIKPEAFEANRFYTVINKKSGEIVPMEVNFNFDDPNLIILPLAFGKRQGREFIWNDLLSLETGSLKLANGRVIEKTLYNRRTRQDEPALFVALTFERREVLDSSNIKPMNLIGVDRGENIPAVIALTDPEGCPLSRFKDSLGNPTHILRIGESYKEKQRTIQAKKEVEQRRAGGYSRKYASKAKNLADDMVRNTARDLLYYAVTQDAMLIFENLSRGFGRQGKRTFMAERQYTRMEDWLTAKLAYEGLPSKTYLSKTLAQYTSKTCSNCGFTITSADYDRVLEKLKKTATGWMTTINGKELKVEGQITYYNRYKRQNVVKDLSVELDRLSEESVNNDISSWTKGRSGEALSLLKKRFSHRPVQEKFVCLNCGFETHADEQAALNIARSWLFLRSQEYKKYQTNKTTGNTDKRAFVETWQSFYRKKLKEVWKPAV

SEQ ID NO: 42989 - protein, 977 aa, synthetic construct
  REGION 1..977: note = engineered CasX variant
QEIKRINKIRRRLVKDSNTKKAGKTGPMKTLLVRVMTPDLRERLENLRKKPENIPQPISNTSRANLNKLLTDYTEMKKAILHVYWEEFQKDPVGLMSRVAQPASKKIDQNKLKPEMDEKGNLTTAGFACSQCGQPLFVYKLEQVSEKGKAYTNYFGRCNVAEHEKLILLYQLKPEKDSDEAVTYSLGKFGQRALDFYSIHVTKESTHPVKPLAQIAGNRYASPVGKALSDACMGTIASFLSKYQDIIIEHQKVVKGNQKRLESLRELAGKENLEYPSVTLPPQPHTKEGVDAYNEVIARVRMWVNLNLWQKLKLSRDDAKPLLRLKGFPSFPLVERQANEVDWWDMVCNVKKLINEKKEDGKVFWQNLAGYKRQEALRPYLSSEEDRKKGKKFARYQLGDLLLHLYKKHGEDWGKVYDEAWERIDKKVEGLSKHIKLEEERRSEDAQSKAALTDWLRAKASFVIEGLKEADKDEFCRCELKLQKWYGDLRGKPFAIEAENSILDISGFSKQYNCAFIWQKDGVKKLNLYLIINYFKGGKLRFKKIKPEAFEANRFYTVINKKSGEIVPMEVNFNFDDPNLIILPLAFGKRQGREFIWNDLLSLETGSLKLANGRVIEKTLYNRRTRQDEPALFVALTFERREVLDSSNIKPMNLIGVDRGENIPAVIALTDPEGCPLSRFKDSLGNPTHILRIGESYKEKQRTIQAKKEVEQRRAGGYSRKYASKAKNLADDMVRNTARDLLYYAVTQDAMLIFENLSRGFGRQGKRTFMAERQYTRMEDWLTAKLAYEGLPSKTYLSKTLAQYTSKTCSNCGFTITSADYDRVLEKLKKTATGWMTTINGKELKVEGQITYYNRYKRQNVVKDLSVELDRLSEESVNNDISSWTKGRSGEALSLLKKRFSHRPVQEKFVCLNCGFETHADEQAALNIARSWLFLRSQEYKKYQTNKTTGNTDKRAFVETWQSFYRKKLKEVWKPAV

SEQ ID NO: 42990 - protein, 978 aa, synthetic construct
  REGION 1..978: note = engineered CasX variant
QEIKRINKIRRRLVKDSNTKKAGKTGPMKTLLVRVMTPDLRERLENLRKKPENIPQPISNTSRANLNKLLTDYTEMKKAILHVYWEEFQKDPVGLMSRVAQPASKKIDQNKLKPEMDEKGNLTTAGFACSQCGQPLFVYKLEQVSEKGKAYTNYFGRCNVAEHEKLILLYQLKPEKDSDEAVTYSLGKFGQRALDFYSIHVTKESTHPVKPLAQIAGNRYASYPVGKALSDACMGTIASFLSKYQDIIIEHQKVVKGNQKRLESLRELAGKENLEYPSVTLPPQPHTKEGVDAYNEVIARVRMWVNLNLWQKLKLSRDDAKPLLRLKGFPSFPLVERQANEVDWWDMVCNVKKLINEKKEDGKVFWQNLAGYKRQEALRPYLSSEEDRKKGKKFARYQLGDLLLHLEKKHPEDWGKVYDEAWERIDKKVEGLSKHIKLEEERRSEDAQSKAALTDWLRAKASFVIEGLKEADKDEFCRCELKLQKWYGDLRGKPFAIEAENSILDISGFSKQYNCAFIWQKDGVKKLNLYLIINYFKGGKLRFKKIKPEAFEANRFYTVINKKSGEIVPMEVNFNFDDPNLIILPLAFGKRQGREFIWNDLLSLETGSLKLANGRVIEKTLYNRRTRQDEPALFVALTFERREVLDSSNIKPMNLIGVDRGENIPAVIALTDPEGCPLSRFKDSLGNPTHILRIGESYKEKQRTIQAKKEVEQRRAGGYSRKYASKAKNLADDMVRNTARDLLYYAVTQDAMLIFENLSRGFGRQGKRTFMAERQYTRMEDWLTAKLAYEGLPSKTYLSKTLAQYTSKTCSNCGFTITSADYDRVLEKLKKTATGWMTTINGKELKVEGQITYYNRYKRQNVVKDLSVELDRLSEESVNNDISSWTKGRSGEALSLLKKRFSHRPVQEKFVCLNCGFETHADEQAALNIARSWLFLRSQEYKKYQTNKTTGNTDKRAFVETWQSFYRKKLKEVWKPAV

SEQ ID NO: 42991 - protein, 978 aa, synthetic construct
  REGION 1..978: note = engineered CasX variant
QEIKRINKIRRRLVKDSNTKKAGKTGPMKTLLVRVMTPDLRERLENLRKKPENIPQPISNTSRANLNKLLTDYTEMKKAILHVYWEEFQKDPVGLMSRVAQPASKKIDQNKLKPEMDEKGNLTTAGFACSQCGQPLFVYKLEQVSEKGKAYTNYFGRCNVAEHEKLILLYQLKPEKDSDEAVTYSLGKFGQRALDFYSIHVTKESTHPVKPLAQIAGNRYASHPVGKALSDACMGTIASFLSKYQDIIIEHQKVVKGNQKRLESLRELAGKENLEYPSVTLPPQPHTKEGVDAYNEVIARVRMWVNLNLWQKLKLSRDDAKPLLRLKGFPSFPLVERQANEVDWWDMVCNVKKLINEKKEDGKVFWQNLAGYKRQEALRPYLSSEEDRKKGKKFARYQLGDLLLHLEKKHPEDWGKVYDEAWERIDKKVEGLSKHIKLEEERRSEDAQSKAALTDWLRAKASFVIEGLKEADKDEFCRCELKLQKWYGDLRGKPFAIEAENSILDISGFSKQYNCAFIWQKDGVKKLNLYLIINYFKGGKLRFKKIKPEAFEANRFYTVINKKSGEIVPMEVNFNFDDPNLIILPLAFGKRQGREFIWNDLLSLETGSLKLANGRVIEKTLYNRRTRQDEPALFVALTFERREVLDSSNIKPMNLIGVDRGENIPAVIALTDPEGCPLSRFKDSLGNPTHILRIGESYKEKQRTIQAKKEVEQRRAGGYSRKYASKAKNLADDMVRNTARDLLYYAVTQDAMLIFENLSRGFGRQGKRTFMAERQYTRMEDWLTAKLAYEGLPSKTYLSKTLAQYTSKTCSNCGFTITSADYDRVLEKLKKTATGWMTTINGKELKVEGQITYYNRYKRQNVVKDLSVELDRLSEESVNNDISSWTKGRSGEALSLLKKRFSHRPVQEKFVCLNCGFETHADEQAALNIARSWLFLRSQEYKKYQTNKTTGNTDKRAFVETWQSFYRKKLKEVWKPAV

SEQ ID NO: 42992 - protein, 978 aa, synthetic construct
  REGION 1..978: note = engineered CasX variant
QEIKRINKIRRRLVKDSNTKKAGKTGPMKTLLVRVMTPDLRERLENLRKKPENIPQPISNTSRANLNKLLTDYTEMKKAILHVYWEEFQKDPVGLMSRVAQPASKKIDQNKLKPEMDEKGNLTTAGFACSQCGQPLFVYKLEQVSEKGKAYTNYFGRCNVAEHEKLILLYQLKPEKDSDEAVTYSLGKFGQRALDFYSIHVTKESTHPVKPLAQIAGNRYASSPVGKALSDACMGTIASFLSKYQDIIIEHQKVVKGNQKRLESLRELAGKENLEYPSVTLPPQPHTKEGVDAYNEVIARVRMWVNLNLWQKLKLSRDDAKPLLRLKGFPSFPLVERQANEVDWWDMVCNVKKLINEKKEDGKVFWQNLAGYKRQEALRPYLSSEEDRKKGKKFARYQLGDLLLHLEKKHPEDWGKVYDEAWERIDKKVEGLSKHIKLEEERRSEDAQSKAALTDWLRAKASFVIEGLKEADKDEFCRCELKLQKWYGDLRGKPFAIEAENSILDISGFSKQYNCAFIWQKDGVKKLNLYLIINYFKGGKLRFKKIKPEAFEANRFYTVINKKSGEIVPMEVNFNFDDPNLIILPLAFGKRQGREFIWNDLLSLETGSLKLANGRVIEKTLYNRRTRQDEPALFVALTFERREVLDSSNIKPMNLIGVDRGENIPAVIALTDPEGCPLSRFKDSLGNPTHILRIGESYKEKQRTIQAKKEVEQRRAGGYSRKYASKAKNLADDMVRNTARDLLYYAVTQDAMLIFENLSRGFGRQGKRTFMAERQYTRMEDWLTAKLAYEGLPSKTYLSKTLAQYTSKTCSNCGFTITSADYDRVLEKLKKTATGWMTTINGKELKVEGQITYYNRYKRQNVVKDLSVELDRLSEESVNNDISSWTKGRSGEALSLLKKRFSHRPVQEKFVCLNCGFETHADEQAALNIARSWLFLRSQEYKKYQTNKTTGNTDKRAFVETWQSFYRKKLKEVWKPAV

SEQ ID NO: 42993 - protein, 978 aa, synthetic construct
  REGION 1..978: note = engineered CasX variant
QEIKRINKIRRRLVKDSNTKKAGKTGPMKTLLVRVMTPDLRERLENLRKKPENIPQPISNTSRANLNKLLTDYTEMKKAILHVYWEEFQKDPVGLMSRVAQPASKKIDQNKLKPEMDEKGNLTTAGFACSQCGQPLFVYKLEQVSEKGKAYTNYFGRCNVAEHEKLILLYQLKPEKDSDEAVTYSLGKFGQRALDFYSIHVTKESTHPVKPLAQIAGNRYASTPVGKALSDACMGTIASFLSKYQDIIIEHQKVVKGNQKRLESLRELAGKENLEYPSVTLPPQPHTKEGVDAYNEVIARVRMWVNLNLWQKLKLSRDDAKPLLRLKGFPSFPLVERQANEVDWWDMVCNVKKLINEKKEDGKVFWQNLAGYKRQEALRPYLSSEEDRKKGKKFARYQLGDLLLHLEKKHPEDWGKVYDEAWERIDKKVEGLSKHIKLEEERRSEDAQSKAALTDWLRAKASFVIEGLKEADKDEFCRCELKLQKWYGDLRGKPFAIEAENSILDISGFSKQYNCAFIWQKDGVKKLNLYLIINYFKGGKLRFKKIKPEAFEANRFYTVINKKSGEIVPMEVNFNFDDPNLIILPLAFGKRQGREFIWNDLLSLETGSLKLANGRVIEKTLYNRRTRQDEPALFVALTFERREVLDSSNIKPMNLIGVDRGENIPAVIALTDPEGCPLSRFKDSLGNPTHILRIGESYKEKQRTIQAKKEVEQRRAGGYSRKYASKAKNLADDMVRNTARDLLYYAVTQDAMLIFENLSRGFGRQGKRTFMAERQYTRMEDWLTAKLAYEGLPSKTYLSKTLAQYTSKTCSNCGFTITSADYDRVLEKLKKTATGWMTTINGKELKVEGQITYYNRYKRQNVVKDLSVELDRLSEESVNNDISSWTKGRSGEALSLLKKRFSHRPVQEKFVCLNCGFETHADEQAALNIARSWLFLRSQEYKKYQTNKTTGNTDKRAFVETWQSFYRKKLKEVWKPAV

SEQ ID NO: 42994 - protein, 978 aa, synthetic construct
  REGION 1..978: note = engineered CasX variant
QEIKRINKIRRRLVKDSNTKKAGKTGPMKTLLVRVMTPDLRERLENLRKKPENIPQPISNTSRANLNKLLTDYTEMKKAILHVYWEEFQKDPVGLMSRVAQPASKKIDQNKLKPEMDEKGNLTTAGFACSQCGQPLFVYKLEQVSEKGKAYTNYFGRCNVAEHEKLILLYQLKPEKDSDEAVTYSLGKFGQRALDFYSIHVTKESTHPVKPLAQIAGNRYASAPVGKALSDACMGTIASFLSKYQDIIIEHQKVVKGNQKRLESLRELAGKENLEYPSVTLPPQPHTKEGVDAYNEVIARVRMWVNLNLWQKLKLSRDDAKPLLRLKGFPSFPLVERQANEVDWWDMVCNVKKLINEKKEDGKVFWQNLAGYKRQEALRPYLSSEEDRKKGKKFARYQLGDLLLHLEKKHPEDWGKVYDEAWERIDKKVEGLSKHIKLEEERRSEDAQSKAALTDWLRAKASFVIEGLKEADKDEFCRCELKLQKWYGDLRGKPFAIEAENSILDISGFSKQYNCAFIWQKDGVKKLNLYLIINYFKGGKLRFKKIKPEAFEANRFYTVINKKSGEIVPMEVNFNFDDPNLIILPLAFGKRQGREFIWNDLLSLETGSLKLANGRVIEKTLYNRRTRQDEPALFVALTFERREVLDSSNIKPMNLIGVDRGENIPAVIALTDPEGCPLSRFKDSLGNPTHILRIGESYKEKQRTIQAKKEVEQRRAGGYSRKYASKAKNLADDMVRNTARDLLYYAVTQDAMLIFENLSRGFGRQGKRTFMAERQYTRMEDWLTAKLAYEGLPSKTYLSKTLAQYTSKTCSNCGFTITSADYDRVLEKLKKTATGWMTTINGKELKVEGQITYYNRYKRQNVVKDLSVELDRLSEESVNNDISSWTKGRSGEALSLLKKRFSHRPVQEKFVCLNCGFETHADEQAALNIARSWLFLRSQEYKKYQTNKTTGNTDKRAFVETWQSFYRKKLKEVWKPAV

SEQ ID NO: 42995 - protein, 978 aa, synthetic construct
  REGION 1..978: note = engineered CasX variant
QEIKRINKIRRRLVKDSNTKKAGKTGPMKTLLVRVMTPDLRERLENLRKKPENIPQPISNTSRANLNKLLTDYTEMKKAILHVYWEEFQKDPVGLMSRVAQPASKKIDQNKLKPEMDEKGNLTTAGFACSQCGQPLFVYKLEQVSEKGKAYTNYFGRCNVAEHEKLILLYQLKPEKDSDEAVTYSLGKFGQRALDFYSIHVTKESTHPVKPLAQIAGNRYASVPVGKALSDACMGTIASFLSKYQDIIIEHQKVVKGNQKRLESLRELAGKENLEYPSVTLPPQPHTKEGVDAYNEVIARVRMWVNLNLWQKLKLSRDDAKPLLRLKGFPSFPLVERQANEVDWWDMVCNVKKLINEKKEDGKVFWQNLAGYKRQEALRPYLSSEEDRKKGKKFARYQLGDLLLHLEKKHPEDWGKVYDEAWERIDKKVEGLSKHIKLEEERRSEDAQSKAALTDWLRAKASFVIEGLKEADKDEFCRCELKLQKWYGDLRGKPFAIEAENSILDISGFSKQYNCAFIWQKDGVKKLNLYLIINYFKGGKLRFKKIKPEAFEANRFYTVINKKSGEIVPMEVNFNFDDPNLIILPLAFGKRQGREFIWNDLLSLETGSLKLANGRVIEKTLYNRRTRQDEPALFVALTFERREVLDSSNIKPMNLIGVDRGENIPAVIALTDPEGCPLSRFKDSLGNPTHILRIGESYKEKQRTIQAKKEVEQRRAGGYSRKYASKAKNLADDMVRNTARDLLYYAVTQDAMLIFENLSRGFGRQGKRTFMAERQYTRMEDWLTAKLAYEGLPSKTYLSKTLAQYTSKTCSNCGFTITSADYDRVLEKLKKTATGWMTTINGKELKVEGQITYYNRYKRQNVVKDLSVELDRLSEESVNNDISSWTKGRSGEALSLLKKRFSHRPVQEKFVCLNCGFETHADEQAALNIARSWLFLRSQEYKKYQTNKTTGNTDKRAFVETWQSFYRKKLKEVWKPAV

SEQ ID NO: 42996 - protein, 978 aa, synthetic construct
  REGION 1..978: note = engineered CasX variant
QEIKRINKIRRRLVKDSNTKKAGKTGPMKTLLVRVMTPDLRERLENLRKKPENIPQPISNTSRANLNKLLTDYTEMKKAILHVYWEEFQKDPVGLMSRVAQPASKKIDQNKLKPEMDEKGNLTTAGFACSQCGQPLFVYKLEQVSEKGKAYTNYFGRCNVAEHEKLIKLYQLKPEKDSDEAVTYSLGKFGQRALDFYSIHVTKESTHPVKPLAQIAGNRYASGPVGKALSDACMGTIASFLSKYQDIIIEHQKVVKGNQKRLESLRELAGKENLEYPSVTLPPQPHTKEGVDAYNEVIARVRMWVNLNLWQKLKLSRDDAKPLLRLKGFPSFPLVERQANEVDWWDMVCNVKKLINEKKEDGKVFWQNLAGYKRQEALRPYLSSEEDRKKGKKFARYQLGDLLLHLEKKHPEDWGKVYDEAWERIDKKVEGLSKHIKLEEERRSEDAQSKAALTDWLRAKASFVIEGLKEADKDEFCRCELKLQKWYGDLRGKPFAIEAENSILDISGFSKQYNCAFIWQKDGVKKLNLYLIINYFKGGKLRFKKIKPEAFEANRFYTVINKKSGEIVPMEVNFNFDDPNLIILPLAFGKRQGREFIWNDLLSLETGSLKLANGRVIEKTLYNRRTRQDEPALFVALTFERREVLDSSNIKPMNLIGVDRGENIPAVIALTDPEGCPLSRFKDSLGNPTHILRIGESYKEKQRTIQAKKEVEQRRAGGYSRKYASKAKNLADDMVRNTARDLLYYAVTQDAMLIFENLSRGFGRQGKRTFMAERQYTRMEDWLTAKLAYEGLPSKTYLSKTLAQYTSKTCSNCGFTITSADYDRVLEKLKKTATGWMTTINGKELKVEGQITYYNRYKRQNVVKDLSVELDRLSEESVNNDISSWTKGRSGEALSLLKKRFSHRPVQEKFVCLNCGFETHADEQAALNIARSWLFLRSQEYKKYQTNKTTGNTDKRAFVETWQSFYRKKLKEVWKPAV

SEQ ID NO: 42997 - protein, 977 aa, synthetic construct
  REGION 1..977: note = engineered CasX variant
QEIKRINKIRRRLVKDSNTKKAGKTGPMKTLLVRVMTPDLRERLENLRKKPENIPQPISNTSRANLNKLLTDYTEMKKAILHVYWEEFQKDPVGLMSRVAQPASKKIDQNKLKPEMDEKGNLTTAGFACSQCGQPLFVYKLEQVSEKGKAYTNYFGRCNVAEHEKLILLYQLKPEKDSDEAVTYSLGKFGQRALDFYSIHVTKESTHPVKPLAQIAGNRYASPVGKALSDACMGTIASFLSKYQDIIIEHQKVVKGNQKRLESLRELAGKENLEYPSVTLPPQPHTKEGVDAYNEVIARVRMWVNLNLWQKLKLSRDDAKPLLRLKGFPSFPLVERQANEVDWWDMVCNVKKLINEKKEDGKVFWQNLAGYKRQEALRPYLSSEEDRKKGKKFARYQLGDLLLHLEKKHPEDWGKVYDEAWERIDKKVEGLSKHIKLEEERRSEDAQSKAALTDWLRAKASFVIEGLKEADKDEFCRCELKLQKWYGDLRGKPFAIEAENSILDISGFSKQYNCAFIWQKDGVKKLNLYLIINYFKGGKLRFKKIKPEAFEANRFYTVINKKSGEIVPMEVNFNFDDPNLIILPLAFGKRQGREFIWNDLLSLETGSLKLANGRVIEKTLYNRRTRQDEPALFVALTFERREVLDSSNIKPMNLIGVDRGENIPAVIALTDPEGCPLSRFKDSLGNPTHILRIGESYKEKQRTIQAKKEVEQRRAGGYSRKYASKAKNLADDMVRNTARDLLYYAVTQDAMLIFENLSRGFGRQGKRTFMAERQYTRMEDWLTAKLAYEGLPSKTYLSKTLAQYTSKTCSNCGFTITSADYDRVLEKLKKTATGWMTTINGKELKVEGQITYYNRYKRQNVVKDLSVELDRLSEESVNNDISSWTKGRSGEALSLLKKRFSHRPVQEKFVCLNCGFETHADEQAALNIARSWLFLRSQEYKKYQTNKTTGNTDKRAFVETWQSFYRKKLKEVWKPAV

SEQ ID NO: 42998 - protein, 979 aa, synthetic construct
  REGION 1..979: note = engineered CasX variant
QEIKRINKIRRRLVKDSNTKKAGKTGPMKTLLVRVMTPDLRERLENLRKKPENIPQPISNTSRANLNKLLTDYTEMKKAILHVYWEEFQKDPVGLMSRVAQPASKKIDQNKLKPEMDEKGNLTTAGFACSQCGQPLFVYKLEQVSEKGKAYTNYFGRCNVAEHEKLILLYQLKPEKDSDEAVTYSLGKFGQRALDFYSIHVTKESTHPVKPLAQIAGNRYASYPVGKALSDACMGTIASFLSKYQDIIIEHQKVVKGNQKRLESLRELAGKENLEYPSVTLPPQPHTKEGVDAYNEVIARVRMWVNLNLWQKLKLSRDDAKPLLRLKGFPSFPLVERQANEVDWWDMVCNVKKLINEKKEDGKVFWQNLAGYKRQEALRPYLSSEEDRKKGKKFARYQLGDLLLHLEKKHGERDWGKVYDEAWERIDKKVEGLSKHIKLEEERRSEDAQSKAALTDWLRAKASFVIEGLKEADKDEFCRCELKLQKWYGDLRGKPFAIEAENSILDISGFSKQYNCAFIWQKDGVKKLNLYLIINYFKGGKLRFKKIKPEAFEANRFYTVINKKSGEIVPMEVNFNFDDPNLIILPLAFGKRQGREFIWNDLLSLETGSLKLANGRVIEKTLYNRRTRQDEPALFVALTFERREVLDSSNIKPMNLIGVDRGENIPAVIALTDPEGCPLSRFKDSLGNPTHILRIGESYKEKQRTIQAKKEVEQRRAGGYSRKYASKAKNLADDMVRNTARDLLYYAVTQDAMLIFENLSRGFGRQGKRTFMAERQYTRMEDWLTAKLAYEGLPSKTYLSKTLAQYTSKTCSNCGFTITSADYDRVLEKLKKTATGWMTTINGKELKVEGQITYYNRYKRQNVVKDLSVELDRLSEESVNNDISSWTKGRSGEALSLLKKRFSHRPVQEKFVCLNCGFETHADEQAALNIARSWLFLRSQEYKKYQTNKTTGNTDKRAFVETWQSFYRKKLKEVWKPAV

SEQ ID NO: 42999 - protein, 979 aa, synthetic construct
  REGION 1..979: note = engineered CasX variant
QEIKRINKIRRRLVKDSNTKKAGKTGPMKTLLVRVMTPDLRERLENLRKKPENIPQPISNTSRANLNKLLTDYTEMKKAILHVYWEEFQKDPVGLMSRVAQPASKKIDQNKLKPEMDEKGNLTTAGFACSQCGQPLFVYKLEQVSEKGKAYTNYFGRCNVAEHEKLILLYQLKPEKDSDEAVTYSLGKFGQRALDFYSIHVTKESTHPVKPLAQIAGNRYASHPVGKALSDACMGTIASFLSKYQDIIIEHQKVVKGNQKRLESLRELAGKENLEYPSVTLPPQPHTKEGVDAYNEVIARVRMWVNLNLWQKLKLSRDDAKPLLRLKGFPSFPLVERQANEVDWWDMVCNVKKLINEKKEDGKVFWQNLAGYKRQEALRPYLSSEEDRKKGKKFARYQLGDLLLHLEKKHGERDWGKVYDEAWERIDKKVEGLSKHIKLEEERRSEDAQSKAALTDWLRAKASFVIEGLKEADKDEFCRCELKLQKWYGDLRGKPFAIEAENSILDISGFSKQYNCAFIWQKDGVKKLNLYLIINYFKGGKLRFKKIKPEAFEANRFYTVINKKSGEIVPMEVNFNFDDPNLIILPLAFGKRQGREFIWNDLLSLETGSLKLANGRVIEKTLYNRRTRQDEPALFVALTFERREVLDSSNIKPMNLIGVDRGENIPAVIALTDPEGCPLSRFKDSLGNPTHILRIGESYKEKQRTIQAKKEVEQRRAGGYSRKYASKAKNLADDMVRNTARDLLYYAVTQDAMLIFENLSRGFGRQGKRTFMAERQYTRMEDWLTAKLAYEGLPSKTYLSKTLAQYTSKTCSNCGFTITSADYDRVLEKLKKTATGWMTTINGKELKVEGQITYYNRYKRQNVVKDLSVELDRLSEESVNNDISSWTKGRSGEALSLLKKRFSHRPVQEKFVCLNCGFETHADEQAALNIARSWLFLRSQEYKKYQTNKTTGNTDKRAFVETWQSFYRKKLKEVWKPAV

SEQ ID NO: 43000 - protein, 979 aa, synthetic construct
  REGION 1..979: note = engineered CasX variant
QEIKRINKIRRRLVKDSNTKKAGKTGPMKTLLVRVMTPDLRERLENLRKKPENIPQPISNTSRANLNKLLTDYTEMKKAILHVYWEEFQKDPVGLMSRVAQPASKKIDQNKLKPEMDEKGNLTTAGFACSQCGQPLFVYKLEQVSEKGKAYTNYFGRCNVAEHEKLILLYQLKPEKDSDEAVTYSLGKFGQRALDFYSIHVTKESTHPVKPLAQIAGNRYASSPVGKALSDACMGTIASFLSKYQDIIIEHQKVVKGNQKRLESLRELAGKENLEYPSVTLPPQPHTKEGVDAYNEVIARVRMWVNLNLWQKLKLSRDDAKPLLRLKGFPSFPLVERQANEVDWWDMVCNVKKLINEKKEDGKVFWQNLAGYKRQEALRPYLSSEEDRKKGKKFARYQLGDLLLHLEKKHGERDWGKVYDEAWERIDKKVEGLSKHIKLEEERRSEDAQSKAALTDWLRAKASFVIEGLKEADKDEFCRCELKLQKWYGDLRGKPFAIEAENSILDISGFSKQYNCAFIWQKDGVKKLNLYLIINYFKGGKLRFKKIKPEAFEANRFYTVINKKSGEIVPMEVNFNFDDPNLIILPLAFGKRQGREFIWNDLLSLETGSLKLANGRVIEKTLYNRRTRQDEPALFVALTFERREVLDSSNIKPMNLIGVDRGENIPAVIALTDPEGCPLSRFKDSLGNPTHILRIGESYKEKQRTIQAKKEVEQRRAGGYSRKYASKAKNLADDMVRNTARDLLYYAVTQDAMLIFENLSRGFGRQGKRTFMAERQYTRMEDWLTAKLAYEGLPSKTYLSKTLAQYTSKTCSNCGFTITSADYDRVLEKLKKTATGWMTTINGKELKVEGQITYYNRYKRQNVVKDLSVELDRLSEESVNNDISSWTKGRSGEALSLLKKRFSHRPVQEKFVCLNCGFETHADEQAALNIARSWLFLRSQEYKKYQTNKTTGNTDKRAFVETWQSFYRKKLKEVWKPAV

SEQ ID NO: 43001 - protein, 979 aa, synthetic construct
  REGION 1..979: note = engineered CasX variant
QEIKRINKIRRRLVKDSNTKKAGKTGPMKTLLVRVMTPDLRERLENLRKKPENIPQPISNTSRANLNKLLTDYTEMKKAILHVYWEEFQKDPVGLMSRVAQPASKKIDQNKLKPEMDEKGNLTTAGFACSQCGQPLFVYKLEQVSEKGKAYTNYFGRCNVAEHEKLILLYQLKPEKDSDEAVTYSLGKFGQRALDFYSIHVTKESTHPVKPLAQIAGNRYASTPVGKALSDACMGTIASFLSKYQDIIIEHQKVVKGNQKRLESLRELAGKENLEYPSVTLPPQPHTKEGVDAYNEVIARVRMWVNLNLWQKLKLSRDDAKPLLRLKGFPSFPLVERQANEVDWWDMVCNVKKLINEKKEDGKVFWQNLAGYKRQEALRPYLSSEEDRKKGKKFARYQLGDLLLHLEKKHGERDWGKVYDEAWERIDKKVEGLSKHIKLEEERRSEDAQSKAALTDWLRAKASFVIEGLKEADKDEFCRCELKLQKWYGDLRGKPFAIEAENSILDISGFSKQYNCAFIWQKDGVKKLNLYLIINYFKGGKLRFKKIKPEAFEANRFYTVINKKSGEIVPMEVNFNFDDPNLIILPLAFGKRQGREFIWNDLLSLETGSLKLANGRVIEKTLYNRRTRQDEPALFVALTFERREVLDSSNIKPMNLIGVDRGENIPAVIALTDPEGCPLSRFKDSLGNPTHILRIGESYKEKQRTIQAKKEVEQRRAGGYSRKYASKAKNLADDMVRNTARDLLYYAVTQDAMLIFENLSRGFGRQGKRTFMAERQYTRMEDWLTAKLAYEGLPSKTYLSKTLAQYTSKTCSNCGFTITSADYDRVLEKLKKTATGWMTTINGKELKVEGQITYYNRYKRQNVVKDLSVELDRLSEESVNNDISSWTKGRSGEALSLLKKRFSHRPVQEKFVCLNCGFETHADEQAALNIARSWLFLRSQEYKKYQTNKTTGNTDKRAFVETWQSFYRKKLKEVWKPAV

SEQ ID NO: 43002 - protein, 979 aa, synthetic construct
  REGION 1..979: note = engineered CasX variant
QEIKRINKIRRRLVKDSNTKKAGKTGPMKTLLVRVMTPDLRERLENLRKKPENIPQPISNTSRANLNKLLTDYTEMKKAILHVYWEEFQKDPVGLMSRVAQPASKKIDQNKLKPEMDEKGNLTTAGFACSQCGQPLFVYKLEQVSEKGKAYTNYFGRCNVAEHEKLILLYQLKPEKDSDEAVTYSLGKFGQRALDFYSIHVTKESTHPVKPLAQIAGNRYASAPVGKALSDACMGTIASFLSKYQDIIIEHQKVVKGNQKRLESLRELAGKENLEYPSVTLPPQPHTKEGVDAYNEVIARVRMWVNLNLWQKLKLSRDDAKPLLRLKGFPSFPLVERQANEVDWWDMVCNVKKLINEKKEDGKVFWQNLAGYKRQEALRPYLSSEEDRKKGKKFARYQLGDLLLHLEKKHGERDWGKVYDEAWERIDKKVEGLSKHIKLEEERRSEDAQSKAALTDWLRAKASFVIEGLKEADKDEFCRCELKLQKWYGDLRGKPFAIEAENSILDISGFSKQYNCAFIWQKDGVKKLNLYLIINYFKGGKLRFKKIKPEAFEANRFYTVINKKSGEIVPMEVNFNFDDPNLIILPLAFGKRQGREFIWNDLLSLETGSLKLANGRVIEKTLYNRRTRQDEPALFVALTFERREVLDSSNIKPMNLIGVDRGENIPAVIALTDPEGCPLSRFKDSLGNPTHILRIGESYKEKQRTIQAKKEVEQRRAGGYSRKYASKAKNLADDMVRNTARDLLYYAVTQDAMLIFENLSRGFGRQGKRTFMAERQYTRMEDWLTAKLAYEGLPSKTYLSKTLAQYTSKTCSNCGFTITSADYDRVLEKLKKTATGWMTTINGKELKVEGQITYYNRYKRQNVVKDLSVELDRLSEESVNNDISSWTKGRSGEALSLLKKRFSHRPVQEKFVCLNCGFETHADEQAALNIARSWLFLRSQEYKKYQTNKTTGNTDKRAFVETWQSFYRKKLKEVWKPAV

SEQ ID NO: 43003 - protein, 979 aa, synthetic construct
  REGION 1..979: note = engineered CasX variant
QEIKRINKIRRRLVKDSNTKKAGKTGPMKTLLVRVMTPDLRERLENLRKKPENIPQPISNTSRANLNKLLTDYTEMKKAILHVYWEEFQKDPVGLMSRVAQPASKKIDQNKLKPEMDEKGNLTTAGFACSQCGQPLFVYKLEQVSEKGKAYTNYFGRCNVAEHEKLILLYQLKPEKDSDEAVTYSLGKFGQRALDFYSIHVTKESTHPVKPLAQIAGNRYASVPVGKALSDACMGTIASFLSKYQDIIIEHQKVVKGNQKRLESLRELAGKENLEYPSVTLPPQPHTKEGVDAYNEVIARVRMWVNLNLWQKLKLSRDDAKPLLRLKGFPSFPLVERQANEVDWWDMVCNVKKLINEKKEDGKVFWQNLAGYKRQEALRPYLSSEEDRKKGKKFARYQLGDLLLHLEKKHGERDWGKVYDEAWERIDKKVEGLSKHIKLEEERRSEDAQSKAALTDWLRAKASFVIEGLKEADKDEFCRCELKLQKWYGDLRGKPFAIEAENSILDISGFSKQYNCAFIWQKDGVKKLNLYLIINYFKGGKLRFKKIKPEAFEANRFYTVINKKSGEIVPMEVNFNFDDPNLIILPLAFGKRQGREFIWNDLLSLETGSLKLANGRVIEKTLYNRRTRQDEPALFVALTFERREVLDSSNIKPMNLIGVDRGENIPAVIALTDPEGCPLSRFKDSLGNPTHILRIGESYKEKQRTIQAKKEVEQRRAGGYSRKYASKAKNLADDMVRNTARDLLYYAVTQDAMLIFENLSRGFGRQGKRTFMAERQYTRMEDWLTAKLAYEGLPSKTYLSKTLAQYTSKTCSNCGFTITSADYDRVLEKLKKTATGWMTTINGKELKVEGQITYYNRYKRQNVVKDLSVELDRLSEESVNNDISSWTKGRSGEALSLLKKRFSHRPVQEKFVCLNCGFETHADEQAALNIARSWLFLRSQEYKKYQTNKTTGNTDKRAFVETWQSFYRKKLKEVWKPAV

SEQ ID NO: 43004 - protein, 979 aa, synthetic construct
  REGION 1..979: note = engineered CasX variant
QEIKRINKIRRRLVKDSNTKKAGKTGPMKTLLVRVMTPDLRERLENLRKKPENIPQPISNTSRANLNKLLTDYTEMKKAILHVYWEEFQKDPVGLMSRVAQPASKKIDQNKLKPEMDEKGNLTTAGFACSQCGQPLFVYKLEQVSEKGKAYTNYFGRCNVAEHEKLIKLYQLKPEKDSDEAVTYSLGKFGQRALDFYSIHVTKESTHPVKPLAQIAGNRYASGPVGKALSDACMGTIASFLSKYQDIIIEHQKVVKGNQKRLESLRELAGKENLEYPSVTLPPQPHTKEGVDAYNEVIARVRMWVNLNLWQKLKLSRDDAKPLLRLKGFPSFPLVERQANEVDWWDMVCNVKKLINEKKEDGKVFWQNLAGYKRQEALRPYLSSEEDRKKGKKFARYQLGDLLLHLEKKHGERDWGKVYDEAWERIDKKVEGLSKHIKLEEERRSEDAQSKAALTDWLRAKASFVIEGLKEADKDEFCRCELKLQKWYGDLRGKPFAIEAENSILDISGFSKQYNCAFIWQKDGVKKLNLYLIINYFKGGKLRFKKIKPEAFEANRFYTVINKKSGEIVPMEVNFNFDDPNLIILPLAFGKRQGREFIWNDLLSLETGSLKLANGRVIEKTLYNRRTRQDEPALFVALTFERREVLDSSNIKPMNLIGVDRGENIPAVIALTDPEGCPLSRFKDSLGNPTHILRIGESYKEKQRTIQAKKEVEQRRAGGYSRKYASKAKNLADDMVRNTARDLLYYAVTQDAMLIFENLSRGFGRQGKRTFMAERQYTRMEDWLTAKLAYEGLPSKTYLSKTLAQYTSKTCSNCGFTITSADYDRVLEKLKKTATGWMTTINGKELKVEGQITYYNRYKRQNVVKDLSVELDRLSEESVNNDISSWTKGRSGEALSLLKKRFSHRPVQEKFVCLNCGFETHADEQAALNIARSWLFLRSQEYKKYQTNKTTGNTDKRAFVETWQSFYRKKLKEVWKPAV

SEQ ID NO: 43005 - protein, 978 aa, synthetic construct
  REGION 1..978: note = engineered CasX variant
QEIKRINKIRRRLVKDSNTKKAGKTGPMKTLLVRVMTPDLRERLENLRKKPENIPQPISNTSRANLNKLLTDYTEMKKAILHVYWEEFQKDPVGLMSRVAQPASKKIDQNKLKPEMDEKGNLTTAGFACSQCGQPLFVYKLEQVSEKGKAYTNYFGRCNVAEHEKLILLYQLKPEKDSDEAVTYSLGKFGQRALDFYSIHVTKESTHPVKPLAQIAGNRYASPVGKALSDACMGTIASFLSKYQDIIIEHQKVVKGNQKRLESLRELAGKENLEYPSVTLPPQPHTKEGVDAYNEVIARVRMWVNLNLWQKLKLSRDDAKPLLRLKGFPSFPLVERQANEVDWWDMVCNVKKLINEKKEDGKVFWQNLAGYKRQEALRPYLSSEEDRKKGKKFARYQLGDLLLHLEKKHGERDWGKVYDEAWERIDKKVEGLSKHIKLEEERRSEDAQSKAALTDWLRAKASFVIEGLKEADKDEFCRCELKLQKWYGDLRGKPFAIEAENSILDISGFSKQYNCAFIWQKDGVKKLNLYLIINYFKGGKLRFKKIKPEAFEANRFYTVINKKSGEIVPMEVNFNFDDPNLIILPLAFGKRQGREFIWNDLLSLETGSLKLANGRVIEKTLYNRRTRQDEPALFVALTFERREVLDSSNIKPMNLIGVDRGENIPAVIALTDPEGCPLSRFKDSLGNPTHILRIGESYKEKQRTIQAKKEVEQRRAGGYSRKYASKAKNLADDMVRNTARDLLYYAVTQDAMLIFENLSRGFGRQGKRTFMAERQYTRMEDWLTAKLAYEGLPSKTYLSKTLAQYTSKTCSNCGFTITSADYDRVLEKLKKTATGWMTTINGKELKVEGQITYYNRYKRQNVVKDLSVELDRLSEESVNNDISSWTKGRSGEALSLLKKRFSHRPVQEKFVCLNCGFETHADEQAALNIARSWLFLRSQEYKKYQTNKTTGNTDKRAFVETWQSFYRKKLKEVWKPAV

SEQ ID NO: 43006 - protein, 979 aa, synthetic construct
  REGION 1..979: note = engineered CasX variant
QEIKRINKIRRRLVKDSNTKKAGKTGPMKTLLVRVMTPDLRERLENLRKKPENIPQPISNTSRANLNKLLTDYTEMKKAILHVYWEEFQKDPVGLMSRVAQPASKKIDQNKLKPEMDEKGNLTTAGFACSQCGQPLFVYKLEQVSEKGKAYTNYFGRCNVAEHEKLILLYQLKPEKDSDEAVTYSLGKFGQRALDFYSIHVTKESTHPVKPLAQIAGNRYASYPVGKALSDACMGTIASFLSKYQDIIIEHQKVVKGNQKRLESLRELAGKENLEYPSVTLPPQPHTKEGVDAYNEVIARVRMWVNLNLWQKLKLSRDDAKPLLRLKGFPSFPLVERQANEVDWWDMVCNVKKLINEKKEDGKVFWQNLAGYKRQEALRPYLSSEEDRKKGKKFARYQLGDLLLHLEKKHGEYDWGKVYDEAWERIDKKVEGLSKHIKLEEERRSEDAQSKAALTDWLRAKASFVIEGLKEADKDEFCRCELKLQKWYGDLRGKPFAIEAENSILDISGFSKQYNCAFIWQKDGVKKLNLYLIINYFKGGKLRFKKIKPEAFEANRFYTVINKKSGEIVPMEVNFNFDDPNLIILPLAFGKRQGREFIWNDLLSLETGSLKLANGRVIEKTLYNRRTRQDEPALFVALTFERREVLDSSNIKPMNLIGVDRGENIPAVIALTDPEGCPLSRFKDSLGNPTHILRIGESYKEKQRTIQAKKEVEQRRAGGYSRKYASKAKNLADDMVRNTARDLLYYAVTQDAMLIFENLSRGFGRQGKRTFMAERQYTRMEDWLTAKLAYEGLPSKTYLSKTLAQYTSKTCSNCGFTITSADYDRVLEKLKKTATGWMTTINGKELKVEGQITYYNRYKRQNVVKDLSVELDRLSEESVNNDISSWTKGRSGEALSLLKKRFSHRPVQEKFVCLNCGFETHADEQAALNIARSWLFLRSQEYKKYQTNKTTGNTDKRAFVETWQSFYRKKLKEVWKPAV

SEQ ID NO: 43007 - protein, 979 aa, synthetic construct
  REGION 1..979: note = engineered CasX variant
QEIKRINKIRRRLVKDSNTKKAGKTGPMKTLLVRVMTPDLRERLENLRKKPENIPQPISNTSRANLNKLLTDYTEMKKAILHVYWEEFQKDPVGLMSRVAQPASKKIDQNKLKPEMDEKGNLTTAGFACSQCGQPLFVYKLEQVSEKGKAYTNYFGRCNVAEHEKLILLYQLKPEKDSDEAVTYSLGKFGQRALDFYSIHVTKESTHPVKPLAQIAGNRYASHPVGKALSDACMGTIASFLSKYQDIIIEHQKVVKGNQKRLESLRELAGKENLEYPSVTLPPQPHTKEGVDAYNEVIARVRMWVNLNLWQKLKLSRDDAKPLLRLKGFPSFPLVERQANEVDWWDMVCNVKKLINEKKEDGKVFWQNLAGYKRQEALRPYLSSEEDRKKGKKFARYQLGDLLLHLEKKHGEYDWGKVYDEAWERIDKKVEGLSKHIKLEEERRSEDAQSKAALTDWLRAKASFVIEGLKEADKDEFCRCELKLQKWYGDLRGKPFAIEAENSILDISGFSKQYNCAFIWQKDGVKKLNLYLIINYFKGGKLRFKKIKPEAFEANRFYTVINKKSGEIVPMEVNFNFDDPNLIILPLAFGKRQGREFIWNDLLSLETGSLKLANGRVIEKTLYNRRTRQDEPALFVALTFERREVLDSSNIKPMNLIGVDRGENIPAVIALTDPEGCPLSRFKDSLGNPTHILRIGESYKEKQRTIQAKKEVEQRRAGGYSRKYASKAKNLADDMVRNTARDLLYYAVTQDAMLIFENLSRGFGRQGKRTFMAERQYTRMEDWLTAKLAYEGLPSKTYLSKTLAQYTSKTCSNCGFTITSADYDRVLEKLKKTATGWMTTINGKELKVEGQITYYNRYKRQNVVKDLSVELDRLSEESVNNDISSWTKGRSGEALSLLKKRFSHRPVQEKFVCLNCGFETHADEQAALNIARSWLFLRSQEYKKYQTNKTTGNTDKRAFVETWQSFYRKKLKEVWKPAV

SEQ ID NO: 43008 - protein, 979 aa, synthetic construct
  REGION 1..979: note = engineered CasX variant
QEIKRINKIRRRLVKDSNTKKAGKTGPMKTLLVRVMTPDLRERLENLRKKPENIPQPISNTSRANLNKLLTDYTEMKKAILHVYWEEFQKDPVGLMSRVAQPASKKIDQNKLKPEMDEKGNLTTAGFACSQCGQPLFVYKLEQVSEKGKAYTNYFGRCNVAEHEKLILLYQLKPEKDSDEAVTYSLGKFGQRALDFYSIHVTKESTHPVKPLAQIAGNRYASSPVGKALSDACMGTIASFLSKYQDIIIEHQKVVKGNQKRLESLRELAGKENLEYPSVTLPPQPHTKEGVDAYNEVIARVRMWVNLNLWQKLKLSRDDAKPLLRLKGFPSFPLVERQANEVDWWDMVCNVKKLINEKKEDGKVFWQNLAGYKRQEALRPYLSSEEDRKKGKKFARYQLGDLLLHLEKKHGEYDWGKVYDEAWERIDKKVEGLSKHIKLEEERRSEDAQSKAALTDWLRAKASFVIEGLKEADKDEFCRCELKLQKWYGDLRGKPFAIEAENSILDISGFSKQYNCAFIWQKDGVKKLNLYLIINYFKGGKLRFKKIKPEAFEANRFYTVINKKSGEIVPMEVNFNFDDPNLIILPLAFGKRQGREFIWNDLLSLETGSLKLANGRVIEKTLYNRRTRQDEPALFVALTFERREVLDSSNIKPMNLIGVDRGENIPAVIALTDPEGCPLSRFKDSLGNPTHILRIGESYKEKQRTIQAKKEVEQRRAGGYSRKYASKAKNLADDMVRNTARDLLYYAVTQDAMLIFENLSRGFGRQGKRTFMAERQYTRMEDWLTAKLAYEGLPSKTYLSKTLAQYTSKTCSNCGFTITSADYDRVLEKLKKTATGWMTTINGKELKVEGQITYYNRYKRQNVVKDLSVELDRLSEESVNNDISSWTKGRSGEALSLLKKRFSHRPVQEKFVCLNCGFETHADEQAALNIARSWLFLRSQEYKKYQTNKTTGNTDKRAFVETWQSFYRKKLKEVWKPAV

SEQ ID NO: 43009 - protein, 979 aa, synthetic construct
  REGION 1..979: note = engineered CasX variant
QEIKRINKIRRRLVKDSNTKKAGKTGPMKTLLVRVMTPDLRERLENLRKKPENIPQPISNTSRANLNKLLTDYTEMKKAILHVYWEEFQKDPVGLMSRVAQPASKKIDQNKLKPEMDEKGNLTTAGFACSQCGQPLFVYKLEQVSEKGKAYTNYFGRCNVAEHEKLILLYQLKPEKDSDEAVTYSLGKFGQRALDFYSIHVTKESTHPVKPLAQIAGNRYASTPVGKALSDACMGTIASFLSKYQDIIIEHQKVVKGNQKRLESLRELAGKENLEYPSVTLPPQPHTKEGVDAYNEVIARVRMWVNLNLWQKLKLSRDDAKPLLRLKGFPSFPLVERQANEVDWWDMVCNVKKLINEKKEDGKVFWQNLAGYKRQEALRPYLSSEEDRKKGKKFARYQLGDLLLHLEKKHGEYDWGKVYDEAWERIDKKVEGLSKHIKLEEERRSEDAQSKAALTDWLRAKASFVIEGLKEADKDEFCRCELKLQKWYGDLRGKPFAIEAENSILDISGFSKQYNCAFIWQKDGVKKLNLYLIINYFKGGKLRFKKIKPEAFEANRFYTVINKKSGEIVPMEVNFNFDDPNLIILPLAFGKRQGREFIWNDLLSLETGSLKLANGRVIEKTLYNRRTRQDEPALFVALTFERREVLDSSNIKPMNLIGVDRGENIPAVIALTDPEGCPLSRFKDSLGNPTHILRIGESYKEKQRTIQAKKEVEQRRAGGYSRKYASKAKNLADDMVRNTARDLLYYAVTQDAMLIFENLSRGFGRQGKRTFMAERQYTRMEDWLTAKLAYEGLPSKTYLSKTLAQYTSKTCSNCGFTITSADYDRVLEKLKKTATGWMTTINGKELKVEGQITYYNRYKRQNVVKDLSVELDRLSEESVNNDISSWTKGRSGEALSLLKKRFSHRPVQEKFVCLNCGFETHADEQAALNIARSWLFLRSQEYKKYQTNKTTGNTDKRAFVETWQSFYRKKLKEVWKPAV

SEQ ID NO: 43010 - protein, 979 aa, synthetic construct
  REGION 1..979: note = engineered CasX variant
QEIKRINKIRRRLVKDSNTKKAGKTGPMKTLLVRVMTPDLRERLENLRKKPENIPQPISNTSRANLNKLLTDYTEMKKAILHVYWEEFQKDPVGLMSRVAQPASKKIDQNKLKPEMDEKGNLTTAGFACSQCGQPLFVYKLEQVSEKGKAYTNYFGRCNVAEHEKLILLYQLKPEKDSDEAVTYSLGKFGQRALDFYSIHVTKESTHPVKPLAQIAGNRYASAPVGKALSDACMGTIASFLSKYQDIIIEHQKVVKGNQKRLESLRELAGKENLEYPSVTLPPQPHTKEGVDAYNEVIARVRMWVNLNLWQKLKLSRDDAKPLLRLKGFPSFPLVERQANEVDWWDMVCNVKKLINEKKEDGKVFWQNLAGYKRQEALRPYLSSEEDRKKGKKFARYQLGDLLLHLEKKHGEYDWGKVYDEAWERIDKKVEGLSKHIKLEEERRSEDAQSKAALTDWLRAKASFVIEGLKEADKDEFCRCELKLQKWYGDLRGKPFAIEAENSILDISGFSKQYNCAFIWQKDGVKKLNLYLIINYFKGGKLRFKKIKPEAFEANRFYTVINKKSGEIVPMEVNFNFDDPNLIILPLAFGKRQGREFIWNDLLSLETGSLKLANGRVIEKTLYNRRTRQDEPALFVALTFERREVLDSSNIKPMNLIGVDRGENIPAVIALTDPEGCPLSRFKDSLGNPTHILRIGESYKEKQRTIQAKKEVEQRRAGGYSRKYASKAKNLADDMVRNTARDLLYYAVTQDAMLIFENLSRGFGRQGKRTFMAERQYTRMEDWLTAKLAYEGLPSKTYLSKTLAQYTSKTCSNCGFTITSADYDRVLEKLKKTATGWMTTINGKELKVEGQITYYNRYKRQNVVKDLSVELDRLSEESVNNDISSWTKGRSGEALSLLKKRFSHRPVQEKFVCLNCGFETHADEQAALNIARSWLFLRSQEYKKYQTNKTTGNTDKRAFVETWQSFYRKKLKEVWKPAV

SEQ ID NO: 43011 - protein, 979 aa, synthetic construct
  REGION 1..979: note = engineered CasX variant
QEIKRINKIRRRLVKDSNTKKAGKTGPMKTLLVRVMTPDLRERLENLRKKPENIPQPISNTSRANLNKLLTDYTEMKKAILHVYWEEFQKDPVGLMSRVAQPASKKIDQNKLKPEMDEKGNLTTAGFACSQCGQPLFVYKLEQVSEKGKAYTNYFGRCNVAEHEKLILLYQLKPEKDSDEAVTYSLGKFGQRALDFYSIHVTKESTHPVKPLAQIAGNRYASVPVGKALSDACMGTIASFLSKYQDIIIEHQKVVKGNQKRLESLRELAGKENLEYPSVTLPPQPHTKEGVDAYNEVIARVRMWVNLNLWQKLKLSRDDAKPLLRLKGFPSFPLVERQANEVDWWDMVCNVKKLINEKKEDGKVFWQNLAGYKRQEALRPYLSSEEDRKKGKKFARYQLGDLLLHLEKKHGEYDWGKVYDEAWERIDKKVEGLSKHIKLEEERRSEDAQSKAALTDWLRAKASFVIEGLKEADKDEFCRCELKLQKWYGDLRGKPFAIEAENSILDISGFSKQYNCAFIWQKDGVKKLNLYLIINYFKGGKLRFKKIKPEAFEANRFYTVINKKSGEIVPMEVNFNFDDPNLIILPLAFGKRQGREFIWNDLLSLETGSLKLANGRVIEKTLYNRRTRQDEPALFVALTFERREVLDSSNIKPMNLIGVDRGENIPAVIALTDPEGCPLSRFKDSLGNPTHILRIGESYKEKQRTIQAKKEVEQRRAGGYSRKYASKAKNLADDMVRNTARDLLYYAVTQDAMLIFENLSRGFGRQGKRTFMAERQYTRMEDWLTAKLAYEGLPSKTYLSKTLAQYTSKTCSNCGFTITSADYDRVLEKLKKTATGWMTTINGKELKVEGQITYYNRYKRQNVVKDLSVELDRLSEESVNNDISSWTKGRSGEALSLLKKRFSHRPVQEKFVCLNCGFETHADEQAALNIARSWLFLRSQEYKKYQTNKTTGNTDKRAFVETWQSFYRKKLKEVWKPAV

SEQ ID NO: 43012 - protein, 979 aa, synthetic construct
  REGION 1..979: note = engineered CasX variant
QEIKRINKIRRRLVKDSNTKKAGKTGPMKTLLVRVMTPDLRERLENLRKKPENIPQPISNTSRANLNKLLTDYTEMKKAILHVYWEEFQKDPVGLMSRVAQPASKKIDQNKLKPEMDEKGNLTTAGFACSQCGQPLFVYKLEQVSEKGKAYTNYFGRCNVAEHEKLIKLYQLKPEKDSDEAVTYSLGKFGQRALDFYSIHVTKESTHPVKPLAQIAGNRYASGPVGKALSDACMGTIASFLSKYQDIIIEHQKVVKGNQKRLESLRELAGKENLEYPSVTLPPQPHTKEGVDAYNEVIARVRMWVNLNLWQKLKLSRDDAKPLLRLKGFPSFPLVERQANEVDWWDMVCNVKKLINEKKEDGKVFWQNLAGYKRQEALRPYLSSEEDRKKGKKFARYQLGDLLLHLEKKHGEYDWGKVYDEAWERIDKKVEGLSKHIKLEEERRSEDAQSKAALTDWLRAKASFVIEGLKEADKDEFCRCELKLQKWYGDLRGKPFAIEAENSILDISGFSKQYNCAFIWQKDGVKKLNLYLIINYFKGGKLRFKKIKPEAFEANRFYTVINKKSGEIVPMEVNFNFDDPNLIILPLAFGKRQGREFIWNDLLSLETGSLKLANGRVIEKTLYNRRTRQDEPALFVALTFERREVLDSSNIKPMNLIGVDRGENIPAVIALTDPEGCPLSRFKDSLGNPTHILRIGESYKEKQRTIQAKKEVEQRRAGGYSRKYASKAKNLADDMVRNTARDLLYYAVTQDAMLIFENLSRGFGRQGKRTFMAERQYTRMEDWLTAKLAYEGLPSKTYLSKTLAQYTSKTCSNCGFTITSADYDRVLEKLKKTATGWMTTINGKELKVEGQITYYNRYKRQNVVKDLSVELDRLSEESVNNDISSWTKGRSGEALSLLKKRFSHRPVQEKFVCLNCGFETHADEQAALNIARSWLFLRSQEYKKYQTNKTTGNTDKRAFVETWQSFYRKKLKEVWKPAV

SEQ ID NO: 43013 - protein, 978 aa, synthetic construct
  REGION 1..978: note = engineered CasX variant
QEIKRINKIRRRLVKDSNTKKAGKTGPMKTLLVRVMTPDLRERLENLRKKPENIPQPISNTSRANLNKLLTDYTEMKKAILHVYWEEFQKDPVGLMSRVAQPASKKIDQNKLKPEMDEKGNLTTAGFACSQCGQPLFVYKLEQVSEKGKAYTNYFGRCNVAEHEKLILLYQLKPEKDSDEAVTYSLGKFGQRALDFYSIHVTKESTHPVKPLAQIAGNRYASPVGKALSDACMGTIASFLSKYQDIIIEHQKVVKGNQKRLESLRELAGKENLEYPSVTLPPQPHTKEGVDAYNEVIARVRMWVNLNLWQKLKLSRDDAKPLLRLKGFPSFPLVERQANEVDWWDMVCNVKKLINEKKEDGKVFWQNLAGYKRQEALRPYLSSEEDRKKGKKFARYQLGDLLLHLEKKHGEYDWGKVYDEAWERIDKKVEGLSKHIKLEEERRSEDAQSKAALTDWLRAKASFVIEGLKEADKDEFCRCELKLQKWYGDLRGKPFAIEAENSILDISGFSKQYNCAFIWQKDGVKKLNLYLIINYFKGGKLRFKKIKPEAFEANRFYTVINKKSGEIVPMEVNFNFDDPNLIILPLAFGKRQGREFIWNDLLSLETGSLKLANGRVIEKTLYNRRTRQDEPALFVALTFERREVLDSSNIKPMNLIGVDRGENIPAVIALTDPEGCPLSRFKDSLGNPTHILRIGESYKEKQRTIQAKKEVEQRRAGGYSRKYASKAKNLADDMVRNTARDLLYYAVTQDAMLIFENLSRGFGRQGKRTFMAERQYTRMEDWLTAKLAYEGLPSKTYLSKTLAQYTSKTCSNCGFTITSADYDRVLEKLKKTATGWMTTINGKELKVEGQITYYNRYKRQNVVKDLSVELDRLSEESVNNDISSWTKGRSGEALSLLKKRFSHRPVQEKFVCLNCGFETHADEQAALNIARSWLFLRSQEYKKYQTNKTTGNTDKRAFVETWQSFYRKKLKEVWKPAV

SEQ ID NO: 43014 - protein, 978 aa, synthetic construct
  REGION 1..978: note = engineered CasX variant
QEIKRINKIRRRLVKDSNTKKAGKTGPMKTLLVRVMTPDLRERLENLRKKPENIPQPISNTSRANLNKLLTDYTEMKKAILHVYWEEFQKDPVGLMSRVAQPASKKIDQNKLKPEMDEKGNLTTAGFACSQCGQPLFVYKLEQVSEKGKAYTNYFGRCNVAEHEKLILLYQLKPEKDSDEAVTYSLGKFGQRALDFYSIHVTKESTHPVKPLAQIAGNRYASYPVGKALSDACMGTIASFLSKYQDIIIEHQKVVKGNQKRLESLRELAGKENLEYPSVTLPPQPHTKEGVDAYNEVIARVRMWVNLNLWQKLKLSRDDAKPLLRLKGFPSFPLVERQANEVDWWDMVCNVKKLINEKKEDGKVFWQNLAGYKRQEALRPYLSSEEDRKKGKKFARYQLGDLLLHLEKKHGEDWGDVYDEAWERIDKKVEGLSKHIKLEEERRSEDAQSKAALTDWLRAKASFVIEGLKEADKDEFCRCELKLQKWYGDLRGKPFAIEAENSILDISGFSKQYNCAFIWQKDGVKKLNLYLIINYFKGGKLRFKKIKPEAFEANRFYTVINKKSGEIVPMEVNFNFDDPNLIILPLAFGKRQGREFIWNDLLSLETGSLKLANGRVIEKTLYNRRTRQDEPALFVALTFERREVLDSSNIKPMNLIGVDRGENIPAVIALTDPEGCPLSRFKDSLGNPTHILRIGESYKEKQRTIQAKKEVEQRRAGGYSRKYASKAKNLADDMVRNTARDLLYYAVTQDAMLIFENLSRGFGRQGKRTFMAERQYTRMEDWLTAKLAYEGLPSKTYLSKTLAQYTSKTCSNCGFTITSADYDRVLEKLKKTATGWMTTINGKELKVEGQITYYNRYKRQNVVKDLSVELDRLSEESVNNDISSWTKGRSGEALSLLKKRFSHRPVQEKFVCLNCGFETHADEQAALNIARSWLFLRSQEYKKYQTNKTTGNTDKRAFVETWQSFYRKKLKEVWKPAV

SEQ ID NO: 43015 - protein, 978 aa, synthetic construct
  REGION 1..978: note = engineered CasX variant
QEIKRINKIRRRLVKDSNTKKAGKTGPMKTLLVRVMTPDLRERLENLRKKPENIPQPISNTSRANLNKLLTDYTEMKKAILHVYWEEFQKDPVGLMSRVAQPASKKIDQNKLKPEMDEKGNLTTAGFACSQCGQPLFVYKLEQVSEKGKAYTNYFGRCNVAEHEKLILLYQLKPEKDSDEAVTYSLGKFGQRALDFYSIHVTKESTHPVKPLAQIAGNRYASHPVGKALSDACMGTIASFLSKYQDIIIEHQKVVKGNQKRLESLRELAGKENLEYPSVTLPPQPHTKEGVDAYNEVIARVRMWVNLNLWQKLKLSRDDAKPLLRLKGFPSFPLVERQANEVDWWDMVCNVKKLINEKKEDGKVFWQNLAGYKRQEALRPYLSSEEDRKKGKKFARYQLGDLLLHLEKKHGEDWGDVYDEAWERIDKKVEGLSKHIKLEEERRSEDAQSKAALTDWLRAKASFVIEGLKEADKDEFCRCELKLQKWYGDLRGKPFAIEAENSILDISGFSKQYNCAFIWQKDGVKKLNLYLIINYFKGGKLRFKKIKPEAFEANRFYTVINKKSGEIVPMEVNFNFDDPNLIILPLAFGKRQGREFIWNDLLSLETGSLKLANGRVIEKTLYNRRTRQDEPALFVALTFERREVLDSSNIKPMNLIGVDRGENIPAVIALTDPEGCPLSRFKDSLGNPTHILRIGESYKEKQRTIQAKKEVEQRRAGGYSRKYASKAKNLADDMVRNTARDLLYYAVTQDAMLIFENLSRGFGRQGKRTFMAERQYTRMEDWLTAKLAYEGLPSKTYLSKTLAQYTSKTCSNCGFTITSADYDRVLEKLKKTATGWMTTINGKELKVEGQITYYNRYKRQNVVKDLSVELDRLSEESVNNDISSWTKGRSGEALSLLKKRFSHRPVQEKFVCLNCGFETHADEQAALNIARSWLFLRSQEYKKYQTNKTTGNTDKRAFVETWQSFYRKKLKEVWKPAV

SEQ ID NO: 43016 - protein, 978 aa, synthetic construct
  REGION 1..978: note = engineered CasX variant
QEIKRINKIRRRLVKDSNTKKAGKTGPMKTLLVRVMTPDLRERLENLRKKPENIPQPISNTSRANLNKLLTDYTEMKKAILHVYWEEFQKDPVGLMSRVAQPASKKIDQNKLKPEMDEKGNLTTAGFACSQCGQPLFVYKLEQVSEKGKAYTNYFGRCNVAEHEKLILLYQLKPEKDSDEAVTYSLGKFGQRALDFYSIHVTKESTHPVKPLAQIAGNRYASSPVGKALSDACMGTIASFLSKYQDIIIEHQKVVKGNQKRLESLRELAGKENLEYPSVTLPPQPHTKEGVDAYNEVIARVRMWVNLNLWQKLKLSRDDAKPLLRLKGFPSFPLVERQANEVDWWDMVCNVKKLINEKKEDGKVFWQNLAGYKRQEALRPYLSSEEDRKKGKKFARYQLGDLLLHLEKKHGEDWGDVYDEAWERIDKKVEGLSKHIKLEEERRSEDAQSKAALTDWLRAKASFVIEGLKEADKDEFCRCELKLQKWYGDLRGKPFAIEAENSILDISGFSKQYNCAFIWQKDGVKKLNLYLIINYFKGGKLRFKKIKPEAFEANRFYTVINKKSGEIVPMEVNFNFDDPNLIILPLAFGKRQGREFIWNDLLSLETGSLKLANGRVIEKTLYNRRTRQDEPALFVALTFERREVLDSSNIKPMNLIGVDRGENIPAVIALTDPEGCPLSRFKDSLGNPTHILRIGESYKEKQRTIQAKKEVEQRRAGGYSRKYASKAKNLADDMVRNTARDLLYYAVTQDAMLIFENLSRGFGRQGKRTFMAERQYTRMEDWLTAKLAYEGLPSKTYLSKTLAQYTSKTCSNCGFTITSADYDRVLEKLKKTATGWMTTINGKELKVEGQITYYNRYKRQNVVKDLSVELDRLSEESVNNDISSWTKGRSGEALSLLKKRFSHRPVQEKFVCLNCGFETHADEQAALNIARSWLFLRSQEYKKYQTNKTTGNTDKRAFVETWQSFYRKKLKEVWKPAV

SEQ ID NO: 43017 - protein, 978 aa, synthetic construct
  REGION 1..978: note = engineered CasX variant
QEIKRINKIRRRLVKDSNTKKAGKTGPMKTLLVRVMTPDLRERLENLRKKPENIPQPISNTSRANLNKLLTDYTEMKKAILHVYWEEFQKDPVGLMSRVAQPASKKIDQNKLKPEMDEKGNLTTAGFACSQCGQPLFVYKLEQVSEKGKAYTNYFGRCNVAEHEKLILLYQLKPEKDSDEAVTYSLGKFGQRALDFYSIHVTKESTHPVKPLAQIAGNRYASTPVGKALSDACMGTIASFLSKYQDIIIEHQKVVKGNQKRLESLRELAGKENLEYPSVTLPPQPHTKEGVDAYNEVIARVRMWVNLNLWQKLKLSRDDAKPLLRLKGFPSFPLVERQANEVDWWDMVCNVKKLINEKKEDGKVFWQNLAGYKRQEALRPYLSSEEDRKKGKKFARYQLGDLLLHLEKKHGEDWGDVYDEAWERIDKKVEGLSKHIKLEEERRSEDAQSKAALTDWLRAKASFVIEGLKEADKDEFCRCELKLQKWYGDLRGKPFAIEAENSILDISGFSKQYNCAFIWQKDGVKKLNLYLIINYFKGGKLRFKKIKPEAFEANRFYTVINKKSGEIVPMEVNFNFDDPNLIILPLAFGKRQGREFIWNDLLSLETGSLKLANGRVIEKTLYNRRTRQDEPALFVALTFERREVLDSSNIKPMNLIGVDRGENIPAVIALTDPEGCPLSRFKDSLGNPTHILRIGESYKEKQRTIQAKKEVEQRRAGGYSRKYASKAKNLADDMVRNTARDLLYYAVTQDAMLIFENLSRGFGRQGKRTFMAERQYTRMEDWLTAKLAYEGLPSKTYLSKTLAQYTSKTCSNCGFTITSADYDRVLEKLKKTATGWMTTINGKELKVEGQITYYNRYKRQNVVKDLSVELDRLSEESVNNDISSWTKGRSGEALSLLKKRFSHRPVQEKFVCLNCGFETHADEQAALNIARSWLFLRSQEYKKYQTNKTTGNTDKRAFVETWQSFYRKKLKEVWKPAV

SEQ ID NO: 43018 - protein, 978 aa, synthetic construct
  REGION 1..978: note = engineered CasX variant
QEIKRINKIRRRLVKDSNTKKAGKTGPMKTLLVRVMTPDLRERLENLRKKPENIPQPISNTSRANLNKLLTDYTEMKKAILHVYWEEFQKDPVGLMSRVAQPASKKIDQNKLKPEMDEKGNLTTAGFACSQCGQPLFVYKLEQVSEKGKAYTNYFGRCNVAEHEKLILLYQLKPEKDSDEAVTYSLGKFGQRALDFYSIHVTKESTHPVKPLAQIAGNRYASAPVGKALSDACMGTIASFLSKYQDIIIEHQKVVKGNQKRLESLRELAGKENLEYPSVTLPPQPHTKEGVDAYNEVIARVRMWVNLNLWQKLKLSRDDAKPLLRLKGFPSFPLVERQANEVDWWDMVCNVKKLINEKKEDGKVFWQNLAGYKRQEALRPYLSSEEDRKKGKKFARYQLGDLLLHLEKKHGEDWGDVYDEAWERIDKKVEGLSKHIKLEEERRSEDAQSKAALTDWLRAKASFVIEGLKEADKDEFCRCELKLQKWYGDLRGKPFAIEAENSILDISGFSKQYNCAFIWQKDGVKKLNLYLIINYFKGGKLRFKKIKPEAFEANRFYTVINKKSGEIVPMEVNFNFDDPNLIILPLAFGKRQGREFIWNDLLSLETGSLKLANGRVIEKTLYNRRTRQDEPALFVALTFERREVLDSSNIKPMNLIGVDRGENIPAVIALTDPEGCPLSRFKDSLGNPTHILRIGESYKEKQRTIQAKKEVEQRRAGGYSRKYASKAKNLADDMVRNTARDLLYYAVTQDAMLIFENLSRGFGRQGKRTFMAERQYTRMEDWLTAKLAYEGLPSKTYLSKTLAQYTSKTCSNCGFTITSADYDRVLEKLKKTATGWMTTINGKELKVEGQITYYNRYKRQNVVKDLSVELDRLSEESVNNDISSWTKGRSGEALSLLKKRFSHRPVQEKFVCLNCGFETHADEQAALNIARSWLFLRSQEYKKYQTNKTTGNTDKRAFVETWQSFYRKKLKEVWKPAV

SEQ ID NO: 43019 - protein, 978 aa, synthetic construct
  REGION 1..978: note = engineered CasX variant
QEIKRINKIRRRLVKDSNTKKAGKTGPMKTLLVRVMTPDLRERLENLRKKPENIPQPISNTSRANLNKLLTDYTEMKKAILHVYWEEFQKDPVGLMSRVAQPASKKIDQNKLKPEMDEKGNLTTAGFACSQCGQPLFVYKLEQVSEKGKAYTNYFGRCNVAEHEKLILLYQLKPEKDSDEAVTYSLGKFGQRALDFYSIHVTKESTHPVKPLAQIAGNRYASVPVGKALSDACMGTIASFLSKYQDIIIEHQKVVKGNQKRLESLRELAGKENLEYPSVTLPPQPHTKEGVDAYNEVIARVRMWVNLNLWQKLKLSRDDAKPLLRLKGFPSFPLVERQANEVDWWDMVCNVKKLINEKKEDGKVFWQNLAGYKRQEALRPYLSSEEDRKKGKKFARYQLGDLLLHLEKKHGEDWGDVYDEAWERIDKKVEGLSKHIKLEEERRSEDAQSKAALTDWLRAKASFVIEGLKEADKDEFCRCELKLQKWYGDLRGKPFAIEAENSILDISGFSKQYNCAFIWQKDGVKKLNLYLIINYFKGGKLRFKKIKPEAFEANRFYTVINKKSGEIVPMEVNFNFDDPNLIILPLAFGKRQGREFIWNDLLSLETGSLKLANGRVIEKTLYNRRTRQDEPALFVALTFERREVLDSSNIKPMNLIGVDRGENIPAVIALTDPEGCPLSRFKDSLGNPTHILRIGESYKEKQRTIQAKKEVEQRRAGGYSRKYASKAKNLADDMVRNTARDLLYYAVTQDAMLIFENLSRGFGRQGKRTFMAERQYTRMEDWLTAKLAYEGLPSKTYLSKTLAQYTSKTCSNCGFTITSADYDRVLEKLKKTATGWMTTINGKELKVEGQITYYNRYKRQNVVKDLSVELDRLSEESVNNDISSWTKGRSGEALSLLKKRFSHRPVQEKFVCLNCGFETHADEQAALNIARSWLFLRSQEYKKYQTNKTTGNTDKRAFVETWQSFYRKKLKEVWKPAV

SEQ ID NO: 43020 - protein, 978 aa, synthetic construct
  REGION 1..978: note = engineered CasX variant
QEIKRINKIRRRLVKDSNTKKAGKTGPMKTLLVRVMTPDLRERLENLRKKPENIPQPISNTSRANLNKLLTDYTEMKKAILHVYWEEFQKDPVGLMSRVAQPASKKIDQNKLKPEMDEKGNLTTAGFACSQCGQPLFVYKLEQVSEKGKAYTNYFGRCNVAEHEKLIKLYQLKPEKDSDEAVTYSLGKFGQRALDFYSIHVTKESTHPVKPLAQIAGNRYASGPVGKALSDACMGTIASFLSKYQDIIIEHQKVVKGNQKRLESLRELAGKENLEYPSVTLPPQPHTKEGVDAYNEVIARVRMWVNLNLWQKLKLSRDDAKPLLRLKGFPSFPLVERQANEVDWWDMVCNVKKLINEKKEDGKVFWQNLAGYKRQEALRPYLSSEEDRKKGKKFARYQLGDLLLHLEKKHGEDWGDVYDEAWERIDKKVEGLSKHIKLEEERRSEDAQSKAALTDWLRAKASFVIEGLKEADKDEFCRCELKLQKWYGDLRGKPFAIEAENSILDISGFSKQYNCAFIWQKDGVKKLNLYLIINYFKGGKLRFKKIKPEAFEANRFYTVINKKSGEIVPMEVNFNFDDPNLIILPLAFGKRQGREFIWNDLLSLETGSLKLANGRVIEKTLYNRRTRQDEPALFVALTFERREVLDSSNIKPMNLIGVDRGENIPAVIALTDPEGCPLSRFKDSLGNPTHILRIGESYKEKQRTIQAKKEVEQRRAGGYSRKYASKAKNLADDMVRNTARDLLYYAVTQDAMLIFENLSRGFGRQGKRTFMAERQYTRMEDWLTAKLAYEGLPSKTYLSKTLAQYTSKTCSNCGFTITSADYDRVLEKLKKTATGWMTTINGKELKVEGQITYYNRYKRQNVVKDLSVELDRLSEESVNNDISSWTKGRSGEALSLLKKRFSHRPVQEKFVCLNCGFETHADEQAALNIARSWLFLRSQEYKKYQTNKTTGNTDKRAFVETWQSFYRKKLKEVWKPAV

SEQ ID NO: 43021 - protein, 977 aa, synthetic construct
  REGION 1..977: note = engineered CasX variant
QEIKRINKIRRRLVKDSNTKKAGKTGPMKTLLVRVMTPDLRERLENLRKKPENIPQPISNTSRANLNKLLTDYTEMKKAILHVYWEEFQKDPVGLMSRVAQPASKKIDQNKLKPEMDEKGNLTTAGFACSQCGQPLFVYKLEQVSEKGKAYTNYFGRCNVAEHEKLILLYQLKPEKDSDEAVTYSLGKFGQRALDFYSIHVTKESTHPVKPLAQIAGNRYASPVGKALSDACMGTIASFLSKYQDIIIEHQKVVKGNQKRLESLRELAGKENLEYPSVTLPPQPHTKEGVDAYNEVIARVRMWVNLNLWQKLKLSRDDAKPLLRLKGFPSFPLVERQANEVDWWDMVCNVKKLINEKKEDGKVFWQNLAGYKRQEALRPYLSSEEDRKKGKKFARYQLGDLLLHLEKKHGEDWGDVYDEAWERIDKKVEGLSKHIKLEEERRSEDAQSKAALTDWLRAKASFVIEGLKEADKDEFCRCELKLQKWYGDLRGKPFAIEAENSILDISGFSKQYNCAFIWQKDGVKKLNLYLIINYFKGGKLRFKKIKPEAFEANRFYTVINKKSGEIVPMEVNFNFDDPNLIILPLAFGKRQGREFIWNDLLSLETGSLKLANGRVIEKTLYNRRTRQDEPALFVALTFERREVLDSSNIKPMNLIGVDRGENIPAVIALTDPEGCPLSRFKDSLGNPTHILRIGESYKEKQRTIQAKKEVEQRRAGGYSRKYASKAKNLADDMVRNTARDLLYYAVTQDAMLIFENLSRGFGRQGKRTFMAERQYTRMEDWLTAKLAYEGLPSKTYLSKTLAQYTSKTCSNCGFTITSADYDRVLEKLKKTATGWMTTINGKELKVEGQITYYNRYKRQNVVKDLSVELDRLSEESVNNDISSWTKGRSGEALSLLKKRFSHRPVQEKFVCLNCGFETHADEQAALNIARSWLFLRSQEYKKYQTNKTTGNTDKRAFVETWQSFYRKKLKEVWKPAV

SEQ ID NO: 43022 - protein, 978 aa, synthetic construct
  REGION 1..978: note = engineered CasX variant
QEIKRINKIRRRLVKDSNTKKAGKTGPMKTLLVRVMTPDLRERLENLRKKPENIPQPISNTSRANLNKLLTDYTEMKKAILHVYWEEFQKDPVGLMSRVAQPASKKIDQNKLKPEMDEKGNLTTAGFACSQCGQPLFVYKLEQVSEKGKAYTNYFGRCNVAEHEKLILLYQLKPEKDSDEAVTYSLGKFGQRALDFYSIHVTKESTHPVKPLAQIAGNRYASYPVGKALSDACMGTIASFLSKYQDIIIEHQKVVKGNQKRLESLRELAGKENLEYPSVTLPPQPHTKEGVDAYNEVIARVRMWVNLNLWQKLKLSRDDAKPLLRLKGFPSFPLVERQANEVDWWDMVCNVKKLINEKKEDGKVFWQNLAGYKRQEALRPYLSSEEDRKKGKKFARYQLGDLLLHLEKKHGEDWGKVYGEAWERIDKKVEGLSKHIKLEEERRSEDAQSKAALTDWLRAKASFVIEGLKEADKDEFCRCELKLQKWYGDLRGKPFAIEAENSILDISGFSKQYNCAFIWQKDGVKKLNLYLIINYFKGGKLRFKKIKPEAFEANRFYTVINKKSGEIVPMEVNFNFDDPNLIILPLAFGKRQGREFIWNDLLSLETGSLKLANGRVIEKTLYNRRTRQDEPALFVALTFERREVLDSSNIKPMNLIGVDRGENIPAVIALTDPEGCPLSRFKDSLGNPTHILRIGESYKEKQRTIQAKKEVEQRRAGGYSRKYASKAKNLADDMVRNTARDLLYYAVTQDAMLIFENLSRGFGRQGKRTFMAERQYTRMEDWLTAKLAYEGLPSKTYLSKTLAQYTSKTCSNCGFTITSADYDRVLEKLKKTATGWMTTINGKELKVEGQITYYNRYKRQNVVKDLSVELDRLSEESVNNDISSWTKGRSGEALSLLKKRFSHRPVQEKFVCLNCGFETHADEQAALNIARSWLFLRSQEYKKYQTNKTTGNTDKRAFVETWQSFYRKKLKEVWKPAV

SEQ ID NO: 43023 - protein, 978 aa, synthetic construct
  REGION 1..978: note = engineered CasX variant
QEIKRINKIRRRLVKDSNTKKAGKTGPMKTLLVRVMTPDLRERLENLRKKPENIPQPISNTSRANLNKLLTDYTEMKKAILHVYWEEFQKDPVGLMSRVAQPASKKIDQNKLKPEMDEKGNLTTAGFACSQCGQPLFVYKLEQVSEKGKAYTNYFGRCNVAEHEKLILLYQLKPEKDSDEAVTYSLGKFGQRALDFYSIHVTKESTHPVKPLAQIAGNRYASHPVGKALSDACMGTIASFLSKYQDIIIEHQKVVKGNQKRLESLRELAGKENLEYPSVTLPPQPHTKEGVDAYNEVIARVRMWVNLNLWQKLKLSRDDAKPLLRLKGFPSFPLVERQANEVDWWDMVCNVKKLINEKKEDGKVFWQNLAGYKRQEALRPYLSSEEDRKKGKKFARYQLGDLLLHLEKKHGEDWGKVYGEAWERIDKKVEGLSKHIKLEEERRSEDAQSKAALTDWLRAKASFVIEGLKEADKDEFCRCELKLQKWYGDLRGKPFAIEAENSILDISGFSKQYNCAFIWQKDGVKKLNLYLIINYFKGGKLRFKKIKPEAFEANRFYTVINKKSGEIVPMEVNFNFDDPNLIILPLAFGKRQGREFIWNDLLSLETGSLKLANGRVIEKTLYNRRTRQDEPALFVALTFERREVLDSSNIKPMNLIGVDRGENIPAVIALTDPEGCPLSRFKDSLGNPTHILRIGESYKEKQRTIQAKKEVEQRRAGGYSRKYASKAKNLADDMVRNTARDLLYYAVTQDAMLIFENLSRGFGRQGKRTFMAERQYTRMEDWLTAKLAYEGLPSKTYLSKTLAQYTSKTCSNCGFTITSADYDRVLEKLKKTATGWMTTINGKELKVEGQITYYNRYKRQNVVKDLSVELDRLSEESVNNDISSWTKGRSGEALSLLKKRFSHRPVQEKFVCLNCGFETHADEQAALNIARSWLFLRSQEYKKYQTNKTTGNTDKRAFVETWQSFYRKKLKEVWKPAV

SEQ ID NO: 43024 - protein, 978 aa, synthetic construct
  REGION 1..978: note = engineered CasX variant
QEIKRINKIRRRLVKDSNTKKAGKTGPMKTLLVRVMTPDLRERLENLRKKPENIPQPISNTSRANLNKLLTDYTEMKKAILHVYWEEFQKDPVGLMSRVAQPASKKIDQNKLKPEMDEKGNLTTAGFACSQCGQPLFVYKLEQVSEKGKAYTNYFGRCNVAEHEKLILLYQLKPEKDSDEAVTYSLGKFGQRALDFYSIHVTKESTHPVKPLAQIAGNRYASSPVGKALSDACMGTIASFLSKYQDIIIEHQKVVKGNQKRLESLRELAGKENLEYPSVTLPPQPHTKEGVDAYNEVIARVRMWVNLNLWQKLKLSRDDAKPLLRLKGFPSFPLVERQANEVDWWDMVCNVKKLINEKKEDGKVFWQNLAGYKRQEALRPYLSSEEDRKKGKKFARYQLGDLLLHLEKKHGEDWGKVYGEAWERIDKKVEGLSKHIKLEEERRSEDAQSKAALTDWLRAKASFVIEGLKEADKDEFCRCELKLQKWYGDLRGKPFAIEAENSILDISGFSKQYNCAFIWQKDGVKKLNLYLIINYFKGGKLRFKKIKPEAFEANRFYTVINKKSGEIVPMEVNFNFDDPNLIILPLAFGKRQGREFIWNDLLSLETGSLKLANGRVIEKTLYNRRTRQDEPALFVALTFERREVLDSSNIKPMNLIGVDRGENIPAVIALTDPEGCPLSRFKDSLGNPTHILRIGESYKEKQRTIQAKKEVEQRRAGGYSRKYASKAKNLADDMVRNTARDLLYYAVTQDAMLIFENLSRGFGRQGKRTFMAERQYTRMEDWLTAKLAYEGLPSKTYLSKTLAQYTSKTCSNCGFTITSADYDRVLEKLKKTATGWMTTINGKELKVEGQITYYNRYKRQNVVKDLSVELDRLSEESVNNDISSWTKGRSGEALSLLKKRFSHRPVQEKFVCLNCGFETHADEQAALNIARSWLFLRSQEYKKYQTNKTTGNTDKRAFVETWQSFYRKKLKEVWKPAV

SEQ ID NO: 43025 - protein, 978 aa, synthetic construct
  REGION 1..978: note = engineered CasX variant
QEIKRINKIRRRLVKDSNTKKAGKTGPMKTLLVRVMTPDLRERLENLRKKPENIPQPISNTSRANLNKLLTDYTEMKKAILHVYWEEFQKDPVGLMSRVAQPASKKIDQNKLKPEMDEKGNLTTAGFACSQCGQPLFVYKLEQVSEKGKAYTNYFGRCNVAEHEKLILLYQLKPEKDSDEAVTYSLGKFGQRALDFYSIHVTKESTHPVKPLAQIAGNRYASTPVGKALSDACMGTIASFLSKYQDIIIEHQKVVKGNQKRLESLRELAGKENLEYPSVTLPPQPHTKEGVDAYNEVIARVRMWVNLNLWQKLKLSRDDAKPLLRLKGFPSFPLVERQANEVDWWDMVCNVKKLINEKKEDGKVFWQNLAGYKRQEALRPYLSSEEDRKKGKKFARYQLGDLLLHLEKKHGEDWGKVYGEAWERIDKKVEGLSKHIKLEEERRSEDAQSKAALTDWLRAKASFVIEGLKEADKDEFCRCELKLQKWYGDLRGKPFAIEAENSILDISGFSKQYNCAFIWQKDGVKKLNLYLIINYFKGGKLRFKKIKPEAFEANRFYTVINKKSGEIVPMEVNFNFDDPNLIILPLAFGKRQGREFIWNDLLSLETGSLKLANGRVIEKTLYNRRTRQDEPALFVALTFERREVLDSSNIKPMNLIGVDRGENIPAVIALTDPEGCPLSRFKDSLGNPTHILRIGESYKEKQRTIQAKKEVEQRRAGGYSRKYASKAKNLADDMVRNTARDLLYYAVTQDAMLIFENLSRGFGRQGKRTFMAERQYTRMEDWLTAKLAYEGLPSKTYLSKTLAQYTSKTCSNCGFTITSADYDRVLEKLKKTATGWMTTINGKELKVEGQITYYNRYKRQNVVKDLSVELDRLSEESVNNDISSWTKGRSGEALSLLKKRFSHRPVQEKFVCLNCGFETHADEQAALNIARSWLFLRSQEYKKYQTNKTTGNTDKRAFVETWQSFYRKKLKEVWKPAV

SEQ ID NO: 43026 - protein, 978 aa, synthetic construct
  REGION 1..978: note = engineered CasX variant
QEIKRINKIRRRLVKDSNTKKAGKTGPMKTLLVRVMTPDLRERLENLRKKPENIPQPISNTSRANLNKLLTDYTEMKKAILHVYWEEFQKDPVGLMSRVAQPASKKIDQNKLKPEMDEKGNLTTAGFACSQCGQPLFVYKLEQVSEKGKAYTNYFGRCNVAEHEKLILLYQLKPEKDSDEAVTYSLGKFGQRALDFYSIHVTKESTHPVKPLAQIAGNRYASAPVGKALSDACMGTIASFLSKYQDIIIEHQKVVKGNQKRLESLRELAGKENLEYPSVTLPPQPHTKEGVDAYNEVIARVRMWVNLNLWQKLKLSRDDAKPLLRLKGFPSFPLVERQANEVDWWDMVCNVKKLINEKKEDGKVFWQNLAGYKRQEALRPYLSSEEDRKKGKKFARYQLGDLLLHLEKKHGEDWGKVYGEAWERIDKKVEGLSKHIKLEEERRSEDAQSKAALTDWLRAKASFVIEGLKEADKDEFCRCELKLQKWYGDLRGKPFAIEAENSILDISGFSKQYNCAFIWQKDGVKKLNLYLIINYFKGGKLRFKKIKPEAFEANRFYTVINKKSGEIVPMEVNFNFDDPNLIILPLAFGKRQGREFIWNDLLSLETGSLKLANGRVIEKTLYNRRTRQDEPALFVALTFERREVLDSSNIKPMNLIGVDRGENIPAVIALTDPEGCPLSRFKDSLGNPTHILRIGESYKEKQRTIQAKKEVEQRRAGGYSRKYASKAKNLADDMVRNTARDLLYYAVTQDAMLIFENLSRGFGRQGKRTFMAERQYTRMEDWLTAKLAYEGLPSKTYLSKTLAQYTSKTCSNCGFTITSADYDRVLEKLKKTATGWMTTINGKELKVEGQITYYNRYKRQNVVKDLSVELDRLSEESVNNDISSWTKGRSGEALSLLKKRFSHRPVQEKFVCLNCGFETHADEQAALNIARSWLFLRSQEYKKYQTNKTTGNTDKRAFVETWQSFYRKKLKEVWKPAV

SEQ ID NO: 43027 - protein, 978 aa, synthetic construct
  REGION 1..978: note = engineered CasX variant
QEIKRINKIRRRLVKDSNTKKAGKTGPMKTLLVRVMTPDLRERLENLRKKPENIPQPISNTSRANLNKLLTDYTEMKKAILHVYWEEFQKDPVGLMSRVAQPASKKIDQNKLKPEMDEKGNLTTAGFACSQCGQPLFVYKLEQVSEKGKAYTNYFGRCNVAEHEKLILLYQLKPEKDSDEAVTYSLGKFGQRALDFYSIHVTKESTHPVKPLAQIAGNRYASVPVGKALSDACMGTIASFLSKYQDIIIEHQKVVKGNQKRLESLRELAGKENLEYPSVTLPPQPHTKEGVDAYNEVIARVRMWVNLNLWQKLKLSRDDAKPLLRLKGFPSFPLVERQANEVDWWDMVCNVKKLINEKKEDGKVFWQNLAGYKRQEALRPYLSSEEDRKKGKKFARYQLGDLLLHLEKKHGEDWGKVYGEAWERIDKKVEGLSKHIKLEEERRSEDAQSKAALTDWLRAKASFVIEGLKEADKDEFCRCELKLQKWYGDLRGKPFAIEAENSILDISGFSKQYNCAFIWQKDGVKKLNLYLIINYFKGGKLRFKKIKPEAFEANRFYTVINKKSGEIVPMEVNFNFDDPNLIILPLAFGKRQGREFIWNDLLSLETGSLKLANGRVIEKTLYNRRTRQDEPALFVALTFERREVLDSSNIKPMNLIGVDRGENIPAVIALTDPEGCPLSRFKDSLGNPTHILRIGESYKEKQRTIQAKKEVEQRRAGGYSRKYASKAKNLADDMVRNTARDLLYYAVTQDAMLIFENLSRGFGRQGKRTFMAERQYTRMEDWLTAKLAYEGLPSKTYLSKTLAQYTSKTCSNCGFTITSADYDRVLEKLKKTATGWMTTINGKELKVEGQITYYNRYKRQNVVKDLSVELDRLSEESVNNDISSWTKGRSGEALSLLKKRFSHRPVQEKFVCLNCGFETHADEQAALNIARSWLFLRSQEYKKYQTNKTTGNTDKRAFVETWQSFYRKKLKEVWKPAV

SEQ ID NO: 43028 - protein, 978 aa, synthetic construct
  REGION 1..978: note = engineered CasX variant
QEIKRINKIRRRLVKDSNTKKAGKTGPMKTLLVRVMTPDLRERLENLRKKPENIPQPISNTSRANLNKLLTDYTEMKKAILHVYWEEFQKDPVGLMSRVAQPASKKIDQNKLKPEMDEKGNLTTAGFACSQCGQPLFVYKLEQVSEKGKAYTNYFGRCNVAEHEKLIKLYQLKPEKDSDEAVTYSLGKFGQRALDFYSIHVTKESTHPVKPLAQIAGNRYASGPVGKALSDACMGTIASFLSKYQDIIIEHQKVVKGNQKRLESLRELAGKENLEYPSVTLPPQPHTKEGVDAYNEVIARVRMWVNLNLWQKLKLSRDDAKPLLRLKGFPSFPLVERQANEVDWWDMVCNVKKLINEKKEDGKVFWQNLAGYKRQEALRPYLSSEEDRKKGKKFARYQLGDLLLHLEKKHGEDWGKVYGEAWERIDKKVEGLSKHIKLEEERRSEDAQSKAALTDWLRAKASFVIEGLKEADKDEFCRCELKLQKWYGDLRGKPFAIEAENSILDISGFSKQYNCAFIWQKDGVKKLNLYLIINYFKGGKLRFKKIKPEAFEANRFYTVINKKSGEIVPMEVNFNFDDPNLIILPLAFGKRQGREFIWNDLLSLETGSLKLANGRVIEKTLYNRRTRQDEPALFVALTFERREVLDSSNIKPMNLIGVDRGENIPAVIALTDPEGCPLSRFKDSLGNPTHILRIGESYKEKQRTIQAKKEVEQRRAGGYSRKYASKAKNLADDMVRNTARDLLYYAVTQDAMLIFENLSRGFGRQGKRTFMAERQYTRMEDWLTAKLAYEGLPSKTYLSKTLAQYTSKTCSNCGFTITSADYDRVLEKLKKTATGWMTTINGKELKVEGQITYYNRYKRQNVVKDLSVELDRLSEESVNNDISSWTKGRSGEALSLLKKRFSHRPVQEKFVCLNCGFETHADEQAALNIARSWLFLRSQEYKKYQTNKTTGNTDKRAFVETWQSFYRKKLKEVWKPAV

SEQ ID NO: 43029 - protein, 977 aa, synthetic construct
  REGION 1..977: note = engineered CasX variant
QEIKRINKIRRRLVKDSNTKKAGKTGPMKTLLVRVMTPDLRERLENLRKKPENIPQPISNTSRANLNKLLTDYTEMKKAILHVYWEEFQKDPVGLMSRVAQPASKKIDQNKLKPEMDEKGNLTTAGFACSQCGQPLFVYKLEQVSEKGKAYTNYFGRCNVAEHEKLILLYQLKPEKDSDEAVTYSLGKFGQRALDFYSIHVTKESTHPVKPLAQIAGNRYASPVGKALSDACMGTIASFLSKYQDIIIEHQKVVKGNQKRLESLRELAGKENLEYPSVTLPPQPHTKEGVDAYNEVIARVRMWVNLNLWQKLKLSRDDAKPLLRLKGFPSFPLVERQANEVDWWDMVCNVKKLINEKKEDGKVFWQNLAGYKRQEALRPYLSSEEDRKKGKKFARYQLGDLLLHLEKKHGEDWGKVYGEAWERIDKKVEGLSKHIKLEEERRSEDAQSKAALTDWLRAKASFVIEGLKEADKDEFCRCELKLQKWYGDLRGKPFAIEAENSILDISGFSKQYNCAFIWQKDGVKKLNLYLIINYFKGGKLRFKKIKPEAFEANRFYTVINKKSGEIVPMEVNFNFDDPNLIILPLAFGKRQGREFIWNDLLSLETGSLKLANGRVIEKTLYNRRTRQDEPALFVALTFERREVLDSSNIKPMNLIGVDRGENIPAVIALTDPEGCPLSRFKDSLGNPTHILRIGESYKEKQRTIQAKKEVEQRRAGGYSRKYASKAKNLADDMVRNTARDLLYYAVTQDAMLIFENLSRGFGRQGKRTFMAERQYTRMEDWLTAKLAYEGLPSKTYLSKTLAQYTSKTCSNCGFTITSADYDRVLEKLKKTATGWMTTINGKELKVEGQITYYNRYKRQNVVKDLSVELDRLSEESVNNDISSWTKGRSGEALSLLKKRFSHRPVQEKFVCLNCGFETHADEQAALNIARSWLFLRSQEYKKYQTNKTTGNTDKRAFVETWQSFYRKKLKEVWKPAV

SEQ ID NO: 43030 - protein, 978 aa, synthetic construct
  REGION 1..978: note = engineered CasX variant
QEIKRINKIRRRLVKDSNTKKAGKTGPMKTLLVRVMTPDLRERLENLRKKPENIPQPISNTSRANLNKLLTDYTEMKKAILHVYWEEFQKDPVGLMSRVAQPASKKIDQNKLKPEMDEKGNLTTAGFACSQCGQPLFVYKLEQVSEKGKAYTNYFGRCNVAEHEKLILLYQLKPEKDSDEAVTYSLGKFGQRALDFYSIHVTKESTHPVKPLAQIAGNRYASYPVGKALSDACMGTIASFLSKYQDIIIEHQKVVKGNQKRLESLRELAGKENLEYPSVTLPPQPHTKEGVDAYNEVIARVRMWVNLNLWQKLKLSRDDAKPLLRLKGFPSFPLVERQANEVDWWDMVCNVKKLINEKKEDGKVFWQNLAGYKRQEALRPYLSSEEDRKKGKKFARYQLGDLLLHLEKKHGEDWGKVYDEAWERIDKKVEGLSKHIKLEEERRSEDAQSKAALTDWLRAKASFVIEGKKEADKDEFCRCELKLQKWYGDLRGKPFAIEAENSILDISGFSKQYNCAFIWQKDGVKKLNLYLIINYFKGGKLRFKKIKPEAFEANRFYTVINKKSGEIVPMEVNFNFDDPNLIILPLAFGKRQGREFIWNDLLSLETGSLKLANGRVIEKTLYNRRTRQDEPALFVALTFERREVLDSSNIKPMNLIGVDRGENIPAVIALTDPEGCPLSRFKDSLGNPTHILRIGESYKEKQRTIQAKKEVEQRRAGGYSRKYASKAKNLADDMVRNTARDLLYYAVTQDAMLIFENLSRGFGRQGKRTFMAERQYTRMEDWLTAKLAYEGLPSKTYLSKTLAQYTSKTCSNCGFTITSADYDRVLEKLKKTATGWMTTINGKELKVEGQITYYNRYKRQNVVKDLSVELDRLSEESVNNDISSWTKGRSGEALSLLKKRFSHRPVQEKFVCLNCGFETHADEQAALNIARSWLFLRSQEYKKYQTNKTTGNTDKRAFVETWQSFYRKKLKEVWKPAV

SEQ ID NO: 43031 - protein, 978 aa, synthetic construct
  REGION 1..978: note = engineered CasX variant
QEIKRINKIRRRLVKDSNTKKAGKTGPMKTLLVRVMTPDLRERLENLRKKPENIPQPISNTSRANLNKLLTDYTEMKKAILHVYWEEFQKDPVGLMSRVAQPASKKIDQNKLKPEMDEKGNLTTAGFACSQCGQPLFVYKLEQVSEKGKAYTNYFGRCNVAEHEKLILLYQLKPEKDSDEAVTYSLGKFGQRALDFYSIHVTKESTHPVKPLAQIAGNRYASHPVGKALSDACMGTIASFLSKYQDIIIEHQKVVKGNQKRLESLRELAGKENLEYPSVTLPPQPHTKEGVDAYNEVIARVRMWVNLNLWQKLKLSRDDAKPLLRLKGFPSFPLVERQANEVDWWDMVCNVKKLINEKKEDGKVFWQNLAGYKRQEALRPYLSSEEDRKKGKKFARYQLGDLLLHLEKKHGEDWGKVYDEAWERIDKKVEGLSKHIKLEEERRSEDAQSKAALTDWLRAKASFVIEGKKEADKDEFCRCELKLQKWYGDLRGKPFAIEAENSILDISGFSKQYNCAFIWQKDGVKKLNLYLIINYFKGGKLRFKKIKPEAFEANRFYTVINKKSGEIVPMEVNFNFDDPNLIILPLAFGKRQGREFIWNDLLSLETGSLKLANGRVIEKTLYNRRTRQDEPALFVALTFERREVLDSSNIKPMNLIGVDRGENIPAVIALTDPEGCPLSRFKDSLGNPTHILRIGESYKEKQRTIQAKKEVEQRRAGGYSRKYASKAKNLADDMVRNTARDLLYYAVTQDAMLIFENLSRGFGRQGKRTFMAERQYTRMEDWLTAKLAYEGLPSKTYLSKTLAQYTSKTCSNCGFTITSADYDRVLEKLKKTATGWMTTINGKELKVEGQITYYNRYKRQNVVKDLSVELDRLSEESVNNDISSWTKGRSGEALSLLKKRFSHRPVQEKFVCLNCGFETHADEQAALNIARSWLFLRSQEYKKYQTNKTTGNTDKRAFVETWQSFYRKKLKEVWKPAV

SEQ ID NO: 43032 - protein, 978 aa, synthetic construct
  REGION 1..978: note = engineered CasX variant
QEIKRINKIRRRLVKDSNTKKAGKTGPMKTLLVRVMTPDLRERLENLRKKPENIPQPISNTSRANLNKLLTDYTEMKKAILHVYWEEFQKDPVGLMSRVAQPASKKIDQNKLKPEMDEKGNLTTAGFACSQCGQPLFVYKLEQVSEKGKAYTNYFGRCNVAEHEKLILLYQLKPEKDSDEAVTYSLGKFGQRALDFYSIHVTKESTHPVKPLAQIAGNRYASSPVGKALSDACMGTIASFLSKYQDIIIEHQKVVKGNQKRLESLRELAGKENLEYPSVTLPPQPHTKEGVDAYNEVIARVRMWVNLNLWQKLKLSRDDAKPLLRLKGFPSFPLVERQANEVDWWDMVCNVKKLINEKKEDGKVFWQNLAGYKRQEALRPYLSSEEDRKKGKKFARYQLGDLLLHLEKKHGEDWGKVYDEAWERIDKKVEGLSKHIKLEEERRSEDAQSKAALTDWLRAKASFVIEGKKEADKDEFCRCELKLQKWYGDLRGKPFAIEAENSILDISGFSKQYNCAFIWQKDGVKKLNLYLIINYFKGGKLRFKKIKPEAFEANRFYTVINKKSGEIVPMEVNFNFDDPNLIILPLAFGKRQGREFIWNDLLSLETGSLKLANGRVIEKTLYNRRTRQDEPALFVALTFERREVLDSSNIKPMNLIGVDRGENIPAVIALTDPEGCPLSRFKDSLGNPTHILRIGESYKEKQRTIQAKKEVEQRRAGGYSRKYASKAKNLADDMVRNTARDLLYYAVTQDAMLIFENLSRGFGRQGKRTFMAERQYTRMEDWLTAKLAYEGLPSKTYLSKTLAQYTSKTCSNCGFTITSADYDRVLEKLKKTATGWMTTINGKELKVEGQITYYNRYKRQNVVKDLSVELDRLSEESVNNDISSWTKGRSGEALSLLKKRFSHRPVQEKFVCLNCGFETHADEQAALNIARSWLFLRSQEYKKYQTNKTTGNTDKRAFVETWQSFYRKKLKEVWKPAV

SEQ ID NO: 43033 - protein, 978 aa, synthetic construct
  REGION 1..978: note = engineered CasX variant
QEIKRINKIRRRLVKDSNTKKAGKTGPMKTLLVRVMTPDLRERLENLRKKPENIPQPISNTSRANLNKLLTDYTEMKKAILHVYWEEFQKDPVGLMSRVAQPASKKIDQNKLKPEMDEKGNLTTAGFACSQCGQPLFVYKLEQVSEKGKAYTNYFGRCNVAEHEKLILLYQLKPEKDSDEAVTYSLGKFGQRALDFYSIHVTKESTHPVKPLAQIAGNRYASTPVGKALSDACMGTIASFLSKYQDIIIEHQKVVKGNQKRLESLRELAGKENLEYPSVTLPPQPHTKEGVDAYNEVIARVRMWVNLNLWQKLKLSRDDAKPLLRLKGFPSFPLVERQANEVDWWDMVCNVKKLINEKKEDGKVFWQNLAGYKRQEALRPYLSSEEDRKKGKKFARYQLGDLLLHLEKKHGEDWGKVYDEAWERIDKKVEGLSKHIKLEEERRSEDAQSKAALTDWLRAKASFVIEGKKEADKDEFCRCELKLQKWYGDLRGKPFAIEAENSILDISGFSKQYNCAFIWQKDGVKKLNLYLIINYFKGGKLRFKKIKPEAFEANRFYTVINKKSGEIVPMEVNFNFDDPNLIILPLAFGKRQGREFIWNDLLSLETGSLKLANGRVIEKTLYNRRTRQDEPALFVALTFERREVLDSSNIKPMNLIGVDRGENIPAVIALTDPEGCPLSRFKDSLGNPTHILRIGESYKEKQRTIQAKKEVEQRRAGGYSRKYASKAKNLADDMVRNTARDLLYYAVTQDAMLIFENLSRGFGRQGKRTFMAERQYTRMEDWLTAKLAYEGLPSKTYLSKTLAQYTSKTCSNCGFTITSADYDRVLEKLKKTATGWMTTINGKELKVEGQITYYNRYKRQNVVKDLSVELDRLSEESVNNDISSWTKGRSGEALSLLKKRFSHRPVQEKFVCLNCGFETHADEQAALNIARSWLFLRSQEYKKYQTNKTTGNTDKRAFVETWQSFYRKKLKEVWKPAV

SEQ ID NO: 43034 - protein, 978 aa, synthetic construct
  REGION 1..978: note = engineered CasX variant
QEIKRINKIRRRLVKDSNTKKAGKTGPMKTLLVRVMTPDLRERLENLRKKPENIPQPISNTSRANLNKLLTDYTEMKKAILHVYWEEFQKDPVGLMSRVAQPASKKIDQNKLKPEMDEKGNLTTAGFACSQCGQPLFVYKLEQVSEKGKAYTNYFGRCNVAEHEKLILLYQLKPEKDSDEAVTYSLGKFGQRALDFYSIHVTKESTHPVKPLAQIAGNRYASAPVGKALSDACMGTIASFLSKYQDIIIEHQKVVKGNQKRLESLRELAGKENLEYPSVTLPPQPHTKEGVDAYNEVIARVRMWVNLNLWQKLKLSRDDAKPLLRLKGFPSFPLVERQANEVDWWDMVCNVKKLINEKKEDGKVFWQNLAGYKRQEALRPYLSSEEDRKKGKKFARYQLGDLLLHLEKKHGEDWGKVYDEAWERIDKKVEGLSKHIKLEEERRSEDAQSKAALTDWLRAKASFVIEGKKEADKDEFCRCELKLQKWYGDLRGKPFAIEAENSILDISGFSKQYNCAFIWQKDGVKKLNLYLIINYFKGGKLRFKKIKPEAFEANRFYTVINKKSGEIVPMEVNFNFDDPNLIILPLAFGKRQGREFIWNDLLSLETGSLKLANGRVIEKTLYNRRTRQDEPALFVALTFERREVLDSSNIKPMNLIGVDRGENIPAVIALTDPEGCPLSRFKDSLGNPTHILRIGESYKEKQRTIQAKKEVEQRRAGGYSRKYASKAKNLADDMVRNTARDLLYYAVTQDAMLIFENLSRGFGRQGKRTFMAERQYTRMEDWLTAKLAYEGLPSKTYLSKTLAQYTSKTCSNCGFTITSADYDRVLEKLKKTATGWMTTINGKELKVEGQITYYNRYKRQNVVKDLSVELDRLSEESVNNDISSWTKGRSGEALSLLKKRFSHRPVQEKFVCLNCGFETHADEQAALNIARSWLFLRSQEYKKYQTNKTTGNTDKRAFVETWQSFYRKKLKEVWKPAV

SEQ ID NO: 43035 - protein, 978 aa, synthetic construct
  REGION 1..978: note = engineered CasX variant
QEIKRINKIRRRLVKDSNTKKAGKTGPMKTLLVRVMTPDLRERLENLRKKPENIPQPISNTSRANLNKLLTDYTEMKKAILHVYWEEFQKDPVGLMSRVAQPASKKIDQNKLKPEMDEKGNLTTAGFACSQCGQPLFVYKLEQVSEKGKAYTNYFGRCNVAEHEKLILLYQLKPEKDSDEAVTYSLGKFGQRALDFYSIHVTKESTHPVKPLAQIAGNRYASVPVGKALSDACMGTIASFLSKYQDIIIEHQKVVKGNQKRLESLRELAGKENLEYPSVTLPPQPHTKEGVDAYNEVIARVRMWVNLNLWQKLKLSRDDAKPLLRLKGFPSFPLVERQANEVDWWDMVCNVKKLINEKKEDGKVFWQNLAGYKRQEALRPYLSSEEDRKKGKKFARYQLGDLLLHLEKKHGEDWGKVYDEAWERIDKKVEGLSKHIKLEEERRSEDAQSKAALTDWLRAKASFVIEGKKEADKDEFCRCELKLQKWYGDLRGKPFAIEAENSILDISGFSKQYNCAFIWQKDGVKKLNLYLIINYFKGGKLRFKKIKPEAFEANRFYTVINKKSGEIVPMEVNFNFDDPNLIILPLAFGKRQGREFIWNDLLSLETGSLKLANGRVIEKTLYNRRTRQDEPALFVALTFERREVLDSSNIKPMNLIGVDRGENIPAVIALTDPEGCPLSRFKDSLGNPTHILRIGESYKEKQRTIQAKKEVEQRRAGGYSRKYASKAKNLADDMVRNTARDLLYYAVTQDAMLIFENLSRGFGRQGKRTFMAERQYTRMEDWLTAKLAYEGLPSKTYLSKTLAQYTSKTCSNCGFTITSADYDRVLEKLKKTATGWMTTINGKELKVEGQITYYNRYKRQNVVKDLSVELDRLSEESVNNDISSWTKGRSGEALSLLKKRFSHRPVQEKFVCLNCGFETHADEQAALNIARSWLFLRSQEYKKYQTNKTTGNTDKRAFVETWQSFYRKKLKEVWKPAV

SEQ ID NO: 43036 - protein, 978 aa, synthetic construct
  REGION 1..978: note = engineered CasX variant
QEIKRINKIRRRLVKDSNTKKAGKTGPMKTLLVRVMTPDLRERLENLRKKPENIPQPISNTSRANLNKLLTDYTEMKKAILHVYWEEFQKDPVGLMSRVAQPASKKIDQNKLKPEMDEKGNLTTAGFACSQCGQPLFVYKLEQVSEKGKAYTNYFGRCNVAEHEKLIKLYQLKPEKDSDEAVTYSLGKFGQRALDFYSIHVTKESTHPVKPLAQIAGNRYASGPVGKALSDACMGTIASFLSKYQDIIIEHQKVVKGNQKRLESLRELAGKENLEYPSVTLPPQPHTKEGVDAYNEVIARVRMWVNLNLWQKLKLSRDDAKPLLRLKGFPSFPLVERQANEVDWWDMVCNVKKLINEKKEDGKVFWQNLAGYKRQEALRPYLSSEEDRKKGKKFARYQLGDLLLHLEKKHGEDWGKVYDEAWERIDKKVEGLSKHIKLEEERRSEDAQSKAALTDWLRAKASFVIEGKKEADKDEFCRCELKLQKWYGDLRGKPFAIEAENSILDISGFSKQYNCAFIWQKDGVKKLNLYLIINYFKGGKLRFKKIKPEAFEANRFYTVINKKSGEIVPMEVNFNFDDPNLIILPLAFGKRQGREFIWNDLLSLETGSLKLANGRVIEKTLYNRRTRQDEPALFVALTFERREVLDSSNIKPMNLIGVDRGENIPAVIALTDPEGCPLSRFKDSLGNPTHILRIGESYKEKQRTIQAKKEVEQRRAGGYSRKYASKAKNLADDMVRNTARDLLYYAVTQDAMLIFENLSRGFGRQGKRTFMAERQYTRMEDWLTAKLAYEGLPSKTYLSKTLAQYTSKTCSNCGFTITSADYDRVLEKLKKTATGWMTTINGKELKVEGQITYYNRYKRQNVVKDLSVELDRLSEESVNNDISSWTKGRSGEALSLLKKRFSHRPVQEKFVCLNCGFETHADEQAALNIARSWLFLRSQEYKKYQTNKTTGNTDKRAFVETWQSFYRKKLKEVWKPAV

SEQ ID NO: 43037 - protein, 977 aa, synthetic construct
  REGION 1..977: note = engineered CasX variant
QEIKRINKIRRRLVKDSNTKKAGKTGPMKTLLVRVMTPDLRERLENLRKKPENIPQPISNTSRANLNKLLTDYTEMKKAILHVYWEEFQKDPVGLMSRVAQPASKKIDQNKLKPEMDEKGNLTTAGFACSQCGQPLFVYKLEQVSEKGKAYTNYFGRCNVAEHEKLILLYQLKPEKDSDEAVTYSLGKFGQRALDFYSIHVTKESTHPVKPLAQIAGNRYASPVGKALSDACMGTIASFLSKYQDIIIEHQKVVKGNQKRLESLRELAGKENLEYPSVTLPPQPHTKEGVDAYNEVIARVRMWVNLNLWQKLKLSRDDAKPLLRLKGFPSFPLVERQANEVDWWDMVCNVKKLINEKKEDGKVFWQNLAGYKRQEALRPYLSSEEDRKKGKKFARYQLGDLLLHLEKKHGEDWGKVYDEAWERIDKKVEGLSKHIKLEEERRSEDAQSKAALTDWLRAKASFVIEGKKEADKDEFCRCELKLQKWYGDLRGKPFAIEAENSILDISGFSKQYNCAFIWQKDGVKKLNLYLIINYFKGGKLRFKKIKPEAFEANRFYTVINKKSGEIVPMEVNFNFDDPNLIILPLAFGKRQGREFIWNDLLSLETGSLKLANGRVIEKTLYNRRTRQDEPALFVALTFERREVLDSSNIKPMNLIGVDRGENIPAVIALTDPEGCPLSRFKDSLGNPTHILRIGESYKEKQRTIQAKKEVEQRRAGGYSRKYASKAKNLADDMVRNTARDLLYYAVTQDAMLIFENLSRGFGRQGKRTFMAERQYTRMEDWLTAKLAYEGLPSKTYLSKTLAQYTSKTCSNCGFTITSADYDRVLEKLKKTATGWMTTINGKELKVEGQITYYNRYKRQNVVKDLSVELDRLSEESVNNDISSWTKGRSGEALSLLKKRFSHRPVQEKFVCLNCGFETHADEQAALNIARSWLFLRSQEYKKYQTNKTTGNTDKRAFVETWQSFYRKKLKEVWKPAV

SEQ ID NO: 43038 - protein, 978 aa, synthetic construct
  REGION 1..978: note = engineered CasX variant
QEIKRINKIRRRLVKDSNTKKAGKTGPMKTLLVRVMTPDLRERLENLRKKPENIPQPISNTSRANLNKLLTDYTEMKKAILHVYWEEFQKDPVGLMSRVAQPASKKIDQNKLKPEMDEKGNLTTAGFACSQCGQPLFVYKLEQVSEKGKAYTNYFGRCNVAEHEKLILLYQLKPEKDSDEAVTYSLGKFGQRALDFYSIHVTKESTHPVKPLAQIAGNRYASYPVGKALSDACMGTIASFLSKYQDIIIEHQKVVKGNQKRLESLRELAGKENLEYPSVTLPPQPHTKEGVDAYNEVIARVRMWVNLNLWQKLKLSRDDAKPLLRLKGFPSFPLVERQANEVDWWDMVCNVKKLINEKKEDGKVFWQNLAGYKRQEALRPYLSSEEDRKKGKKFARYQLGDLLLHLEKKHGEDWGKVYDEAWERIDKKVEGLSKHIKLEEERRSEDAQSKAALTDWLRAKASFVIEGSKEADKDEFCRCELKLQKWYGDLRGKPFAIEAENSILDISGFSKQYNCAFIWQKDGVKKLNLYLIINYFKGGKLRFKKIKPEAFEANRFYTVINKKSGEIVPMEVNFNFDDPNLIILPLAFGKRQGREFIWNDLLSLETGSLKLANGRVIEKTLYNRRTRQDEPALFVALTFERREVLDSSNIKPMNLIGVDRGENIPAVIALTDPEGCPLSRFKDSLGNPTHILRIGESYKEKQRTIQAKKEVEQRRAGGYSRKYASKAKNLADDMVRNTARDLLYYAVTQDAMLIFENLSRGFGRQGKRTFMAERQYTRMEDWLTAKLAYEGLPSKTYLSKTLAQYTSKTCSNCGFTITSADYDRVLEKLKKTATGWMTTINGKELKVEGQITYYNRYKRQNVVKDLSVELDRLSEESVNNDISSWTKGRSGEALSLLKKRFSHRPVQEKFVCLNCGFETHADEQAALNIARSWLFLRSQEYKKYQTNKTTGNTDKRAFVETWQSFYRKKLKEVWKPAV

SEQ ID NO: 43039 - protein, 978 aa, synthetic construct
  REGION 1..978: note = engineered CasX variant
QEIKRINKIRRRLVKDSNTKKAGKTGPMKTLLVRVMTPDLRERLENLRKKPENIPQPISNTSRANLNKLLTDYTEMKKAILHVYWEEFQKDPVGLMSRVAQPASKKIDQNKLKPEMDEKGNLTTAGFACSQCGQPLFVYKLEQVSEKGKAYTNYFGRCNVAEHEKLILLYQLKPEKDSDEAVTYSLGKFGQRALDFYSIHVTKESTHPVKPLAQIAGNRYASHPVGKALSDACMGTIASFLSKYQDIIIEHQKVVKGNQKRLESLRELAGKENLEYPSVTLPPQPHTKEGVDAYNEVIARVRMWVNLNLWQKLKLSRDDAKPLLRLKGFPSFPLVERQANEVDWWDMVCNVKKLINEKKEDGKVFWQNLAGYKRQEALRPYLSSEEDRKKGKKFARYQLGDLLLHLEKKHGEDWGKVYDEAWERIDKKVEGLSKHIKLEEERRSEDAQSKAALTDWLRAKASFVIEGSKEADKDEFCRCELKLQKWYGDLRGKPFAIEAENSILDISGFSKQYNCAFIWQKDGVKKLNLYLIINYFKGGKLRFKKIKPEAFEANRFYTVINKKSGEIVPMEVNFNFDDPNLIILPLAFGKRQGREFIWNDLLSLETGSLKLANGRVIEKTLYNRRTRQDEPALFVALTFERREVLDSSNIKPMNLIGVDRGENIPAVIALTDPEGCPLSRFKDSLGNPTHILRIGESYKEKQRTIQAKKEVEQRRAGGYSRKYASKAKNLADDMVRNTARDLLYYAVTQDAMLIFENLSRGFGRQGKRTFMAERQYTRMEDWLTAKLAYEGLPSKTYLSKTLAQYTSKTCSNCGFTITSADYDRVLEKLKKTATGWMTTINGKELKVEGQITYYNRYKRQNVVKDLSVELDRLSEESVNNDISSWTKGRSGEALSLLKKRFSHRPVQEKFVCLNCGFETHADEQAALNIARSWLFLRSQEYKKYQTNKTTGNTDKRAFVETWQSFYRKKLKEVWKPAV

SEQ ID NO: 43040 - protein, 978 aa, synthetic construct
  REGION 1..978: note = engineered CasX variant
QEIKRINKIRRRLVKDSNTKKAGKTGPMKTLLVRVMTPDLRERLENLRKKPENIPQPISNTSRANLNKLLTDYTEMKKAILHVYWEEFQKDPVGLMSRVAQPASKKIDQNKLKPEMDEKGNLTTAGFACSQCGQPLFVYKLEQVSEKGKAYTNYFGRCNVAEHEKLILLYQLKPEKDSDEAVTYSLGKFGQRALDFYSIHVTKESTHPVKPLAQIAGNRYASSPVGKALSDACMGTIASFLSKYQDIIIEHQKVVKGNQKRLESLRELAGKENLEYPSVTLPPQPHTKEGVDAYNEVIARVRMWVNLNLWQKLKLSRDDAKPLLRLKGFPSFPLVERQANEVDWWDMVCNVKKLINEKKEDGKVFWQNLAGYKRQEALRPYLSSEEDRKKGKKFARYQLGDLLLHLEKKHGEDWGKVYDEAWERIDKKVEGLSKHIKLEEERRSEDAQSKAALTDWLRAKASFVIEGSKEADKDEFCRCELKLQKWYGDLRGKPFAIEAENSILDISGFSKQYNCAFIWQKDGVKKLNLYLIINYFKGGKLRFKKIKPEAFEANRFYTVINKKSGEIVPMEVNFNFDDPNLIILPLAFGKRQGREFIWNDLLSLETGSLKLANGRVIEKTLYNRRTRQDEPALFVALTFERREVLDSSNIKPMNLIGVDRGENIPAVIALTDPEGCPLSRFKDSLGNPTHILRIGESYKEKQRTIQAKKEVEQRRAGGYSRKYASKAKNLADDMVRNTARDLLYYAVTQDAMLIFENLSRGFGRQGKRTFMAERQYTRMEDWLTAKLAYEGLPSKTYLSKTLAQYTSKTCSNCGFTITSADYDRVLEKLKKTATGWMTTINGKELKVEGQITYYNRYKRQNVVKDLSVELDRLSEESVNNDISSWTKGRSGEALSLLKKRFSHRPVQEKFVCLNCGFETHADEQAALNIARSWLFLRSQEYKKYQTNKTTGNTDKRAFVETWQSFYRKKLKEVWKPAV

SEQ ID NO: 43041 - protein, 978 aa, synthetic construct
  REGION 1..978: note = engineered CasX variant
QEIKRINKIRRRLVKDSNTKKAGKTGPMKTLLVRVMTPDLRERLENLRKKPENIPQPISNTSRANLNKLLTDYTEMKKAILHVYWEEFQKDPVGLMSRVAQPASKKIDQNKLKPEMDEKGNLTTAGFACSQCGQPLFVYKLEQVSEKGKAYTNYFGRCNVAEHEKLILLYQLKPEKDSDEAVTYSLGKFGQRALDFYSIHVTKESTHPVKPLAQIAGNRYASTPVGKALSDACMGTIASFLSKYQDIIIEHQKVVKGNQKRLESLRELAGKENLEYPSVTLPPQPHTKEGVDAYNEVIARVRMWVNLNLWQKLKLSRDDAKPLLRLKGFPSFPLVERQANEVDWWDMVCNVKKLINEKKEDGKVFWQNLAGYKRQEALRPYLSSEEDRKKGKKFARYQLGDLLLHLEKKHGEDWGKVYDEAWERIDKKVEGLSKHIKLEEERRSEDAQSKAALTDWLRAKASFVIEGSKEADKDEFCRCELKLQKWYGDLRGKPFAIEAENSILDISGFSKQYNCAFIWQKDGVKKLNLYLIINYFKGGKLRFKKIKPEAFEANRFYTVINKKSGEIVPMEVNFNFDDPNLIILPLAFGKRQGREFIWNDLLSLETGSLKLANGRVIEKTLYNRRTRQDEPALFVALTFERREVLDSSNIKPMNLIGVDRGENIPAVIALTDPEGCPLSRFKDSLGNPTHILRIGESYKEKQRTIQAKKEVEQRRAGGYSRKYASKAKNLADDMVRNTARDLLYYAVTQDAMLIFENLSRGFGRQGKRTFMAERQYTRMEDWLTAKLAYEGLPSKTYLSKTLAQYTSKTCSNCGFTITSADYDRVLEKLKKTATGWMTTINGKELKVEGQITYYNRYKRQNVVKDLSVELDRLSEESVNNDISSWTKGRSGEALSLLKKRFSHRPVQEKFVCLNCGFETHADEQAALNIARSWLFLRSQEYKKYQTNKTTGNTDKRAFVETWQSFYRKKLKEVWKPAV

SEQ ID NO: 43042 - protein, 978 aa, synthetic construct
  REGION 1..978: note = engineered CasX variant
QEIKRINKIRRRLVKDSNTKKAGKTGPMKTLLVRVMTPDLRERLENLRKKPENIPQPISNTSRANLNKLLTDYTEMKKAILHVYWEEFQKDPVGLMSRVAQPASKKIDQNKLKPEMDEKGNLTTAGFACSQCGQPLFVYKLEQVSEKGKAYTNYFGRCNVAEHEKLILLYQLKPEKDSDEAVTYSLGKFGQRALDFYSIHVTKESTHPVKPLAQIAGNRYASAPVGKALSDACMGTIASFLSKYQDIIIEHQKVVKGNQKRLESLRELAGKENLEYPSVTLPPQPHTKEGVDAYNEVIARVRMWVNLNLWQKLKLSRDDAKPLLRLKGFPSFPLVERQANEVDWWDMVCNVKKLINEKKEDGKVFWQNLAGYKRQEALRPYLSSEEDRKKGKKFARYQLGDLLLHLEKKHGEDWGKVYDEAWERIDKKVEGLSKHIKLEEERRSEDAQSKAALTDWLRAKASFVIEGSKEADKDEFCRCELKLQKWYGDLRGKPFAIEAENSILDISGFSKQYNCAFIWQKDGVKKLNLYLIINYFKGGKLRFKKIKPEAFEANRFYTVINKKSGEIVPMEVNFNFDDPNLIILPLAFGKRQGREFIWNDLLSLETGSLKLANGRVIEKTLYNRRTRQDEPALFVALTFERREVLDSSNIKPMNLIGVDRGENIPAVIALTDPEGCPLSRFKDSLGNPTHILRIGESYKEKQRTIQAKKEVEQRRAGGYSRKYASKAKNLADDMVRNTARDLLYYAVTQDAMLIFENLSRGFGRQGKRTFMAERQYTRMEDWLTAKLAYEGLPSKTYLSKTLAQYTSKTCSNCGFTITSADYDRVLEKLKKTATGWMTTINGKELKVEGQITYYNRYKRQNVVKDLSVELDRLSEESVNNDISSWTKGRSGEALSLLKKRFSHRPVQEKFVCLNCGFETHADEQAALNIARSWLFLRSQEYKKYQTNKTTGNTDKRAFVETWQSFYRKKLKEVWKPAV

SEQ ID NO: 43043 - protein, 978 aa, synthetic construct
  REGION 1..978: note = engineered CasX variant
QEIKRINKIRRRLVKDSNTKKAGKTGPMKTLLVRVMTPDLRERLENLRKKPENIPQPISNTSRANLNKLLTDYTEMKKAILHVYWEEFQKDPVGLMSRVAQPASKKIDQNKLKPEMDEKGNLTTAGFACSQCGQPLFVYKLEQVSEKGKAYTNYFGRCNVAEHEKLILLYQLKPEKDSDEAVTYSLGKFGQRALDFYSIHVTKESTHPVKPLAQIAGNRYASVPVGKALSDACMGTIASFLSKYQDIIIEHQKVVKGNQKRLESLRELAGKENLEYPSVTLPPQPHTKEGVDAYNEVIARVRMWVNLNLWQKLKLSRDDAKPLLRLKGFPSFPLVERQANEVDWWDMVCNVKKLINEKKEDGKVFWQNLAGYKRQEALRPYLSSEEDRKKGKKFARYQLGDLLLHLEKKHGEDWGKVYDEAWERIDKKVEGLSKHIKLEEERRSEDAQSKAALTDWLRAKASFVIEGSKEADKDEFCRCELKLQKWYGDLRGKPFAIEAENSILDISGFSKQYNCAFIWQKDGVKKLNLYLIINYFKGGKLRFKKIKPEAFEANRFYTVINKKSGEIVPMEVNFNFDDPNLIILPLAFGKRQGREFIWNDLLSLETGSLKLANGRVIEKTLYNRRTRQDEPALFVALTFERREVLDSSNIKPMNLIGVDRGENIPAVIALTDPEGCPLSRFKDSLGNPTHILRIGESYKEKQRTIQAKKEVEQRRAGGYSRKYASKAKNLADDMVRNTARDLLYYAVTQDAMLIFENLSRGFGRQGKRTFMAERQYTRMEDWLTAKLAYEGLPSKTYLSKTLAQYTSKTCSNCGFTITSADYDRVLEKLKKTATGWMTTINGKELKVEGQITYYNRYKRQNVVKDLSVELDRLSEESVNNDISSWTKGRSGEALSLLKKRFSHRPVQEKFVCLNCGFETHADEQAALNIARSWLFLRSQEYKKYQTNKTTGNTDKRAFVETWQSFYRKKLKEVWKPAV

SEQ ID NO: 43044 - protein, 978 aa, synthetic construct
  REGION 1..978: note = engineered CasX variant
QEIKRINKIRRRLVKDSNTKKAGKTGPMKTLLVRVMTPDLRERLENLRKKPENIPQPISNTSRANLNKLLTDYTEMKKAILHVYWEEFQKDPVGLMSRVAQPASKKIDQNKLKPEMDEKGNLTTAGFACSQCGQPLFVYKLEQVSEKGKAYTNYFGRCNVAEHEKLIKLYQLKPEKDSDEAVTYSLGKFGQRALDFYSIHVTKESTHPVKPLAQIAGNRYASGPVGKALSDACMGTIASFLSKYQDIIIEHQKVVKGNQKRLESLRELAGKENLEYPSVTLPPQPHTKEGVDAYNEVIARVRMWVNLNLWQKLKLSRDDAKPLLRLKGFPSFPLVERQANEVDWWDMVCNVKKLINEKKEDGKVFWQNLAGYKRQEALRPYLSSEEDRKKGKKFARYQLGDLLLHLEKKHGEDWGKVYDEAWERIDKKVEGLSKHIKLEEERRSEDAQSKAALTDWLRAKASFVIEGSKEADKDEFCRCELKLQKWYGDLRGKPFAIEAENSILDISGFSKQYNCAFIWQKDGVKKLNLYLIINYFKGGKLRFKKIKPEAFEANRFYTVINKKSGEIVPMEVNFNFDDPNLIILPLAFGKRQGREFIWNDLLSLETGSLKLANGRVIEKTLYNRRTRQDEPALFVALTFERREVLDSSNIKPMNLIGVDRGENIPAVIALTDPEGCPLSRFKDSLGNPTHILRIGESYKEKQRTIQAKKEVEQRRAGGYSRKYASKAKNLADDMVRNTARDLLYYAVTQDAMLIFENLSRGFGRQGKRTFMAERQYTRMEDWLTAKLAYEGLPSKTYLSKTLAQYTSKTCSNCGFTITSADYDRVLEKLKKTATGWMTTINGKELKVEGQITYYNRYKRQNVVKDLSVELDRLSEESVNNDISSWTKGRSGEALSLLKKRFSHRPVQEKFVCLNCGFETHADEQAALNIARSWLFLRSQEYKKYQTNKTTGNTDKRAFVETWQSFYRKKLKEVWKPAV

SEQ ID NO: 43045 - protein, 977 aa, synthetic construct
  REGION 1..977: note = engineered CasX variant
QEIKRINKIRRRLVKDSNTKKAGKTGPMKTLLVRVMTPDLRERLENLRKKPENIPQPISNTSRANLNKLLTDYTEMKKAILHVYWEEFQKDPVGLMSRVAQPASKKIDQNKLKPEMDEKGNLTTAGFACSQCGQPLFVYKLEQVSEKGKAYTNYFGRCNVAEHEKLILLYQLKPEKDSDEAVTYSLGKFGQRALDFYSIHVTKESTHPVKPLAQIAGNRYASPVGKALSDACMGTIASFLSKYQDIIIEHQKVVKGNQKRLESLRELAGKENLEYPSVTLPPQPHTKEGVDAYNEVIARVRMWVNLNLWQKLKLSRDDAKPLLRLKGFPSFPLVERQANEVDWWDMVCNVKKLINEKKEDGKVFWQNLAGYKRQEALRPYLSSEEDRKKGKKFARYQLGDLLLHLEKKHGEDWGKVYDEAWERIDKKVEGLSKHIKLEEERRSEDAQSKAALTDWLRAKASFVIEGSKEADKDEFCRCELKLQKWYGDLRGKPFAIEAENSILDISGFSKQYNCAFIWQKDGVKKLNLYLIINYFKGGKLRFKKIKPEAFEANRFYTVINKKSGEIVPMEVNFNFDDPNLIILPLAFGKRQGREFIWNDLLSLETGSLKLANGRVIEKTLYNRRTRQDEPALFVALTFERREVLDSSNIKPMNLIGVDRGENIPAVIALTDPEGCPLSRFKDSLGNPTHILRIGESYKEKQRTIQAKKEVEQRRAGGYSRKYASKAKNLADDMVRNTARDLLYYAVTQDAMLIFENLSRGFGRQGKRTFMAERQYTRMEDWLTAKLAYEGLPSKTYLSKTLAQYTSKTCSNCGFTITSADYDRVLEKLKKTATGWMTTINGKELKVEGQITYYNRYKRQNVVKDLSVELDRLSEESVNNDISSWTKGRSGEALSLLKKRFSHRPVQEKFVCLNCGFETHADEQAALNIARSWLFLRSQEYKKYQTNKTTGNTDKRAFVETWQSFYRKKLKEVWKPAV

SEQ ID NO: 43046 - protein, 979 aa, synthetic construct
  REGION 1..979: note = engineered CasX variant
QEIKRINKIRRRLVKDSNTKKAGKTGPMKTLLVRVMTPDLRERLENLRKKPENIPQPISNTSRANLNKLLTDYTEMKKAILHVYWEEFQKDPVGLMSRVAQPASKKIDQNKLKPEMDEKGNLTTAGFACSQCGQPLFVYKLEQVSEKGKAYTNYFGRCNVAEHEKLILLYQLKPEKDSDEAVTYSLGKFGQRALDFYSIHVTKESTHPVKPLAQIAGNRYASYPVGKALSDACMGTIASFLSKYQDIIIEHQKVVKGNQKRLESLRELAGKENLEYPSVTLPPQPHTKEGVDAYNEVIARVRMWVNLNLWQKLKLSRDDAKPLLRLKGFPSFPLVERQANEVDWWDMVCNVKKLINEKKEDGKVFWQNLAGYKRQEALRPYLSSEEDRKKGKKFARYQLGDLLLHLEKKHGEDWGKVYDEAWERIDKKVEGLSKHIKLEEERRSEDAQSKAALTDWLRAKASFVIEGLKEADDKDEFCRCELKLQKWYGDLRGKPFAIEAENSILDISGFSKQYNCAFIWQKDGVKKLNLYLIINYFKGGKLRFKKIKPEAFEANRFYTVINKKSGEIVPMEVNFNFDDPNLIILPLAFGKRQGREFIWNDLLSLETGSLKLANGRVIEKTLYNRRTRQDEPALFVALTFERREVLDSSNIKPMNLIGVDRGENIPAVIALTDPEGCPLSRFKDSLGNPTHILRIGESYKEKQRTIQAKKEVEQRRAGGYSRKYASKAKNLADDMVRNTARDLLYYAVTQDAMLIFENLSRGFGRQGKRTFMAERQYTRMEDWLTAKLAYEGLPSKTYLSKTLAQYTSKTCSNCGFTITSADYDRVLEKLKKTATGWMTTINGKELKVEGQITYYNRYKRQNVVKDLSVELDRLSEESVNNDISSWTKGRSGEALSLLKKRFSHRPVQEKFVCLNCGFETHADEQAALNIARSWLFLRSQEYKKYQTNKTTGNTDKRAFVETWQSFYRKKLKEVWKPAV

SEQ ID NO: 43047 - protein, 979 aa, synthetic construct
  REGION 1..979: note = engineered CasX variant
QEIKRINKIRRRLVKDSNTKKAGKTGPMKTLLVRVMTPDLRERLENLRKKPENIPQPISNTSRANLNKLLTDYTEMKKAILHVYWEEFQKDPVGLMSRVAQPASKKIDQNKLKPEMDEKGNLTTAGFACSQCGQPLFVYKLEQVSEKGKAYTNYFGRCNVAEHEKLILLYQLKPEKDSDEAVTYSLGKFGQRALDFYSIHVTKESTHPVKPLAQIAGNRYASHPVGKALSDACMGTIASFLSKYQDIIIEHQKVVKGNQKRLESLRELAGKENLEYPSVTLPPQPHTKEGVDAYNEVIARVRMWVNLNLWQKLKLSRDDAKPLLRLKGFPSFPLVERQANEVDWWDMVCNVKKLINEKKEDGKVFWQNLAGYKRQEALRPYLSSEEDRKKGKKFARYQLGDLLLHLEKKHGEDWGKVYDEAWERIDKKVEGLSKHIKLEEERRSEDAQSKAALTDWLRAKASFVIEGLKEADDKDEFCRCELKLQKWYGDLRGKPFAIEAENSILDISGFSKQYNCAFIWQKDGVKKLNLYLIINYFKGGKLRFKKIKPEAFEANRFYTVINKKSGEIVPMEVNFNFDDPNLIILPLAFGKRQGREFIWNDLLSLETGSLKLANGRVIEKTLYNRRTRQDEPALFVALTFERREVLDSSNIKPMNLIGVDRGENIPAVIALTDPEGCPLSRFKDSLGNPTHILRIGESYKEKQRTIQAKKEVEQRRAGGYSRKYASKAKNLADDMVRNTARDLLYYAVTQDAMLIFENLSRGFGRQGKRTFMAERQYTRMEDWLTAKLAYEGLPSKTYLSKTLAQYTSKTCSNCGFTITSADYDRVLEKLKKTATGWMTTINGKELKVEGQITYYNRYKRQNVVKDLSVELDRLSEESVNNDISSWTKGRSGEALSLLKKRFSHRPVQEKFVCLNCGFETHADEQAALNIARSWLFLRSQEYKKYQTNKTTGNTDKRAFVETWQSFYRKKLKEVWKPAV

SEQ ID NO: 43048 - protein, 979 aa, synthetic construct
  REGION 1..979: note = engineered CasX variant
QEIKRINKIRRRLVKDSNTKKAGKTGPMKTLLVRVMTPDLRERLENLRKKPENIPQPISNTSRANLNKLLTDYTEMKKAILHVYWEEFQKDPVGLMSRVAQPASKKIDQNKLKPEMDEKGNLTTAGFACSQCGQPLFVYKLEQVSEKGKAYTNYFGRCNVAEHEKLILLYQLKPEKDSDEAVTYSLGKFGQRALDFYSIHVTKESTHPVKPLAQIAGNRYASSPVGKALSDACMGTIASFLSKYQDIIIEHQKVVKGNQKRLESLRELAGKENLEYPSVTLPPQPHTKEGVDAYNEVIARVRMWVNLNLWQKLKLSRDDAKPLLRLKGFPSFPLVERQANEVDWWDMVCNVKKLINEKKEDGKVFWQNLAGYKRQEALRPYLSSEEDRKKGKKFARYQLGDLLLHLEKKHGEDWGKVYDEAWERIDKKVEGLSKHIKLEEERRSEDAQSKAALTDWLRAKASFVIEGLKEADDKDEFCRCELKLQKWYGDLRGKPFAIEAENSILDISGFSKQYNCAFIWQKDGVKKLNLYLIINYFKGGKLRFKKIKPEAFEANRFYTVINKKSGEIVPMEVNFNFDDPNLIILPLAFGKRQGREFIWNDLLSLETGSLKLANGRVIEKTLYNRRTRQDEPALFVALTFERREVLDSSNIKPMNLIGVDRGENIPAVIALTDPEGCPLSRFKDSLGNPTHILRIGESYKEKQRTIQAKKEVEQRRAGGYSRKYASKAKNLADDMVRNTARDLLYYAVTQDAMLIFENLSRGFGRQGKRTFMAERQYTRMEDWLTAKLAYEGLPSKTYLSKTLAQYTSKTCSNCGFTITSADYDRVLEKLKKTATGWMTTINGKELKVEGQITYYNRYKRQNVVKDLSVELDRLSEESVNNDISSWTKGRSGEALSLLKKRFSHRPVQEKFVCLNCGFETHADEQAALNIARSWLFLRSQEYKKYQTNKTTGNTDKRAFVETWQSFYRKKLKEVWKPAV

SEQ ID NO: 43049 - protein, 979 aa, synthetic construct
  REGION 1..979: note = engineered CasX variant
QEIKRINKIRRRLVKDSNTKKAGKTGPMKTLLVRVMTPDLRERLENLRKKPENIPQPISNTSRANLNKLLTDYTEMKKAILHVYWEEFQKDPVGLMSRVAQPASKKIDQNKLKPEMDEKGNLTTAGFACSQCGQPLFVYKLEQVSEKGKAYTNYFGRCNVAEHEKLILLYQLKPEKDSDEAVTYSLGKFGQRALDFYSIHVTKESTHPVKPLAQIAGNRYASTPVGKALSDACMGTIASFLSKYQDIIIEHQKVVKGNQKRLESLRELAGKENLEYPSVTLPPQPHTKEGVDAYNEVIARVRMWVNLNLWQKLKLSRDDAKPLLRLKGFPSFPLVERQANEVDWWDMVCNVKKLINEKKEDGKVFWQNLAGYKRQEALRPYLSSEEDRKKGKKFARYQLGDLLLHLEKKHGEDWGKVYDEAWERIDKKVEGLSKHIKLEEERRSEDAQSKAALTDWLRAKASFVIEGLKEADDKDEFCRCELKLQKWYGDLRGKPFAIEAENSILDISGFSKQYNCAFIWQKDGVKKLNLYLIINYFKGGKLRFKKIKPEAFEANRFYTVINKKSGEIVPMEVNFNFDDPNLIILPLAFGKRQGREFIWNDLLSLETGSLKLANGRVIEKTLYNRRTRQDEPALFVALTFERREVLDSSNIKPMNLIGVDRGENIPAVIALTDPEGCPLSRFKDSLGNPTHILRIGESYKEKQRTIQAKKEVEQRRAGGYSRKYASKAKNLADDMVRNTARDLLYYAVTQDAMLIFENLSRGFGRQGKRTFMAERQYTRMEDWLTAKLAYEGLPSKTYLSKTLAQYTSKTCSNCGFTITSADYDRVLEKLKKTATGWMTTINGKELKVEGQITYYNRYKRQNVVKDLSVELDRLSEESVNNDISSWTKGRSGEALSLLKKRFSHRPVQEKFVCLNCGFETHADEQAALNIARSWLFLRSQEYKKYQTNKTTGNTDKRAFVETWQSFYRKKLKEVWKPAV

SEQ ID NO: 43050 - protein, 979 aa, synthetic construct
  REGION 1..979: note = engineered CasX variant
QEIKRINKIRRRLVKDSNTKKAGKTGPMKTLLVRVMTPDLRERLENLRKKPENIPQPISNTSRANLNKLLTDYTEMKKAILHVYWEEFQKDPVGLMSRVAQPASKKIDQNKLKPEMDEKGNLTTAGFACSQCGQPLFVYKLEQVSEKGKAYTNYFGRCNVAEHEKLILLYQLKPEKDSDEAVTYSLGKFGQRALDFYSIHVTKESTHPVKPLAQIAGNRYASAPVGKALSDACMGTIASFLSKYQDIIIEHQKVVKGNQKRLESLRELAGKENLEYPSVTLPPQPHTKEGVDAYNEVIARVRMWVNLNLWQKLKLSRDDAKPLLRLKGFPSFPLVERQANEVDWWDMVCNVKKLINEKKEDGKVFWQNLAGYKRQEALRPYLSSEEDRKKGKKFARYQLGDLLLHLEKKHGEDWGKVYDEAWERIDKKVEGLSKHIKLEEERRSEDAQSKAALTDWLRAKASFVIEGLKEADDKDEFCRCELKLQKWYGDLRGKPFAIEAENSILDISGFSKQYNCAFIWQKDGVKKLNLYLIINYFKGGKLRFKKIKPEAFEANRFYTVINKKSGEIVPMEVNFNFDDPNLIILPLAFGKRQGREFIWNDLLSLETGSLKLANGRVIEKTLYNRRTRQDEPALFVALTFERREVLDSSNIKPMNLIGVDRGENIPAVIALTDPEGCPLSRFKDSLGNPTHILRIGESYKEKQRTIQAKKEVEQRRAGGYSRKYASKAKNLADDMVRNTARDLLYYAVTQDAMLIFENLSRGFGRQGKRTFMAERQYTRMEDWLTAKLAYEGLPSKTYLSKTLAQYTSKTCSNCGFTITSADYDRVLEKLKKTATGWMTTINGKELKVEGQITYYNRYKRQNVVKDLSVELDRLSEESVNNDISSWTKGRSGEALSLLKKRFSHRPVQEKFVCLNCGFETHADEQAALNIARSWLFLRSQEYKKYQTNKTTGNTDKRAFVETWQSFYRKKLKEVWKPAV

SEQ ID NO: 43051 - protein, 979 aa, synthetic construct
  REGION 1..979: note = engineered CasX variant
QEIKRINKIRRRLVKDSNTKKAGKTGPMKTLLVRVMTPDLRERLENLRKKPENIPQPISNTSRANLNKLLTDYTEMKKAILHVYWEEFQKDPVGLMSRVAQPASKKIDQNKLKPEMDEKGNLTTAGFACSQCGQPLFVYKLEQVSEKGKAYTNYFGRCNVAEHEKLILLYQLKPEKDSDEAVTYSLGKFGQRALDFYSIHVTKESTHPVKPLAQIAGNRYASVPVGKALSDACMGTIASFLSKYQDIIIEHQKVVKGNQKRLESLRELAGKENLEYPSVTLPPQPHTKEGVDAYNEVIARVRMWVNLNLWQKLKLSRDDAKPLLRLKGFPSFPLVERQANEVDWWDMVCNVKKLINEKKEDGKVFWQNLAGYKRQEALRPYLSSEEDRKKGKKFARYQLGDLLLHLEKKHGEDWGKVYDEAWERIDKKVEGLSKHIKLEEERRSEDAQSKAALTDWLRAKASFVIEGLKEADDKDEFCRCELKLQKWYGDLRGKPFAIEAENSILDISGFSKQYNCAFIWQKDGVKKLNLYLIINYFKGGKLRFKKIKPEAFEANRFYTVINKKSGEIVPMEVNFNFDDPNLIILPLAFGKRQGREFIWNDLLSLETGSLKLANGRVIEKTLYNRRTRQDEPALFVALTFERREVLDSSNIKPMNLIGVDRGENIPAVIALTDPEGCPLSRFKDSLGNPTHILRIGESYKEKQRTIQAKKEVEQRRAGGYSRKYASKAKNLADDMVRNTARDLLYYAVTQDAMLIFENLSRGFGRQGKRTFMAERQYTRMEDWLTAKLAYEGLPSKTYLSKTLAQYTSKTCSNCGFTITSADYDRVLEKLKKTATGWMTTINGKELKVEGQITYYNRYKRQNVVKDLSVELDRLSEESVNNDISSWTKGRSGEALSLLKKRFSHRPVQEKFVCLNCGFETHADEQAALNIARSWLFLRSQEYKKYQTNKTTGNTDKRAFVETWQSFYRKKLKEVWKPAV

SEQ ID NO: 43052 - protein, 979 aa, synthetic construct
  REGION 1..979: note = engineered CasX variant
QEIKRINKIRRRLVKDSNTKKAGKTGPMKTLLVRVMTPDLRERLENLRKKPENIPQPISNTSRANLNKLLTDYTEMKKAILHVYWEEFQKDPVGLMSRVAQPASKKIDQNKLKPEMDEKGNLTTAGFACSQCGQPLFVYKLEQVSEKGKAYTNYFGRCNVAEHEKLIKLYQLKPEKDSDEAVTYSLGKFGQRALDFYSIHVTKESTHPVKPLAQIAGNRYASGPVGKALSDACMGTIASFLSKYQDIIIEHQKVVKGNQKRLESLRELAGKENLEYPSVTLPPQPHTKEGVDAYNEVIARVRMWVNLNLWQKLKLSRDDAKPLLRLKGFPSFPLVERQANEVDWWDMVCNVKKLINEKKEDGKVFWQNLAGYKRQEALRPYLSSEEDRKKGKKFARYQLGDLLLHLEKKHGEDWGKVYDEAWERIDKKVEGLSKHIKLEEERRSEDAQSKAALTDWLRAKASFVIEGLKEADDKDEFCRCELKLQKWYGDLRGKPFAIEAENSILDISGFSKQYNCAFIWQKDGVKKLNLYLIINYFKGGKLRFKKIKPEAFEANRFYTVINKKSGEIVPMEVNFNFDDPNLIILPLAFGKRQGREFIWNDLLSLETGSLKLANGRVIEKTLYNRRTRQDEPALFVALTFERREVLDSSNIKPMNLIGVDRGENIPAVIALTDPEGCPLSRFKDSLGNPTHILRIGESYKEKQRTIQAKKEVEQRRAGGYSRKYASKAKNLADDMVRNTARDLLYYAVTQDAMLIFENLSRGFGRQGKRTFMAERQYTRMEDWLTAKLAYEGLPSKTYLSKTLAQYTSKTCSNCGFTITSADYDRVLEKLKKTATGWMTTINGKELKVEGQITYYNRYKRQNVVKDLSVELDRLSEESVNNDISSWTKGRSGEALSLLKKRFSHRPVQEKFVCLNCGFETHADEQAALNIARSWLFLRSQEYKKYQTNKTTGNTDKRAFVETWQSFYRKKLKEVWKPAV

SEQ ID NO: 43053 - protein, 978 aa, synthetic construct
  REGION 1..978: note = engineered CasX variant
QEIKRINKIRRRLVKDSNTKKAGKTGPMKTLLVRVMTPDLRERLENLRKKPENIPQPISNTSRANLNKLLTDYTEMKKAILHVYWEEFQKDPVGLMSRVAQPASKKIDQNKLKPEMDEKGNLTTAGFACSQCGQPLFVYKLEQVSEKGKAYTNYFGRCNVAEHEKLILLYQLKPEKDSDEAVTYSLGKFGQRALDFYSIHVTKESTHPVKPLAQIAGNRYASPVGKALSDACMGTIASFLSKYQDIIIEHQKVVKGNQKRLESLRELAGKENLEYPSVTLPPQPHTKEGVDAYNEVIARVRMWVNLNLWQKLKLSRDDAKPLLRLKGFPSFPLVERQANEVDWWDMVCNVKKLINEKKEDGKVFWQNLAGYKRQEALRPYLSSEEDRKKGKKFARYQLGDLLLHLEKKHGEDWGKVYDEAWERIDKKVEGLSKHIKLEEERRSEDAQSKAALTDWLRAKASFVIEGLKEADDKDEFCRCELKLQKWYGDLRGKPFAIEAENSILDISGFSKQYNCAFIWQKDGVKKLNLYLIINYFKGGKLRFKKIKPEAFEANRFYTVINKKSGEIVPMEVNFNFDDPNLIILPLAFGKRQGREFIWNDLLSLETGSLKLANGRVIEKTLYNRRTRQDEPALFVALTFERREVLDSSNIKPMNLIGVDRGENIPAVIALTDPEGCPLSRFKDSLGNPTHILRIGESYKEKQRTIQAKKEVEQRRAGGYSRKYASKAKNLADDMVRNTARDLLYYAVTQDAMLIFENLSRGFGRQGKRTFMAERQYTRMEDWLTAKLAYEGLPSKTYLSKTLAQYTSKTCSNCGFTITSADYDRVLEKLKKTATGWMTTINGKELKVEGQITYYNRYKRQNVVKDLSVELDRLSEESVNNDISSWTKGRSGEALSLLKKRFSHRPVQEKFVCLNCGFETHADEQAALNIARSWLFLRSQEYKKYQTNKTTGNTDKRAFVETWQSFYRKKLKEVWKPAV

SEQ ID NO: 43054 - protein, 979 aa, synthetic construct
  REGION 1..979: note = engineered CasX variant
QEIKRINKIRRRLVKDSNTKKAGKTGPMKTLLVRVMTPDLRERLENLRKKPENIPQPISNTSRANLNKLLTDYTEMKKAILHVYWEEFQKDPVGLMSRVAQPASKKIDQNKLKPEMDEKGNLTTAGFACSQCGQPLFVYKLEQVSEKGKAYTNYFGRCNVAEHEKLILLYQLKPEKDSDEAVTYSLGKFGQRALDFYSIHVTKESTHPVKPLAQIAGNRYASYPVGKALSDACMGTIASFLSKYQDIIIEHQKVVKGNQKRLESLRELAGKENLEYPSVTLPPQPHTKEGVDAYNEVIARVRMWVNLNLWQKLKLSRDDAKPLLRLKGFPSFPLVERQANEVDWWDMVCNVKKLINEKKEDGKVFWQNLAGYKRQEALRPYLSSEEDRKKGKKFARYQLGDLLLHLEKKHGEDWGKVYDEAWERIDKKVEGLSKHIKLEEERRSEDAQSKAALTDWLRAKASFVIEGLKEADKDEFCRCELKLQKWYGDLRGKPFAIEAENSILDISGFSKQYNCAFIWQKDGVKKLNLYLIINYFKGGKLRFKKIKPEAFEANRFYTVINKKSGEIVPMEVNFNFDDPNLIILPLAFGKRQGREFIWNDLLSLETGSLKLANGRVIEKTLYNRRTRQDEPALFVALTFERREVLDSSNIKPMNLIGVDRGENIPAVIALTDPEGCPLSRFKDSLGNPTHILRIGESYKEKQRTIQAKKEVEQRRAGGYSRKYASKAKNLADDMVRNTARDLLYYAVTQDAMLIFENLSRGFGRQGKRTFMAERQYTRMEDWLTAKLAYEGLPSKTYLSKTLAQYTSKTCSNCGFTITSADYDRVLEKLKKTATGWMTTINGKELKVEGQITYYNRYKRQNVVKDLSVELDRLSEESVNNDISSWTKGRSGNEALSLLKKRFSHRPVQEKFVCLNCGFETHADEQAALNIARSWLFLRSQEYKKYQTNKTTGNTDKRAFVETWQSFYRKKLKEVWKPAV

SEQ ID NO: 43055 - protein, 979 aa, synthetic construct
  REGION 1..979: note = engineered CasX variant
QEIKRINKIRRRLVKDSNTKKAGKTGPMKTLLVRVMTPDLRERLENLRKKPENIPQPISNTSRANLNKLLTDYTEMKKAILHVYWEEFQKDPVGLMSRVAQPASKKIDQNKLKPEMDEKGNLTTAGFACSQCGQPLFVYKLEQVSEKGKAYTNYFGRCNVAEHEKLILLYQLKPEKDSDEAVTYSLGKFGQRALDFYSIHVTKESTHPVKPLAQIAGNRYASHPVGKALSDACMGTIASFLSKYQDIIIEHQKVVKGNQKRLESLRELAGKENLEYPSVTLPPQPHTKEGVDAYNEVIARVRMWVNLNLWQKLKLSRDDAKPLLRLKGFPSFPLVERQANEVDWWDMVCNVKKLINEKKEDGKVFWQNLAGYKRQEALRPYLSSEEDRKKGKKFARYQLGDLLLHLEKKHGEDWGKVYDEAWERIDKKVEGLSKHIKLEEERRSEDAQSKAALTDWLRAKASFVIEGLKEADKDEFCRCELKLQKWYGDLRGKPFAIEAENSILDISGFSKQYNCAFIWQKDGVKKLNLYLIINYFKGGKLRFKKIKPEAFEANRFYTVINKKSGEIVPMEVNFNFDDPNLIILPLAFGKRQGREFIWNDLLSLETGSLKLANGRVIEKTLYNRRTRQDEPALFVALTFERREVLDSSNIKPMNLIGVDRGENIPAVIALTDPEGCPLSRFKDSLGNPTHILRIGESYKEKQRTIQAKKEVEQRRAGGYSRKYASKAKNLADDMVRNTARDLLYYAVTQDAMLIFENLSRGFGRQGKRTFMAERQYTRMEDWLTAKLAYEGLPSKTYLSKTLAQYTSKTCSNCGFTITSADYDRVLEKLKKTATGWMTTINGKELKVEGQITYYNRYKRQNVVKDLSVELDRLSEESVNNDISSWTKGRSGNEALSLLKKRFSHRPVQEKFVCLNCGFETHADEQAALNIARSWLFLRSQEYKKYQTNKTTGNTDKRAFVETWQSFYRKKLKEVWKPAV

SEQ ID NO: 43056 - protein, 979 aa, synthetic construct
  REGION 1..979: note = engineered CasX variant
QEIKRINKIRRRLVKDSNTKKAGKTGPMKTLLVRVMTPDLRERLENLRKKPENIPQPISNTSRANLNKLLTDYTEMKKAILHVYWEEFQKDPVGLMSRVAQPASKKIDQNKLKPEMDEKGNLTTAGFACSQCGQPLFVYKLEQVSEKGKAYTNYFGRCNVAEHEKLILLYQLKPEKDSDEAVTYSLGKFGQRALDFYSIHVTKESTHPVKPLAQIAGNRYASSPVGKALSDACMGTIASFLSKYQDIIIEHQKVVKGNQKRLESLRELAGKENLEYPSVTLPPQPHTKEGVDAYNEVIARVRMWVNLNLWQKLKLSRDDAKPLLRLKGFPSFPLVERQANEVDWWDMVCNVKKLINEKKEDGKVFWQNLAGYKRQEALRPYLSSEEDRKKGKKFARYQLGDLLLHLEKKHGEDWGKVYDEAWERIDKKVEGLSKHIKLEEERRSEDAQSKAALTDWLRAKASFVIEGLKEADKDEFCRCELKLQKWYGDLRGKPFAIEAENSILDISGFSKQYNCAFIWQKDGVKKLNLYLIINYFKGGKLRFKKIKPEAFEANRFYTVINKKSGEIVPMEVNFNFDDPNLIILPLAFGKRQGREFIWNDLLSLETGSLKLANGRVIEKTLYNRRTRQDEPALFVALTFERREVLDSSNIKPMNLIGVDRGENIPAVIALTDPEGCPLSRFKDSLGNPTHILRIGESYKEKQRTIQAKKEVEQRRAGGYSRKYASKAKNLADDMVRNTARDLLYYAVTQDAMLIFENLSRGFGRQGKRTFMAERQYTRMEDWLTAKLAYEGLPSKTYLSKTLAQYTSKTCSNCGFTITSADYDRVLEKLKKTATGWMTTINGKELKVEGQITYYNRYKRQNVVKDLSVELDRLSEESVNNDISSWTKGRSGNEALSLLKKRFSHRPVQEKFVCLNCGFETHADEQAALNIARSWLFLRSQEYKKYQTNKTTGNTDKRAFVETWQSFYRKKLKEVWKPAV

SEQ ID NO: 43057 - protein, 979 aa, synthetic construct
  REGION 1..979: note = engineered CasX variant
QEIKRINKIRRRLVKDSNTKKAGKTGPMKTLLVRVMTPDLRERLENLRKKPENIPQPISNTSRANLNKLLTDYTEMKKAILHVYWEEFQKDPVGLMSRVAQPASKKIDQNKLKPEMDEKGNLTTAGFACSQCGQPLFVYKLEQVSEKGKAYTNYFGRCNVAEHEKLILLYQLKPEKDSDEAVTYSLGKFGQRALDFYSIHVTKESTHPVKPLAQIAGNRYASTPVGKALSDACMGTIASFLSKYQDIIIEHQKVVKGNQKRLESLRELAGKENLEYPSVTLPPQPHTKEGVDAYNEVIARVRMWVNLNLWQKLKLSRDDAKPLLRLKGFPSFPLVERQANEVDWWDMVCNVKKLINEKKEDGKVFWQNLAGYKRQEALRPYLSSEEDRKKGKKFARYQLGDLLLHLEKKHGEDWGKVYDEAWERIDKKVEGLSKHIKLEEERRSEDAQSKAALTDWLRAKASFVIEGLKEADKDEFCRCELKLQKWYGDLRGKPFAIEAENSILDISGFSKQYNCAFIWQKDGVKKLNLYLIINYFKGGKLRFKKIKPEAFEANRFYTVINKKSGEIVPMEVNFNFDDPNLIILPLAFGKRQGREFIWNDLLSLETGSLKLANGRVIEKTLYNRRTRQDEPALFVALTFERREVLDSSNIKPMNLIGVDRGENIPAVIALTDPEGCPLSRFKDSLGNPTHILRIGESYKEKQRTIQAKKEVEQRRAGGYSRKYASKAKNLADDMVRNTARDLLYYAVTQDAMLIFENLSRGFGRQGKRTFMAERQYTRMEDWLTAKLAYEGLPSKTYLSKTLAQYTSKTCSNCGFTITSADYDRVLEKLKKTATGWMTTINGKELKVEGQITYYNRYKRQNVVKDLSVELDRLSEESVNNDISSWTKGRSGNEALSLLKKRFSHRPVQEKFVCLNCGFETHADEQAALNIARSWLFLRSQEYKKYQTNKTTGNTDKRAFVETWQSFYRKKLKEVWKPAV

SEQ ID NO: 43058 - protein, 979 aa, synthetic construct
  REGION 1..979: note = engineered CasX variant
QEIKRINKIRRRLVKDSNTKKAGKTGPMKTLLVRVMTPDLRERLENLRKKPENIPQPISNTSRANLNKLLTDYTEMKKAILHVYWEEFQKDPVGLMSRVAQPASKKIDQNKLKPEMDEKGNLTTAGFACSQCGQPLFVYKLEQVSEKGKAYTNYFGRCNVAEHEKLILLYQLKPEKDSDEAVTYSLGKFGQRALDFYSIHVTKESTHPVKPLAQIAGNRYASAPVGKALSDACMGTIASFLSKYQDIIIEHQKVVKGNQKRLESLRELAGKENLEYPSVTLPPQPHTKEGVDAYNEVIARVRMWVNLNLWQKLKLSRDDAKPLLRLKGFPSFPLVERQANEVDWWDMVCNVKKLINEKKEDGKVFWQNLAGYKRQEALRPYLSSEEDRKKGKKFARYQLGDLLLHLEKKHGEDWGKVYDEAWERIDKKVEGLSKHIKLEEERRSEDAQSKAALTDWLRAKASFVIEGLKEADKDEFCRCELKLQKWYGDLRGKPFAIEAENSILDISGFSKQYNCAFIWQKDGVKKLNLYLIINYFKGGKLRFKKIKPEAFEANRFYTVINKKSGEIVPMEVNFNFDDPNLIILPLAFGKRQGREFIWNDLLSLETGSLKLANGRVIEKTLYNRRTRQDEPALFVALTFERREVLDSSNIKPMNLIGVDRGENIPAVIALTDPEGCPLSRFKDSLGNPTHILRIGESYKEKQRTIQAKKEVEQRRAGGYSRKYASKAKNLADDMVRNTARDLLYYAVTQDAMLIFENLSRGFGRQGKRTFMAERQYTRMEDWLTAKLAYEGLPSKTYLSKTLAQYTSKTCSNCGFTITSADYDRVLEKLKKTATGWMTTINGKELKVEGQITYYNRYKRQNVVKDLSVELDRLSEESVNNDISSWTKGRSGNEALSLLKKRFSHRPVQEKFVCLNCGFETHADEQAALNIARSWLFLRSQEYKKYQTNKTTGNTDKRAFVETWQSFYRKKLKEVWKPAV

SEQ ID NO: 43059 - protein, 979 aa, synthetic construct
  REGION 1..979: note = engineered CasX variant
QEIKRINKIRRRLVKDSNTKKAGKTGPMKTLLVRVMTPDLRERLENLRKKPENIPQPISNTSRANLNKLLTDYTEMKKAILHVYWEEFQKDPVGLMSRVAQPASKKIDQNKLKPEMDEKGNLTTAGFACSQCGQPLFVYKLEQVSEKGKAYTNYFGRCNVAEHEKLILLYQLKPEKDSDEAVTYSLGKFGQRALDFYSIHVTKESTHPVKPLAQIAGNRYASVPVGKALSDACMGTIASFLSKYQDIIIEHQKVVKGNQKRLESLRELAGKENLEYPSVTLPPQPHTKEGVDAYNEVIARVRMWVNLNLWQKLKLSRDDAKPLLRLKGFPSFPLVERQANEVDWWDMVCNVKKLINEKKEDGKVFWQNLAGYKRQEALRPYLSSEEDRKKGKKFARYQLGDLLLHLEKKHGEDWGKVYDEAWERIDKKVEGLSKHIKLEEERRSEDAQSKAALTDWLRAKASFVIEGLKEADKDEFCRCELKLQKWYGDLRGKPFAIEAENSILDISGFSKQYNCAFIWQKDGVKKLNLYLIINYFKGGKLRFKKIKPEAFEANRFYTVINKKSGEIVPMEVNFNFDDPNLIILPLAFGKRQGREFIWNDLLSLETGSLKLANGRVIEKTLYNRRTRQDEPALFVALTFERREVLDSSNIKPMNLIGVDRGENIPAVIALTDPEGCPLSRFKDSLGNPTHILRIGESYKEKQRTIQAKKEVEQRRAGGYSRKYASKAKNLADDMVRNTARDLLYYAVTQDAMLIFENLSRGFGRQGKRTFMAERQYTRMEDWLTAKLAYEGLPSKTYLSKTLAQYTSKTCSNCGFTITSADYDRVLEKLKKTATGWMTTINGKELKVEGQITYYNRYKRQNVVKDLSVELDRLSEESVNNDISSWTKGRSGNEALSLLKKRFSHRPVQEKFVCLNCGFETHADEQAALNIARSWLFLRSQEYKKYQTNKTTGNTDKRAFVETWQSFYRKKLKEVWKPAV

SEQ ID NO: 43060 - protein, 979 aa, synthetic construct
  REGION 1..979: note = engineered CasX variant
QEIKRINKIRRRLVKDSNTKKAGKTGPMKTLLVRVMTPDLRERLENLRKKPENIPQPISNTSRANLNKLLTDYTEMKKAILHVYWEEFQKDPVGLMSRVAQPASKKIDQNKLKPEMDEKGNLTTAGFACSQCGQPLFVYKLEQVSEKGKAYTNYFGRCNVAEHEKLIKLYQLKPEKDSDEAVTYSLGKFGQRALDFYSIHVTKESTHPVKPLAQIAGNRYASGPVGKALSDACMGTIASFLSKYQDIIIEHQKVVKGNQKRLESLRELAGKENLEYPSVTLPPQPHTKEGVDAYNEVIARVRMWVNLNLWQKLKLSRDDAKPLLRLKGFPSFPLVERQANEVDWWDMVCNVKKLINEKKEDGKVFWQNLAGYKRQEALRPYLSSEEDRKKGKKFARYQLGDLLLHLEKKHGEDWGKVYDEAWERIDKKVEGLSKHIKLEEERRSEDAQSKAALTDWLRAKASFVIEGLKEADKDEFCRCELKLQKWYGDLRGKPFAIEAENSILDISGFSKQYNCAFIWQKDGVKKLNLYLIINYFKGGKLRFKKIKPEAFEANRFYTVINKKSGEIVPMEVNFNFDDPNLIILPLAFGKRQGREFIWNDLLSLETGSLKLANGRVIEKTLYNRRTRQDEPALFVALTFERREVLDSSNIKPMNLIGVDRGENIPAVIALTDPEGCPLSRFKDSLGNPTHILRIGESYKEKQRTIQAKKEVEQRRAGGYSRKYASKAKNLADDMVRNTARDLLYYAVTQDAMLIFENLSRGFGRQGKRTFMAERQYTRMEDWLTAKLAYEGLPSKTYLSKTLAQYTSKTCSNCGFTITSADYDRVLEKLKKTATGWMTTINGKELKVEGQITYYNRYKRQNVVKDLSVELDRLSEESVNNDISSWTKGRSGNEALSLLKKRFSHRPVQEKFVCLNCGFETHADEQAALNIARSWLFLRSQEYKKYQTNKTTGNTDKRAFVETWQSFYRKKLKEVWKPAV

SEQ ID NO: 43061 - protein, 978 aa, synthetic construct
  REGION 1..978: note = engineered CasX variant
QEIKRINKIRRRLVKDSNTKKAGKTGPMKTLLVRVMTPDLRERLENLRKKPENIPQPISNTSRANLNKLLTDYTEMKKAILHVYWEEFQKDPVGLMSRVAQPASKKIDQNKLKPEMDEKGNLTTAGFACSQCGQPLFVYKLEQVSEKGKAYTNYFGRCNVAEHEKLILLYQLKPEKDSDEAVTYSLGKFGQRALDFYSIHVTKESTHPVKPLAQIAGNRYASPVGKALSDACMGTIASFLSKYQDIIIEHQKVVKGNQKRLESLRELAGKENLEYPSVTLPPQPHTKEGVDAYNEVIARVRMWVNLNLWQKLKLSRDDAKPLLRLKGFPSFPLVERQANEVDWWDMVCNVKKLINEKKEDGKVFWQNLAGYKRQEALRPYLSSEEDRKKGKKFARYQLGDLLLHLEKKHGEDWGKVYDEAWERIDKKVEGLSKHIKLEEERRSEDAQSKAALTDWLRAKASFVIEGLKEADKDEFCRCELKLQKWYGDLRGKPFAIEAENSILDISGFSKQYNCAFIWQKDGVKKLNLYLIINYFKGGKLRFKKIKPEAFEANRFYTVINKKSGEIVPMEVNFNFDDPNLIILPLAFGKRQGREFIWNDLLSLETGSLKLANGRVIEKTLYNRRTRQDEPALFVALTFERREVLDSSNIKPMNLIGVDRGENIPAVIALTDPEGCPLSRFKDSLGNPTHILRIGESYKEKQRTIQAKKEVEQRRAGGYSRKYASKAKNLADDMVRNTARDLLYYAVTQDAMLIFENLSRGFGRQGKRTFMAERQYTRMEDWLTAKLAYEGLPSKTYLSKTLAQYTSKTCSNCGFTITSADYDRVLEKLKKTATGWMTTINGKELKVEGQITYYNRYKRQNVVKDLSVELDRLSEESVNNDISSWTKGRSGNEALSLLKKRFSHRPVQEKFVCLNCGFETHADEQAALNIARSWLFLRSQEYKKYQTNKTTGNTDKRAFVETWQSFYRKKLKEVWKPAV

SEQ ID NO: 43062 - protein, 978 aa, synthetic construct
  REGION 1..978: note = engineered CasX variant
QEIKRINKIRRRLVKDSNTKKAGKTGPMKTLLVRVMTPDLRERLENLRKKPENIPQPISNTSRANLNKLLTDYTEMKKAILHVYWEEFQKDPVGLMSRVAQPASKKIDQNKLKPEMDEKGNLTTAGFACSQCGQPLFVYKLEQVSEKGKAYTNYFGRCNVAEHEKLILLYQLKPEKDSDEAVTYSLGKFGQRALDFYSIHVTKESTHPVKPLAQIAGNRYASYPVGKALSDACMGTIASFLSKYQDIIIEHQKVVKGNQKRLESLRELAGKENLEYPSVTLPPQPHTKEGVDAYNEVIARVRMWVNLNLWQKLKLSRDDAKPLLRLKGFPSFPLVERQANEVDWWDMVCNVKKLINEKKEDGKVFWQNLAGYKRQEALRPYLSSEEDRQKGKKFARYQLGDLLLHLEKKHGEDWGKVYDEAWERIDKKVEGLSKHIKLEEERRSEDAQSKAALTDWLRAKASFVIEGLKEADKDEFCRCELKLQKWYGDLRGKPFAIEAENSILDISGFSKQYNCAFIWQKDGVKKLNLYLIINYFKGGKLRFKKIKPEAFEANRFYTVINKKSGEIVPMEVNFNFDDPNLIILPLAFGKRQGREFIWNDLLSLETGSLKLANGRVIEKTLYNRRTRQDEPALFVALTFERREVLDSSNIKPMNLIGVDRGENIPAVIALTDPEGCPLSRFKDSLGNPTHILRIGESYKEKQRTIQAKKEVEQRRAGGYSRKYASKAKNLADDMVRNTARDLLYYAVTQDAMLIFENLSRGFGRQGKRTFMAERQYTRMEDWLTAKLAYEGLPSKTYLSKTLAQYTSKTCSNCGFTITSADYDRVLEKLKKTATGWMTTINGKELKVEGQITYYNRYKRQNVVKDLSVELDRLSEESVNNDISSWTKGRSGEALSLLKKRFSHRPVQEKFVCLNCGFETHADEQAALNIARSWLFLRSQEYKKYQTNKTTGNTDKRAFVETWQSFYRKKLKEVWKPAV

SEQ ID NO: 43063 - protein, 978 aa, synthetic construct
  REGION 1..978: note = engineered CasX variant
QEIKRINKIRRRLVKDSNTKKAGKTGPMKTLLVRVMTPDLRERLENLRKKPENIPQPISNTSRANLNKLLTDYTEMKKAILHVYWEEFQKDPVGLMSRVAQPASKKIDQNKLKPEMDEKGNLTTAGFACSQCGQPLFVYKLEQVSEKGKAYTNYFGRCNVAEHEKLILLYQLKPEKDSDEAVTYSLGKFGQRALDFYSIHVTKESTHPVKPLAQIAGNRYASHPVGKALSDACMGTIASFLSKYQDIIIEHQKVVKGNQKRLESLRELAGKENLEYPSVTLPPQPHTKEGVDAYNEVIARVRMWVNLNLWQKLKLSRDDAKPLLRLKGFPSFPLVERQANEVDWWDMVCNVKKLINEKKEDGKVFWQNLAGYKRQEALRPYLSSEEDRQKGKKFARYQLGDLLLHLEKKHGEDWGKVYDEAWERIDKKVEGLSKHIKLEEERRSEDAQSKAALTDWLRAKASFVIEGLKEADKDEFCRCELKLQKWYGDLRGKPFAIEAENSILDISGFSKQYNCAFIWQKDGVKKLNLYLIINYFKGGKLRFKKIKPEAFEANRFYTVINKKSGEIVPMEVNFNFDDPNLIILPLAFGKRQGREFIWNDLLSLETGSLKLANGRVIEKTLYNRRTRQDEPALFVALTFERREVLDSSNIKPMNLIGVDRGENIPAVIALTDPEGCPLSRFKDSLGNPTHILRIGESYKEKQRTIQAKKEVEQRRAGGYSRKYASKAKNLADDMVRNTARDLLYYAVTQDAMLIFENLSRGFGRQGKRTFMAERQYTRMEDWLTAKLAYEGLPSKTYLSKTLAQYTSKTCSNCGFTITSADYDRVLEKLKKTATGWMTTINGKELKVEGQITYYNRYKRQNVVKDLSVELDRLSEESVNNDISSWTKGRSGEALSLLKKRFSHRPVQEKFVCLNCGFETHADEQAALNIARSWLFLRSQEYKKYQTNKTTGNTDKRAFVETWQSFYRKKLKEVWKPAV

SEQ ID NO: 43064 - protein, 978 aa, synthetic construct
  REGION 1..978: note = engineered CasX variant
QEIKRINKIRRRLVKDSNTKKAGKTGPMKTLLVRVMTPDLRERLENLRKKPENIPQPISNTSRANLNKLLTDYTEMKKAILHVYWEEFQKDPVGLMSRVAQPASKKIDQNKLKPEMDEKGNLTTAGFACSQCGQPLFVYKLEQVSEKGKAYTNYFGRCNVAEHEKLILLYQLKPEKDSDEAVTYSLGKFGQRALDFYSIHVTKESTHPVKPLAQIAGNRYASSPVGKALSDACMGTIASFLSKYQDIIIEHQKVVKGNQKRLESLRELAGKENLEYPSVTLPPQPHTKEGVDAYNEVIARVRMWVNLNLWQKLKLSRDDAKPLLRLKGFPSFPLVERQANEVDWWDMVCNVKKLINEKKEDGKVFWQNLAGYKRQEALRPYLSSEEDRQKGKKFARYQLGDLLLHLEKKHGEDWGKVYDEAWERIDKKVEGLSKHIKLEEERRSEDAQSKAALTDWLRAKASFVIEGLKEADKDEFCRCELKLQKWYGDLRGKPFAIEAENSILDISGFSKQYNCAFIWQKDGVKKLNLYLIINYFKGGKLRFKKIKPEAFEANRFYTVINKKSGEIVPMEVNFNFDDPNLIILPLAFGKRQGREFIWNDLLSLETGSLKLANGRVIEKTLYNRRTRQDEPALFVALTFERREVLDSSNIKPMNLIGVDRGENIPAVIALTDPEGCPLSRFKDSLGNPTHILRIGESYKEKQRTIQAKKEVEQRRAGGYSRKYASKAKNLADDMVRNTARDLLYYAVTQDAMLIFENLSRGFGRQGKRTFMAERQYTRMEDWLTAKLAYEGLPSKTYLSKTLAQYTSKTCSNCGFTITSADYDRVLEKLKKTATGWMTTINGKELKVEGQITYYNRYKRQNVVKDLSVELDRLSEESVNNDISSWTKGRSGEALSLLKKRFSHRPVQEKFVCLNCGFETHADEQAALNIARSWLFLRSQEYKKYQTNKTTGNTDKRAFVETWQSFYRKKLKEVWKPAV

SEQ ID NO: 43065 - protein, 978 aa, synthetic construct
  REGION 1..978: note = engineered CasX variant
QEIKRINKIRRRLVKDSNTKKAGKTGPMKTLLVRVMTPDLRERLENLRKKPENIPQPISNTSRANLNKLLTDYTEMKKAILHVYWEEFQKDPVGLMSRVAQPASKKIDQNKLKPEMDEKGNLTTAGFACSQCGQPLFVYKLEQVSEKGKAYTNYFGRCNVAEHEKLILLYQLKPEKDSDEAVTYSLGKFGQRALDFYSIHVTKESTHPVKPLAQIAGNRYASTPVGKALSDACMGTIASFLSKYQDIIIEHQKVVKGNQKRLESLRELAGKENLEYPSVTLPPQPHTKEGVDAYNEVIARVRMWVNLNLWQKLKLSRDDAKPLLRLKGFPSFPLVERQANEVDWWDMVCNVKKLINEKKEDGKVFWQNLAGYKRQEALRPYLSSEEDRQKGKKFARYQLGDLLLHLEKKHGEDWGKVYDEAWERIDKKVEGLSKHIKLEEERRSEDAQSKAALTDWLRAKASFVIEGLKEADKDEFCRCELKLQKWYGDLRGKPFAIEAENSILDISGFSKQYNCAFIWQKDGVKKLNLYLIINYFKGGKLRFKKIKPEAFEANRFYTVINKKSGEIVPMEVNFNFDDPNLIILPLAFGKRQGREFIWNDLLSLETGSLKLANGRVIEKTLYNRRTRQDEPALFVALTFERREVLDSSNIKPMNLIGVDRGENIPAVIALTDPEGCPLSRFKDSLGNPTHILRIGESYKEKQRTIQAKKEVEQRRAGGYSRKYASKAKNLADDMVRNTARDLLYYAVTQDAMLIFENLSRGFGRQGKRTFMAERQYTRMEDWLTAKLAYEGLPSKTYLSKTLAQYTSKTCSNCGFTITSADYDRVLEKLKKTATGWMTTINGKELKVEGQITYYNRYKRQNVVKDLSVELDRLSEESVNNDISSWTKGRSGEALSLLKKRFSHRPVQEKFVCLNCGFETHADEQAALNIARSWLFLRSQEYKKYQTNKTTGNTDKRAFVETWQSFYRKKLKEVWKPAV

SEQ ID NO: 43066 - protein, 978 aa, synthetic construct
  REGION 1..978: note = engineered CasX variant
QEIKRINKIRRRLVKDSNTKKAGKTGPMKTLLVRVMTPDLRERLENLRKKPENIPQPISNTSRANLNKLLTDYTEMKKAILHVYWEEFQKDPVGLMSRVAQPASKKIDQNKLKPEMDEKGNLTTAGFACSQCGQPLFVYKLEQVSEKGKAYTNYFGRCNVAEHEKLILLYQLKPEKDSDEAVTYSLGKFGQRALDFYSIHVTKESTHPVKPLAQIAGNRYASAPVGKALSDACMGTIASFLSKYQDIIIEHQKVVKGNQKRLESLRELAGKENLEYPSVTLPPQPHTKEGVDAYNEVIARVRMWVNLNLWQKLKLSRDDAKPLLRLKGFPSFPLVERQANEVDWWDMVCNVKKLINEKKEDGKVFWQNLAGYKRQEALRPYLSSEEDRQKGKKFARYQLGDLLLHLEKKHGEDWGKVYDEAWERIDKKVEGLSKHIKLEEERRSEDAQSKAALTDWLRAKASFVIEGLKEADKDEFCRCELKLQKWYGDLRGKPFAIEAENSILDISGFSKQYNCAFIWQKDGVKKLNLYLIINYFKGGKLRFKKIKPEAFEANRFYTVINKKSGEIVPMEVNFNFDDPNLIILPLAFGKRQGREFIWNDLLSLETGSLKLANGRVIEKTLYNRRTRQDEPALFVALTFERREVLDSSNIKPMNLIGVDRGENIPAVIALTDPEGCPLSRFKDSLGNPTHILRIGESYKEKQRTIQAKKEVEQRRAGGYSRKYASKAKNLADDMVRNTARDLLYYAVTQDAMLIFENLSRGFGRQGKRTFMAERQYTRMEDWLTAKLAYEGLPSKTYLSKTLAQYTSKTCSNCGFTITSADYDRVLEKLKKTATGWMTTINGKELKVEGQITYYNRYKRQNVVKDLSVELDRLSEESVNNDISSWTKGRSGEALSLLKKRFSHRPVQEKFVCLNCGFETHADEQAALNIARSWLFLRSQEYKKYQTNKTTGNTDKRAFVETWQSFYRKKLKEVWKPAV

SEQ ID NO: 43067 - protein, 978 aa, synthetic construct
  REGION 1..978: note = engineered CasX variant
QEIKRINKIRRRLVKDSNTKKAGKTGPMKTLLVRVMTPDLRERLENLRKKPENIPQPISNTSRANLNKLLTDYTEMKKAILHVYWEEFQKDPVGLMSRVAQPASKKIDQNKLKPEMDEKGNLTTAGFACSQCGQPLFVYKLEQVSEKGKAYTNYFGRCNVAEHEKLILLYQLKPEKDSDEAVTYSLGKFGQRALDFYSIHVTKESTHPVKPLAQIAGNRYASVPVGKALSDACMGTIASFLSKYQDIIIEHQKVVKGNQKRLESLRELAGKENLEYPSVTLPPQPHTKEGVDAYNEVIARVRMWVNLNLWQKLKLSRDDAKPLLRLKGFPSFPLVERQANEVDWWDMVCNVKKLINEKKEDGKVFWQNLAGYKRQEALRPYLSSEEDRQKGKKFARYQLGDLLLHLEKKHGEDWGKVYDEAWERIDKKVEGLSKHIKLEEERRSEDAQSKAALTDWLRAKASFVIEGLKEADKDEFCRCELKLQKWYGDLRGKPFAIEAENSILDISGFSKQYNCAFIWQKDGVKKLNLYLIINYFKGGKLRFKKIKPEAFEANRFYTVINKKSGEIVPMEVNFNFDDPNLIILPLAFGKRQGREFIWNDLLSLETGSLKLANGRVIEKTLYNRRTRQDEPALFVALTFERREVLDSSNIKPMNLIGVDRGENIPAVIALTDPEGCPLSRFKDSLGNPTHILRIGESYKEKQRTIQAKKEVEQRRAGGYSRKYASKAKNLADDMVRNTARDLLYYAVTQDAMLIFENLSRGFGRQGKRTFMAERQYTRMEDWLTAKLAYEGLPSKTYLSKTLAQYTSKTCSNCGFTITSADYDRVLEKLKKTATGWMTTINGKELKVEGQITYYNRYKRQNVVKDLSVELDRLSEESVNNDISSWTKGRSGEALSLLKKRFSHRPVQEKFVCLNCGFETHADEQAALNIARSWLFLRSQEYKKYQTNKTTGNTDKRAFVETWQSFYRKKLKEVWKPAV

SEQ ID NO: 43068 - protein, 978 aa, synthetic construct
  REGION 1..978: note = engineered CasX variant
QEIKRINKIRRRLVKDSNTKKAGKTGPMKTLLVRVMTPDLRERLENLRKKPENIPQPISNTSRANLNKLLTDYTEMKKAILHVYWEEFQKDPVGLMSRVAQPASKKIDQNKLKPEMDEKGNLTTAGFACSQCGQPLFVYKLEQVSEKGKAYTNYFGRCNVAEHEKLIKLYQLKPEKDSDEAVTYSLGKFGQRALDFYSIHVTKESTHPVKPLAQIAGNRYASGPVGKALSDACMGTIASFLSKYQDIIIEHQKVVKGNQKRLESLRELAGKENLEYPSVTLPPQPHTKEGVDAYNEVIARVRMWVNLNLWQKLKLSRDDAKPLLRLKGFPSFPLVERQANEVDWWDMVCNVKKLINEKKEDGKVFWQNLAGYKRQEALRPYLSSEEDRQKGKKFARYQLGDLLLHLEKKHGEDWGKVYDEAWERIDKKVEGLSKHIKLEEERRSEDAQSKAALTDWLRAKASFVIEGLKEADKDEFCRCELKLQKWYGDLRGKPFAIEAENSILDISGFSKQYNCAFIWQKDGVKKLNLYLIINYFKGGKLRFKKIKPEAFEANRFYTVINKKSGEIVPMEVNFNFDDPNLIILPLAFGKRQGREFIWNDLLSLETGSLKLANGRVIEKTLYNRRTRQDEPALFVALTFERREVLDSSNIKPMNLIGVDRGENIPAVIALTDPEGCPLSRFKDSLGNPTHILRIGESYKEKQRTIQAKKEVEQRRAGGYSRKYASKAKNLADDMVRNTARDLLYYAVTQDAMLIFENLSRGFGRQGKRTFMAERQYTRMEDWLTAKLAYEGLPSKTYLSKTLAQYTSKTCSNCGFTITSADYDRVLEKLKKTATGWMTTINGKELKVEGQITYYNRYKRQNVVKDLSVELDRLSEESVNNDISSWTKGRSGEALSLLKKRFSHRPVQEKFVCLNCGFETHADEQAALNIARSWLFLRSQEYKKYQTNKTTGNTDKRAFVETWQSFYRKKLKEVWKPAV

SEQ ID NO: 43069 - protein, 977 aa, synthetic construct
  REGION 1..977: note = engineered CasX variant
QEIKRINKIRRRLVKDSNTKKAGKTGPMKTLLVRVMTPDLRERLENLRKKPENIPQPISNTSRANLNKLLTDYTEMKKAILHVYWEEFQKDPVGLMSRVAQPASKKIDQNKLKPEMDEKGNLTTAGFACSQCGQPLFVYKLEQVSEKGKAYTNYFGRCNVAEHEKLILLYQLKPEKDSDEAVTYSLGKFGQRALDFYSIHVTKESTHPVKPLAQIAGNRYASPVGKALSDACMGTIASFLSKYQDIIIEHQKVVKGNQKRLESLRELAGKENLEYPSVTLPPQPHTKEGVDAYNEVIARVRMWVNLNLWQKLKLSRDDAKPLLRLKGFPSFPLVERQANEVDWWDMVCNVKKLINEKKEDGKVFWQNLAGYKRQEALRPYLSSEEDRQKGKKFARYQLGDLLLHLEKKHGEDWGKVYDEAWERIDKKVEGLSKHIKLEEERRSEDAQSKAALTDWLRAKASFVIEGLKEADKDEFCRCELKLQKWYGDLRGKPFAIEAENSILDISGFSKQYNCAFIWQKDGVKKLNLYLIINYFKGGKLRFKKIKPEAFEANRFYTVINKKSGEIVPMEVNFNFDDPNLIILPLAFGKRQGREFIWNDLLSLETGSLKLANGRVIEKTLYNRRTRQDEPALFVALTFERREVLDSSNIKPMNLIGVDRGENIPAVIALTDPEGCPLSRFKDSLGNPTHILRIGESYKEKQRTIQAKKEVEQRRAGGYSRKYASKAKNLADDMVRNTARDLLYYAVTQDAMLIFENLSRGFGRQGKRTFMAERQYTRMEDWLTAKLAYEGLPSKTYLSKTLAQYTSKTCSNCGFTITSADYDRVLEKLKKTATGWMTTINGKELKVEGQITYYNRYKRQNVVKDLSVELDRLSEESVNNDISSWTKGRSGEALSLLKKRFSHRPVQEKFVCLNCGFETHADEQAALNIARSWLFLRSQEYKKYQTNKTTGNTDKRAFVETWQSFYRKKLKEVWKPAV

SEQ ID NO: 43070 - protein, 978 aa, synthetic construct
  REGION 1..978: note = engineered CasX variant
QEIKRINKIRRRLVKDSNTKKAGKTGPMKTLLVRVMTPDLRERLENLRKKPENIPQPISNTSRANLNKLLTDYTEMKKAILHVYWEEFQKDPVGLMSRVAQPASKKIDQNKLKPEMDEKGNLTTAGFACSQCGQPLFVYKLEQVSEKGKAYTNYFGRCNVAEHEKLILLYQLKPEKDSDEAVTYSLGKFGQRALDFYSIHVTKESTHPVKPLAQIAGNRYASYPVGKALSDACMGTIASFLSKYQDIIIEHQKVVKGNQKRLESLRELAGKENLEYPSVTLPPQPHTKEGVDAYNEVIARVRMWVNLNLWQKLKLSRDDAKPLLRLKGFPSFPLVERQANEVDWWDMVCNVKKLINEKKEDGKVFWQNLAGYKRQEALRPYLSSEEDRKKGKKFARYQLGDLLLHLEKKHGEDWGKVYDEAWERIDKKVEGLSKHIKLEEERRSEDAQSKAALTDWLRAKASFVIEGLKEADKDEFCRCELKLQKWYGDLRGKPFAIEAENSILDISGFSKQYNCAFIWQKDGVKKLNLYLIINYFKGGKLRFKKIKPEAFEANRFYTVINKKSGEIVPMEVNFNFDDPNLIILPLAFGKRQGREFIWNDLLSLETGSLKLANGRVIEKTLYNRRTRQDEPALFVALTFERREVLDSSNIKPMNLIGVDRGENIPAVIALTDPEGCPLSRFKDSLGNPTHILRIGESYKEKQRTIQAKKEVEQRRAGGYSRKYASKAKNLADDMVRNTARDLLYYAVTQDAMLIFENLSRGFGRQGKRTFMAERQYTRMEDWLTAKLAYEGLPSQTYLSKTLAQYTSKTCSNCGFTITSADYDRVLEKLKKTATGWMTTINGKELKVEGQITYYNRYKRQNVVKDLSVELDRLSEESVNNDISSWTKGRSGEALSLLKKRFSHRPVQEKFVCLNCGFETHADEQAALNIARSWLFLRSQEYKKYQTNKTTGNTDKRAFVETWQSFYRKKLKEVWKPAV

SEQ ID NO: 43071 - protein, 978 aa, synthetic construct
  REGION 1..978: note = engineered CasX variant
QEIKRINKIRRRLVKDSNTKKAGKTGPMKTLLVRVMTPDLRERLENLRKKPENIPQPISNTSRANLNKLLTDYTEMKKAILHVYWEEFQKDPVGLMSRVAQPASKKIDQNKLKPEMDEKGNLTTAGFACSQCGQPLFVYKLEQVSEKGKAYTNYFGRCNVAEHEKLILLYQLKPEKDSDEAVTYSLGKFGQRALDFYSIHVTKESTHPVKPLAQIAGNRYASHPVGKALSDACMGTIASFLSKYQDIIIEHQKVVKGNQKRLESLRELAGKENLEYPSVTLPPQPHTKEGVDAYNEVIARVRMWVNLNLWQKLKLSRDDAKPLLRLKGFPSFPLVERQANEVDWWDMVCNVKKLINEKKEDGKVFWQNLAGYKRQEALRPYLSSEEDRKKGKKFARYQLGDLLLHLEKKHGEDWGKVYDEAWERIDKKVEGLSKHIKLEEERRSEDAQSKAALTDWLRAKASFVIEGLKEADKDEFCRCELKLQKWYGDLRGKPFAIEAENSILDISGFSKQYNCAFIWQKDGVKKLNLYLIINYFKGGKLRFKKIKPEAFEANRFYTVINKKSGEIVPMEVNFNFDDPNLIILPLAFGKRQGREFIWNDLLSLETGSLKLANGRVIEKTLYNRRTRQDEPALFVALTFERREVLDSSNIKPMNLIGVDRGENIPAVIALTDPEGCPLSRFKDSLGNPTHILRIGESYKEKQRTIQAKKEVEQRRAGGYSRKYASKAKNLADDMVRNTARDLLYYAVTQDAMLIFENLSRGFGRQGKRTFMAERQYTRMEDWLTAKLAYEGLPSQTYLSKTLAQYTSKTCSNCGFTITSADYDRVLEKLKKTATGWMTTINGKELKVEGQITYYNRYKRQNVVKDLSVELDRLSEESVNNDISSWTKGRSGEALSLLKKRFSHRPVQEKFVCLNCGFETHADEQAALNIARSWLFLRSQEYKKYQTNKTTGNTDKRAFVETWQSFYRKKLKEVWKPAV

SEQ ID NO: 43072 - protein, 978 aa, synthetic construct
  REGION 1..978: note = engineered CasX variant
QEIKRINKIRRRLVKDSNTKKAGKTGPMKTLLVRVMTPDLRERLENLRKKPENIPQPISNTSRANLNKLLTDYTEMKKAILHVYWEEFQKDPVGLMSRVAQPASKKIDQNKLKPEMDEKGNLTTAGFACSQCGQPLFVYKLEQVSEKGKAYTNYFGRCNVAEHEKLILLYQLKPEKDSDEAVTYSLGKFGQRALDFYSIHVTKESTHPVKPLAQIAGNRYASSPVGKALSDACMGTIASFLSKYQDIIIEHQKVVKGNQKRLESLRELAGKENLEYPSVTLPPQPHTKEGVDAYNEVIARVRMWVNLNLWQKLKLSRDDAKPLLRLKGFPSFPLVERQANEVDWWDMVCNVKKLINEKKEDGKVFWQNLAGYKRQEALRPYLSSEEDRKKGKKFARYQLGDLLLHLEKKHGEDWGKVYDEAWERIDKKVEGLSKHIKLEEERRSEDAQSKAALTDWLRAKASFVIEGLKEADKDEFCRCELKLQKWYGDLRGKPFAIEAENSILDISGFSKQYNCAFIWQKDGVKKLNLYLIINYFKGGKLRFKKIKPEAFEANRFYTVINKKSGEIVPMEVNFNFDDPNLIILPLAFGKRQGREFIWNDLLSLETGSLKLANGRVIEKTLYNRRTRQDEPALFVALTFERREVLDSSNIKPMNLIGVDRGENIPAVIALTDPEGCPLSRFKDSLGNPTHILRIGESYKEKQRTIQAKKEVEQRRAGGYSRKYASKAKNLADDMVRNTARDLLYYAVTQDAMLIFENLSRGFGRQGKRTFMAERQYTRMEDWLTAKLAYEGLPSQTYLSKTLAQYTSKTCSNCGFTITSADYDRVLEKLKKTATGWMTTINGKELKVEGQITYYNRYKRQNVVKDLSVELDRLSEESVNNDISSWTKGRSGEALSLLKKRFSHRPVQEKFVCLNCGFETHADEQAALNIARSWLFLRSQEYKKYQTNKTTGNTDKRAFVETWQSFYRKKLKEVWKPAV

SEQ ID NO: 43073 - protein, 978 aa, synthetic construct
  REGION 1..978: note = engineered CasX variant
QEIKRINKIRRRLVKDSNTKKAGKTGPMKTLLVRVMTPDLRERLENLRKKPENIPQPISNTSRANLNKLLTDYTEMKKAILHVYWEEFQKDPVGLMSRVAQPASKKIDQNKLKPEMDEKGNLTTAGFACSQCGQPLFVYKLEQVSEKGKAYTNYFGRCNVAEHEKLILLYQLKPEKDSDEAVTYSLGKFGQRALDFYSIHVTKESTHPVKPLAQIAGNRYASTPVGKALSDACMGTIASFLSKYQDIIIEHQKVVKGNQKRLESLRELAGKENLEYPSVTLPPQPHTKEGVDAYNEVIARVRMWVNLNLWQKLKLSRDDAKPLLRLKGFPSFPLVERQANEVDWWDMVCNVKKLINEKKEDGKVFWQNLAGYKRQEALRPYLSSEEDRKKGKKFARYQLGDLLLHLEKKHGEDWGKVYDEAWERIDKKVEGLSKHIKLEEERRSEDAQSKAALTDWLRAKASFVIEGLKEADKDEFCRCELKLQKWYGDLRGKPFAIEAENSILDISGFSKQYNCAFIWQKDGVKKLNLYLIINYFKGGKLRFKKIKPEAFEANRFYTVINKKSGEIVPMEVNFNFDDPNLIILPLAFGKRQGREFIWNDLLSLETGSLKLANGRVIEKTLYNRRTRQDEPALFVALTFERREVLDSSNIKPMNLIGVDRGENIPAVIALTDPEGCPLSRFKDSLGNPTHILRIGESYKEKQRTIQAKKEVEQRRAGGYSRKYASKAKNLADDMVRNTARDLLYYAVTQDAMLIFENLSRGFGRQGKRTFMAERQYTRMEDWLTAKLAYEGLPSQTYLSKTLAQYTSKTCSNCGFTITSADYDRVLEKLKKTATGWMTTINGKELKVEGQITYYNRYKRQNVVKDLSVELDRLSEESVNNDISSWTKGRSGEALSLLKKRFSHRPVQEKFVCLNCGFETHADEQAALNIARSWLFLRSQEYKKYQTNKTTGNTDKRAFVETWQSFYRKKLKEVWKPAV

SEQ ID NO: 43074 - protein, 978 aa, synthetic construct
  REGION 1..978: note = engineered CasX variant
QEIKRINKIRRRLVKDSNTKKAGKTGPMKTLLVRVMTPDLRERLENLRKKPENIPQPISNTSRANLNKLLTDYTEMKKAILHVYWEEFQKDPVGLMSRVAQPASKKIDQNKLKPEMDEKGNLTTAGFACSQCGQPLFVYKLEQVSEKGKAYTNYFGRCNVAEHEKLILLYQLKPEKDSDEAVTYSLGKFGQRALDFYSIHVTKESTHPVKPLAQIAGNRYASAPVGKALSDACMGTIASFLSKYQDIIIEHQKVVKGNQKRLESLRELAGKENLEYPSVTLPPQPHTKEGVDAYNEVIARVRMWVNLNLWQKLKLSRDDAKPLLRLKGFPSFPLVERQANEVDWWDMVCNVKKLINEKKEDGKVFWQNLAGYKRQEALRPYLSSEEDRKKGKKFARYQLGDLLLHLEKKHGEDWGKVYDEAWERIDKKVEGLSKHIKLEEERRSEDAQSKAALTDWLRAKASFVIEGLKEADKDEFCRCELKLQKWYGDLRGKPFAIEAENSILDISGFSKQYNCAFIWQKDGVKKLNLYLIINYFKGGKLRFKKIKPEAFEANRFYTVINKKSGEIVPMEVNFNFDDPNLIILPLAFGKRQGREFIWNDLLSLETGSLKLANGRVIEKTLYNRRTRQDEPALFVALTFERREVLDSSNIKPMNLIGVDRGENIPAVIALTDPEGCPLSRFKDSLGNPTHILRIGESYKEKQRTIQAKKEVEQRRAGGYSRKYASKAKNLADDMVRNTARDLLYYAVTQDAMLIFENLSRGFGRQGKRTFMAERQYTRMEDWLTAKLAYEGLPSQTYLSKTLAQYTSKTCSNCGFTITSADYDRVLEKLKKTATGWMTTINGKELKVEGQITYYNRYKRQNVVKDLSVELDRLSEESVNNDISSWTKGRSGEALSLLKKRFSHRPVQEKFVCLNCGFETHADEQAALNIARSWLFLRSQEYKKYQTNKTTGNTDKRAFVETWQSFYRKKLKEVWKPAV

SEQ ID NO: 43075 - protein, 978 aa, synthetic construct
  REGION 1..978: note = engineered CasX variant
QEIKRINKIRRRLVKDSNTKKAGKTGPMKTLLVRVMTPDLRERLENLRKKPENIPQPISNTSRANLNKLLTDYTEMKKAILHVYWEEFQKDPVGLMSRVAQPASKKIDQNKLKPEMDEKGNLTTAGFACSQCGQPLFVYKLEQVSEKGKAYTNYFGRCNVAEHEKLILLYQLKPEKDSDEAVTYSLGKFGQRALDFYSIHVTKESTHPVKPLAQIAGNRYASVPVGKALSDACMGTIASFLSKYQDIIIEHQKVVKGNQKRLESLRELAGKENLEYPSVTLPPQPHTKEGVDAYNEVIARVRMWVNLNLWQKLKLSRDDAKPLLRLKGFPSFPLVERQANEVDWWDMVCNVKKLINEKKEDGKVFWQNLAGYKRQEALRPYLSSEEDRKKGKKFARYQLGDLLLHLEKKHGEDWGKVYDEAWERIDKKVEGLSKHIKLEEERRSEDAQSKAALTDWLRAKASFVIEGLKEADKDEFCRCELKLQKWYGDLRGKPFAIEAENSILDISGFSKQYNCAFIWQKDGVKKLNLYLIINYFKGGKLRFKKIKPEAFEANRFYTVINKKSGEIVPMEVNFNFDDPNLIILPLAFGKRQGREFIWNDLLSLETGSLKLANGRVIEKTLYNRRTRQDEPALFVALTFERREVLDSSNIKPMNLIGVDRGENIPAVIALTDPEGCPLSRFKDSLGNPTHILRIGESYKEKQRTIQAKKEVEQRRAGGYSRKYASKAKNLADDMVRNTARDLLYYAVTQDAMLIFENLSRGFGRQGKRTFMAERQYTRMEDWLTAKLAYEGLPSQTYLSKTLAQYTSKTCSNCGFTITSADYDRVLEKLKKTATGWMTTINGKELKVEGQITYYNRYKRQNVVKDLSVELDRLSEESVNNDISSWTKGRSGEALSLLKKRFSHRPVQEKFVCLNCGFETHADEQAALNIARSWLFLRSQEYKKYQTNKTTGNTDKRAFVETWQSFYRKKLKEVWKPAV

SEQ ID NO: 43076 - protein, 978 aa, synthetic construct
  REGION 1..978: note = engineered CasX variant
QEIKRINKIRRRLVKDSNTKKAGKTGPMKTLLVRVMTPDLRERLENLRKKPENIPQPISNTSRANLNKLLTDYTEMKKAILHVYWEEFQKDPVGLMSRVAQPASKKIDQNKLKPEMDEKGNLTTAGFACSQCGQPLFVYKLEQVSEKGKAYTNYFGRCNVAEHEKLIKLYQLKPEKDSDEAVTYSLGKFGQRALDFYSIHVTKESTHPVKPLAQIAGNRYASGPVGKALSDACMGTIASFLSKYQDIIIEHQKVVKGNQKRLESLRELAGKENLEYPSVTLPPQPHTKEGVDAYNEVIARVRMWVNLNLWQKLKLSRDDAKPLLRLKGFPSFPLVERQANEVDWWDMVCNVKKLINEKKEDGKVFWQNLAGYKRQEALRPYLSSEEDRKKGKKFARYQLGDLLLHLEKKHGEDWGKVYDEAWERIDKKVEGLSKHIKLEEERRSEDAQSKAALTDWLRAKASFVIEGLKEADKDEFCRCELKLQKWYGDLRGKPFAIEAENSILDISGFSKQYNCAFIWQKDGVKKLNLYLIINYFKGGKLRFKKIKPEAFEANRFYTVINKKSGEIVPMEVNFNFDDPNLIILPLAFGKRQGREFIWNDLLSLETGSLKLANGRVIEKTLYNRRTRQDEPALFVALTFERREVLDSSNIKPMNLIGVDRGENIPAVIALTDPEGCPLSRFKDSLGNPTHILRIGESYKEKQRTIQAKKEVEQRRAGGYSRKYASKAKNLADDMVRNTARDLLYYAVTQDAMLIFENLSRGFGRQGKRTFMAERQYTRMEDWLTAKLAYEGLPSQTYLSKTLAQYTSKTCSNCGFTITSADYDRVLEKLKKTATGWMTTINGKELKVEGQITYYNRYKRQNVVKDLSVELDRLSEESVNNDISSWTKGRSGEALSLLKKRFSHRPVQEKFVCLNCGFETHADEQAALNIARSWLFLRSQEYKKYQTNKTTGNTDKRAFVETWQSFYRKKLKEVWKPAV

SEQ ID NO: 43077 - protein, 977 aa, synthetic construct
  REGION 1..977: note = engineered CasX variant
QEIKRINKIRRRLVKDSNTKKAGKTGPMKTLLVRVMTPDLRERLENLRKKPENIPQPISNTSRANLNKLLTDYTEMKKAILHVYWEEFQKDPVGLMSRVAQPASKKIDQNKLKPEMDEKGNLTTAGFACSQCGQPLFVYKLEQVSEKGKAYTNYFGRCNVAEHEKLILLYQLKPEKDSDEAVTYSLGKFGQRALDFYSIHVTKESTHPVKPLAQIAGNRYASPVGKALSDACMGTIASFLSKYQDIIIEHQKVVKGNQKRLESLRELAGKENLEYPSVTLPPQPHTKEGVDAYNEVIARVRMWVNLNLWQKLKLSRDDAKPLLRLKGFPSFPLVERQANEVDWWDMVCNVKKLINEKKEDGKVFWQNLAGYKRQEALRPYLSSEEDRKKGKKFARYQLGDLLLHLEKKHGEDWGKVYDEAWERIDKKVEGLSKHIKLEEERRSEDAQSKAALTDWLRAKASFVIEGLKEADKDEFCRCELKLQKWYGDLRGKPFAIEAENSILDISGFSKQYNCAFIWQKDGVKKLNLYLIINYFKGGKLRFKKIKPEAFEANRFYTVINKKSGEIVPMEVNFNFDDPNLIILPLAFGKRQGREFIWNDLLSLETGSLKLANGRVIEKTLYNRRTRQDEPALFVALTFERREVLDSSNIKPMNLIGVDRGENIPAVIALTDPEGCPLSRFKDSLGNPTHILRIGESYKEKQRTIQAKKEVEQRRAGGYSRKYASKAKNLADDMVRNTARDLLYYAVTQDAMLIFENLSRGFGRQGKRTFMAERQYTRMEDWLTAKLAYEGLPSQTYLSKTLAQYTSKTCSNCGFTITSADYDRVLEKLKKTATGWMTTINGKELKVEGQITYYNRYKRQNVVKDLSVELDRLSEESVNNDISSWTKGRSGEALSLLKKRFSHRPVQEKFVCLNCGFETHADEQAALNIARSWLFLRSQEYKKYQTNKTTGNTDKRAFVETWQSFYRKKLKEVWKPAV

SEQ ID NO: 43078 - protein, 978 aa, synthetic construct
  REGION 1..978: note = engineered CasX variant
QEIKRINKIRRRLVKDSNTKKAGKTGPMKTLLVRVMTPDLRERLENLRKKPENIPQPISNTSRANLNKLLTDYTEMKKAILHVYWEEFQKDPVGLMSRVAQPASKKIDQNKLKPEMDEKGNLTTAGFACSQCGQPLFVYKLEQVSEKGKAYTNYFGRCNVAEHEKLILLYQLKPEKDSDEAVTYSLGKFGQRALDFYSIHVTKESTHPVKPLAQIAGNRYASYPVGKALSDACMGTIASFLSKYQDIIIEHQKVVKGNQKRLESLRELAGKENLEYPSVTLPPQPHTKEGVDAYNEVIARVRMWVNLNLWQKLKLSRDDAKPLLRLKGFPSFPLVERQANEVDWWDMVCNVKKLINEKKEDGKVFWQNLAGYKRQEALRPYLSSEEDRKKGKKFARYQLGDLLLHLEKKHGEDWGKVYDEAWERIDKKVEGLSKHIKLEEERRSEDAQSKAALTDWLRAKASFVIEGLKEADKDEFCRCELKLQKWYGDLRGKPFAIEAENSILDISGFSKQYNCAFIWQKDGVKKLNLYLIINYFKGGKLRFKKIKPEAFEANRFYTVINKKSGEIVPMEVNFNFDDPNLIILPLAFGKRQGREFIWNDLLSLETGSLKLANGRVIEKTLYNRRTRQDEPALFVALTFERREVLDSSNIKPMNLIGVDRGENIPAVIALTDPEGCPLSRFKDSLGNPTHILRIGESYKEKQRTIQAKKEVEQRRAGGYSRKYASKAKNLADDMVRNTARDLLYYAVTQDAMLIFENLSRGFGRQGKRTFMAERQYTRMEDWLTAKLAYNGLPSKTYLSKTLAQYTSKTCSNCGFTITSADYDRVLEKLKKTATGWMTTINGKELKVEGQITYYNRYKRQNVVKDLSVELDRLSEESVNNDISSWTKGRSGEALSLLKKRFSHRPVQEKFVCLNCGFETHADEQAALNIARSWLFLRSQEYKKYQTNKTTGNTDKRAFVETWQSFYRKKLKEVWKPAV

SEQ ID NO: 43079 - protein, 978 aa, synthetic construct
  REGION 1..978: note = engineered CasX variant
QEIKRINKIRRRLVKDSNTKKAGKTGPMKTLLVRVMTPDLRERLENLRKKPENIPQPISNTSRANLNKLLTDYTEMKKAILHVYWEEFQKDPVGLMSRVAQPASKKIDQNKLKPEMDEKGNLTTAGFACSQCGQPLFVYKLEQVSEKGKAYTNYFGRCNVAEHEKLILLYQLKPEKDSDEAVTYSLGKFGQRALDFYSIHVTKESTHPVKPLAQIAGNRYASHPVGKALSDACMGTIASFLSKYQDIIIEHQKVVKGNQKRLESLRELAGKENLEYPSVTLPPQPHTKEGVDAYNEVIARVRMWVNLNLWQKLKLSRDDAKPLLRLKGFPSFPLVERQANEVDWWDMVCNVKKLINEKKEDGKVFWQNLAGYKRQEALRPYLSSEEDRKKGKKFARYQLGDLLLHLEKKHGEDWGKVYDEAWERIDKKVEGLSKHIKLEEERRSEDAQSKAALTDWLRAKASFVIEGLKEADKDEFCRCELKLQKWYGDLRGKPFAIEAENSILDISGFSKQYNCAFIWQKDGVKKLNLYLIINYFKGGKLRFKKIKPEAFEANRFYTVINKKSGEIVPMEVNFNFDDPNLIILPLAFGKRQGREFIWNDLLSLETGSLKLANGRVIEKTLYNRRTRQDEPALFVALTFERREVLDSSNIKPMNLIGVDRGENIPAVIALTDPEGCPLSRFKDSLGNPTHILRIGESYKEKQRTIQAKKEVEQRRAGGYSRKYASKAKNLADDMVRNTARDLLYYAVTQDAMLIFENLSRGFGRQGKRTFMAERQYTRMEDWLTAKLAYNGLPSKTYLSKTLAQYTSKTCSNCGFTITSADYDRVLEKLKKTATGWMTTINGKELKVEGQITYYNRYKRQNVVKDLSVELDRLSEESVNNDISSWTKGRSGEALSLLKKRFSHRPVQEKFVCLNCGFETHADEQAALNIARSWLFLRSQEYKKYQTNKTTGNTDKRAFVETWQSFYRKKLKEVWKPAV

SEQ ID NO: 43080 - protein, 978 aa, synthetic construct
  REGION 1..978: note = engineered CasX variant
QEIKRINKIRRRLVKDSNTKKAGKTGPMKTLLVRVMTPDLRERLENLRKKPENIPQPISNTSRANLNKLLTDYTEMKKAILHVYWEEFQKDPVGLMSRVAQPASKKIDQNKLKPEMDEKGNLTTAGFACSQCGQPLFVYKLEQVSEKGKAYTNYFGRCNVAEHEKLILLYQLKPEKDSDEAVTYSLGKFGQRALDFYSIHVTKESTHPVKPLAQIAGNRYASSPVGKALSDACMGTIASFLSKYQDIIIEHQKVVKGNQKRLESLRELAGKENLEYPSVTLPPQPHTKEGVDAYNEVIARVRMWVNLNLWQKLKLSRDDAKPLLRLKGFPSFPLVERQANEVDWWDMVCNVKKLINEKKEDGKVFWQNLAGYKRQEALRPYLSSEEDRKKGKKFARYQLGDLLLHLEKKHGEDWGKVYDEAWERIDKKVEGLSKHIKLEEERRSEDAQSKAALTDWLRAKASFVIEGLKEADKDEFCRCELKLQKWYGDLRGKPFAIEAENSILDISGFSKQYNCAFIWQKDGVKKLNLYLIINYFKGGKLRFKKIKPEAFEANRFYTVINKKSGEIVPMEVNFNFDDPNLIILPLAFGKRQGREFIWNDLLSLETGSLKLANGRVIEKTLYNRRTRQDEPALFVALTFERREVLDSSNIKPMNLIGVDRGENIPAVIALTDPEGCPLSRFKDSLGNPTHILRIGESYKEKQRTIQAKKEVEQRRAGGYSRKYASKAKNLADDMVRNTARDLLYYAVTQDAMLIFENLSRGFGRQGKRTFMAERQYTRMEDWLTAKLAYNGLPSKTYLSKTLAQYTSKTCSNCGFTITSADYDRVLEKLKKTATGWMTTINGKELKVEGQITYYNRYKRQNVVKDLSVELDRLSEESVNNDISSWTKGRSGEALSLLKKRFSHRPVQEKFVCLNCGFETHADEQAALNIARSWLFLRSQEYKKYQTNKTTGNTDKRAFVETWQSFYRKKLKEVWKPAV

SEQ ID NO: 43081 - protein, 978 aa, synthetic construct
  REGION 1..978: note = engineered CasX variant
QEIKRINKIRRRLVKDSNTKKAGKTGPMKTLLVRVMTPDLRERLENLRKKPENIPQPISNTSRANLNKLLTDYTEMKKAILHVYWEEFQKDPVGLMSRVAQPASKKIDQNKLKPEMDEKGNLTTAGFACSQCGQPLFVYKLEQVSEKGKAYTNYFGRCNVAEHEKLILLYQLKPEKDSDEAVTYSLGKFGQRALDFYSIHVTKESTHPVKPLAQIAGNRYASTPVGKALSDACMGTIASFLSKYQDIIIEHQKVVKGNQKRLESLRELAGKENLEYPSVTLPPQPHTKEGVDAYNEVIARVRMWVNLNLWQKLKLSRDDAKPLLRLKGFPSFPLVERQANEVDWWDMVCNVKKLINEKKEDGKVFWQNLAGYKRQEALRPYLSSEEDRKKGKKFARYQLGDLLLHLEKKHGEDWGKVYDEAWERIDKKVEGLSKHIKLEEERRSEDAQSKAALTDWLRAKASFVIEGLKEADKDEFCRCELKLQKWYGDLRGKPFAIEAENSILDISGFSKQYNCAFIWQKDGVKKLNLYLIINYFKGGKLRFKKIKPEAFEANRFYTVINKKSGEIVPMEVNFNFDDPNLIILPLAFGKRQGREFIWNDLLSLETGSLKLANGRVIEKTLYNRRTRQDEPALFVALTFERREVLDSSNIKPMNLIGVDRGENIPAVIALTDPEGCPLSRFKDSLGNPTHILRIGESYKEKQRTIQAKKEVEQRRAGGYSRKYASKAKNLADDMVRNTARDLLYYAVTQDAMLIFENLSRGFGRQGKRTFMAERQYTRMEDWLTAKLAYNGLPSKTYLSKTLAQYTSKTCSNCGFTITSADYDRVLEKLKKTATGWMTTINGKELKVEGQITYYNRYKRQNVVKDLSVELDRLSEESVNNDISSWTKGRSGEALSLLKKRFSHRPVQEKFVCLNCGFETHADEQAALNIARSWLFLRSQEYKKYQTNKTTGNTDKRAFVETWQSFYRKKLKEVWKPAV

SEQ ID NO: 43082 - protein, 978 aa, synthetic construct
  REGION 1..978: note = engineered CasX variant
QEIKRINKIRRRLVKDSNTKKAGKTGPMKTLLVRVMTPDLRERLENLRKKPENIPQPISNTSRANLNKLLTDYTEMKKAILHVYWEEFQKDPVGLMSRVAQPASKKIDQNKLKPEMDEKGNLTTAGFACSQCGQPLFVYKLEQVSEKGKAYTNYFGRCNVAEHEKLILLYQLKPEKDSDEAVTYSLGKFGQRALDFYSIHVTKESTHPVKPLAQIAGNRYASAPVGKALSDACMGTIASFLSKYQDIIIEHQKVVKGNQKRLESLRELAGKENLEYPSVTLPPQPHTKEGVDAYNEVIARVRMWVNLNLWQKLKLSRDDAKPLLRLKGFPSFPLVERQANEVDWWDMVCNVKKLINEKKEDGKVFWQNLAGYKRQEALRPYLSSEEDRKKGKKFARYQLGDLLLHLEKKHGEDWGKVYDEAWERIDKKVEGLSKHIKLEEERRSEDAQSKAALTDWLRAKASFVIEGLKEADKDEFCRCELKLQKWYGDLRGKPFAIEAENSILDISGFSKQYNCAFIWQKDGVKKLNLYLIINYFKGGKLRFKKIKPEAFEANRFYTVINKKSGEIVPMEVNFNFDDPNLIILPLAFGKRQGREFIWNDLLSLETGSLKLANGRVIEKTLYNRRTRQDEPALFVALTFERREVLDSSNIKPMNLIGVDRGENIPAVIALTDPEGCPLSRFKDSLGNPTHILRIGESYKEKQRTIQAKKEVEQRRAGGYSRKYASKAKNLADDMVRNTARDLLYYAVTQDAMLIFENLSRGFGRQGKRTFMAERQYTRMEDWLTAKLAYNGLPSKTYLSKTLAQYTSKTCSNCGFTITSADYDRVLEKLKKTATGWMTTINGKELKVEGQITYYNRYKRQNVVKDLSVELDRLSEESVNNDISSWTKGRSGEALSLLKKRFSHRPVQEKFVCLNCGFETHADEQAALNIARSWLFLRSQEYKKYQTNKTTGNTDKRAFVETWQSFYRKKLKEVWKPAV

SEQ ID NO: 43083 - protein, 978 aa, synthetic construct
  REGION 1..978: note = engineered CasX variant
QEIKRINKIRRRLVKDSNTKKAGKTGPMKTLLVRVMTPDLRERLENLRKKPENIPQPISNTSRANLNKLLTDYTEMKKAILHVYWEEFQKDPVGLMSRVAQPASKKIDQNKLKPEMDEKGNLTTAGFACSQCGQPLFVYKLEQVSEKGKAYTNYFGRCNVAEHEKLILLYQLKPEKDSDEAVTYSLGKFGQRALDFYSIHVTKESTHPVKPLAQIAGNRYASVPVGKALSDACMGTIASFLSKYQDIIIEHQKVVKGNQKRLESLRELAGKENLEYPSVTLPPQPHTKEGVDAYNEVIARVRMWVNLNLWQKLKLSRDDAKPLLRLKGFPSFPLVERQANEVDWWDMVCNVKKLINEKKEDGKVFWQNLAGYKRQEALRPYLSSEEDRKKGKKFARYQLGDLLLHLEKKHGEDWGKVYDEAWERIDKKVEGLSKHIKLEEERRSEDAQSKAALTDWLRAKASFVIEGLKEADKDEFCRCELKLQKWYGDLRGKPFAIEAENSILDISGFSKQYNCAFIWQKDGVKKLNLYLIINYFKGGKLRFKKIKPEAFEANRFYTVINKKSGEIVPMEVNFNFDDPNLIILPLAFGKRQGREFIWNDLLSLETGSLKLANGRVIEKTLYNRRTRQDEPALFVALTFERREVLDSSNIKPMNLIGVDRGENIPAVIALTDPEGCPLSRFKDSLGNPTHILRIGESYKEKQRTIQAKKEVEQRRAGGYSRKYASKAKNLADDMVRNTARDLLYYAVTQDAMLIFENLSRGFGRQGKRTFMAERQYTRMEDWLTAKLAYNGLPSKTYLSKTLAQYTSKTCSNCGFTITSADYDRVLEKLKKTATGWMTTINGKELKVEGQITYYNRYKRQNVVKDLSVELDRLSEESVNNDISSWTKGRSGEALSLLKKRFSHRPVQEKFVCLNCGFETHADEQAALNIARSWLFLRSQEYKKYQTNKTTGNTDKRAFVETWQSFYRKKLKEVWKPAV

SEQ ID NO: 43084 - protein, 978 aa, synthetic construct
  REGION 1..978: note = engineered CasX variant
QEIKRINKIRRRLVKDSNTKKAGKTGPMKTLLVRVMTPDLRERLENLRKKPENIPQPISNTSRANLNKLLTDYTEMKKAILHVYWEEFQKDPVGLMSRVAQPASKKIDQNKLKPEMDEKGNLTTAGFACSQCGQPLFVYKLEQVSEKGKAYTNYFGRCNVAEHEKLIKLYQLKPEKDSDEAVTYSLGKFGQRALDFYSIHVTKESTHPVKPLAQIAGNRYASGPVGKALSDACMGTIASFLSKYQDIIIEHQKVVKGNQKRLESLRELAGKENLEYPSVTLPPQPHTKEGVDAYNEVIARVRMWVNLNLWQKLKLSRDDAKPLLRLKGFPSFPLVERQANEVDWWDMVCNVKKLINEKKEDGKVFWQNLAGYKRQEALRPYLSSEEDRKKGKKFARYQLGDLLLHLEKKHGEDWGKVYDEAWERIDKKVEGLSKHIKLEEERRSEDAQSKAALTDWLRAKASFVIEGLKEADKDEFCRCELKLQKWYGDLRGKPFAIEAENSILDISGFSKQYNCAFIWQKDGVKKLNLYLIINYFKGGKLRFKKIKPEAFEANRFYTVINKKSGEIVPMEVNFNFDDPNLIILPLAFGKRQGREFIWNDLLSLETGSLKLANGRVIEKTLYNRRTRQDEPALFVALTFERREVLDSSNIKPMNLIGVDRGENIPAVIALTDPEGCPLSRFKDSLGNPTHILRIGESYKEKQRTIQAKKEVEQRRAGGYSRKYASKAKNLADDMVRNTARDLLYYAVTQDAMLIFENLSRGFGRQGKRTFMAERQYTRMEDWLTAKLAYNGLPSKTYLSKTLAQYTSKTCSNCGFTITSADYDRVLEKLKKTATGWMTTINGKELKVEGQITYYNRYKRQNVVKDLSVELDRLSEESVNNDISSWTKGRSGEALSLLKKRFSHRPVQEKFVCLNCGFETHADEQAALNIARSWLFLRSQEYKKYQTNKTTGNTDKRAFVETWQSFYRKKLKEVWKPAV

SEQ ID NO: 43085 - protein, 977 aa, synthetic construct
  REGION 1..977: note = engineered CasX variant
QEIKRINKIRRRLVKDSNTKKAGKTGPMKTLLVRVMTPDLRERLENLRKKPENIPQPISNTSRANLNKLLTDYTEMKKAILHVYWEEFQKDPVGLMSRVAQPASKKIDQNKLKPEMDEKGNLTTAGFACSQCGQPLFVYKLEQVSEKGKAYTNYFGRCNVAEHEKLILLYQLKPEKDSDEAVTYSLGKFGQRALDFYSIHVTKESTHPVKPLAQIAGNRYASPVGKALSDACMGTIASFLSKYQDIIIEHQKVVKGNQKRLESLRELAGKENLEYPSVTLPPQPHTKEGVDAYNEVIARVRMWVNLNLWQKLKLSRDDAKPLLRLKGFPSFPLVERQANEVDWWDMVCNVKKLINEKKEDGKVFWQNLAGYKRQEALRPYLSSEEDRKKGKKFARYQLGDLLLHLEKKHGEDWGKVYDEAWERIDKKVEGLSKHIKLEEERRSEDAQSKAALTDWLRAKASFVIEGLKEADKDEFCRCELKLQKWYGDLRGKPFAIEAENSILDISGFSKQYNCAFIWQKDGVKKLNLYLIINYFKGGKLRFKKIKPEAFEANRFYTVINKKSGEIVPMEVNFNFDDPNLIILPLAFGKRQGREFIWNDLLSLETGSLKLANGRVIEKTLYNRRTRQDEPALFVALTFERREVLDSSNIKPMNLIGVDRGENIPAVIALTDPEGCPLSRFKDSLGNPTHILRIGESYKEKQRTIQAKKEVEQRRAGGYSRKYASKAKNLADDMVRNTARDLLYYAVTQDAMLIFENLSRGFGRQGKRTFMAERQYTRMEDWLTAKLAYNGLPSKTYLSKTLAQYTSKTCSNCGFTITSADYDRVLEKLKKTATGWMTTINGKELKVEGQITYYNRYKRQNVVKDLSVELDRLSEESVNNDISSWTKGRSGEALSLLKKRFSHRPVQEKFVCLNCGFETHADEQAALNIARSWLFLRSQEYKKYQTNKTTGNTDKRAFVETWQSFYRKKLKEVWKPAV

SEQ ID NO: 43086 - protein, 978 aa, synthetic construct
  REGION 1..978: note = engineered CasX variant
QEIKRINKIRRRLVKDSNTKKAGKTGPMKTLLVRVMTPDLRERLENLRKKPENIPQPISNTSRANLNKLLTDYTEMKKAILHVYWEEFQKDPVGLMSRVAQPASKKIDQNKLKPEMDEKGNLTTAGFACSQCGQPLFVYKLEQVSEKGKAYTNYFGRCNVAEHEKLIQLYQLKPEKDSDEAVTYSLGKFGQRALDFYSIHVTKESTHPVKPLAQIAGNRYASYPVGKALSDACMGTIASFLSKYQDIIIEHQKVVKGNQKRLESLRELAGKENLEYPSVTLPPQPHTKEGVDAYNEVIARVRMWVNLNLWQKLKLSRDDAKPLLRLKGFPSFPLVERQANEVDWWDMVCNVKKLINEKKEDGKVFWQNLAGYKRQEALRPYLSSEEDRKKGKKFARYQLGDLLLHLEKKHGEDWGKVYDEAWERIDKKVEGLSKHIKLEEERRSEDAQSKAALTDWLRAKASFVIEGLKEADKDEFCRCELKLQKWYGDLRGKPFAIEAENSILDISGFSKQYNCAFIWQKDGVKKLNLYLIINYFKGGKLRFKKIKPEAFEANRFYTVINKKSGEIVPMEVNFNFDDPNLIILPLAFGKRQGREFIWNDLLSLETGSLKLANGRVIEKTLYNRRTRQDEPALFVALTFERREVLDSSNIKPMNLIGVDRGENIPAVIALTDPEGCPLSRFKDSLGNPTHILRIGESYKEKQRTIQAKKEVEQRRAGGYSRKYASKAKNLADDMVRNTARDLLYYAVTQDAMLIFENLSRGFGRQGKRTFMAERQYTRMEDWLTAKLAYEGLPSKTYLSKTLAQYTSKTCSNCGFTITSADYDRVLEKLKKTATGWMTTINGKELKVEGQITYYNRYKRQNVVKDLSVELDRLSEESVNNDISSWTKGRSGEALSLLKKRFSHRPVQEKFVCLNCGFETHADEQAALNIARSWLFLRSQEYKKYQTNKTTGNTDKRAFVETWQSFYRKKLKEVWKPAV

SEQ ID NO: 43087 - protein, 978 aa, synthetic construct
  REGION 1..978: note = engineered CasX variant
QEIKRINKIRRRLVKDSNTKKAGKTGPMKTLLVRVMTPDLRERLENLRKKPENIPQPISNTSRANLNKLLTDYTEMKKAILHVYWEEFQKDPVGLMSRVAQPASKKIDQNKLKPEMDEKGNLTTAGFACSQCGQPLFVYKLEQVSEKGKAYTNYFGRCNVAEHEKLIQLYQLKPEKDSDEAVTYSLGKFGQRALDFYSIHVTKESTHPVKPLAQIAGNRYASHPVGKALSDACMGTIASFLSKYQDIIIEHQKVVKGNQKRLESLRELAGKENLEYPSVTLPPQPHTKEGVDAYNEVIARVRMWVNLNLWQKLKLSRDDAKPLLRLKGFPSFPLVERQANEVDWWDMVCNVKKLINEKKEDGKVFWQNLAGYKRQEALRPYLSSEEDRKKGKKFARYQLGDLLLHLEKKHGEDWGKVYDEAWERIDKKVEGLSKHIKLEEERRSEDAQSKAALTDWLRAKASFVIEGLKEADKDEFCRCELKLQKWYGDLRGKPFAIEAENSILDISGFSKQYNCAFIWQKDGVKKLNLYLIINYFKGGKLRFKKIKPEAFEANRFYTVINKKSGEIVPMEVNFNFDDPNLIILPLAFGKRQGREFIWNDLLSLETGSLKLANGRVIEKTLYNRRTRQDEPALFVALTFERREVLDSSNIKPMNLIGVDRGENIPAVIALTDPEGCPLSRFKDSLGNPTHILRIGESYKEKQRTIQAKKEVEQRRAGGYSRKYASKAKNLADDMVRNTARDLLYYAVTQDAMLIFENLSRGFGRQGKRTFMAERQYTRMEDWLTAKLAYEGLPSKTYLSKTLAQYTSKTCSNCGFTITSADYDRVLEKLKKTATGWMTTINGKELKVEGQITYYNRYKRQNVVKDLSVELDRLSEESVNNDISSWTKGRSGEALSLLKKRFSHRPVQEKFVCLNCGFETHADEQAALNIARSWLFLRSQEYKKYQTNKTTGNTDKRAFVETWQSFYRKKLKEVWKPAV

SEQ ID NO: 43088 - protein, 978 aa, synthetic construct
  REGION 1..978: note = engineered CasX variant
QEIKRINKIRRRLVKDSNTKKAGKTGPMKTLLVRVMTPDLRERLENLRKKPENIPQPISNTSRANLNKLLTDYTEMKKAILHVYWEEFQKDPVGLMSRVAQPASKKIDQNKLKPEMDEKGNLTTAGFACSQCGQPLFVYKLEQVSEKGKAYTNYFGRCNVAEHEKLIQLYQLKPEKDSDEAVTYSLGKFGQRALDFYSIHVTKESTHPVKPLAQIAGNRYASSPVGKALSDACMGTIASFLSKYQDIIIEHQKVVKGNQKRLESLRELAGKENLEYPSVTLPPQPHTKEGVDAYNEVIARVRMWVNLNLWQKLKLSRDDAKPLLRLKGFPSFPLVERQANEVDWWDMVCNVKKLINEKKEDGKVFWQNLAGYKRQEALRPYLSSEEDRKKGKKFARYQLGDLLLHLEKKHGEDWGKVYDEAWERIDKKVEGLSKHIKLEEERRSEDAQSKAALTDWLRAKASFVIEGLKEADKDEFCRCELKLQKWYGDLRGKPFAIEAENSILDISGFSKQYNCAFIWQKDGVKKLNLYLIINYFKGGKLRFKKIKPEAFEANRFYTVINKKSGEIVPMEVNFNFDDPNLIILPLAFGKRQGREFIWNDLLSLETGSLKLANGRVIEKTLYNRRTRQDEPALFVALTFERREVLDSSNIKPMNLIGVDRGENIPAVIALTDPEGCPLSRFKDSLGNPTHILRIGESYKEKQRTIQAKKEVEQRRAGGYSRKYASKAKNLADDMVRNTARDLLYYAVTQDAMLIFENLSRGFGRQGKRTFMAERQYTRMEDWLTAKLAYEGLPSKTYLSKTLAQYTSKTCSNCGFTITSADYDRVLEKLKKTATGWMTTINGKELKVEGQITYYNRYKRQNVVKDLSVELDRLSEESVNNDISSWTKGRSGEALSLLKKRFSHRPVQEKFVCLNCGFETHADEQAALNIARSWLFLRSQEYKKYQTNKTTGNTDKRAFVETWQSFYRKKLKEVWKPAV

SEQ ID NO: 43089 - protein, 978 aa, synthetic construct
  REGION 1..978: note = engineered CasX variant
QEIKRINKIRRRLVKDSNTKKAGKTGPMKTLLVRVMTPDLRERLENLRKKPENIPQPISNTSRANLNKLLTDYTEMKKAILHVYWEEFQKDPVGLMSRVAQPASKKIDQNKLKPEMDEKGNLTTAGFACSQCGQPLFVYKLEQVSEKGKAYTNYFGRCNVAEHEKLIQLYQLKPEKDSDEAVTYSLGKFGQRALDFYSIHVTKESTHPVKPLAQIAGNRYASTPVGKALSDACMGTIASFLSKYQDIIIEHQKVVKGNQKRLESLRELAGKENLEYPSVTLPPQPHTKEGVDAYNEVIARVRMWVNLNLWQKLKLSRDDAKPLLRLKGFPSFPLVERQANEVDWWDMVCNVKKLINEKKEDGKVFWQNLAGYKRQEALRPYLSSEEDRKKGKKFARYQLGDLLLHLEKKHGEDWGKVYDEAWERIDKKVEGLSKHIKLEEERRSEDAQSKAALTDWLRAKASFVIEGLKEADKDEFCRCELKLQKWYGDLRGKPFAIEAENSILDISGFSKQYNCAFIWQKDGVKKLNLYLIINYFKGGKLRFKKIKPEAFEANRFYTVINKKSGEIVPMEVNFNFDDPNLIILPLAFGKRQGREFIWNDLLSLETGSLKLANGRVIEKTLYNRRTRQDEPALFVALTFERREVLDSSNIKPMNLIGVDRGENIPAVIALTDPEGCPLSRFKDSLGNPTHILRIGESYKEKQRTIQAKKEVEQRRAGGYSRKYASKAKNLADDMVRNTARDLLYYAVTQDAMLIFENLSRGFGRQGKRTFMAERQYTRMEDWLTAKLAYEGLPSKTYLSKTLAQYTSKTCSNCGFTITSADYDRVLEKLKKTATGWMTTINGKELKVEGQITYYNRYKRQNVVKDLSVELDRLSEESVNNDISSWTKGRSGEALSLLKKRFSHRPVQEKFVCLNCGFETHADEQAALNIARSWLFLRSQEYKKYQTNKTTGNTDKRAFVETWQSFYRKKLKEVWKPAV

SEQ ID NO: 43090 - protein, 978 aa, synthetic construct
  REGION 1..978: note = engineered CasX variant
QEIKRINKIRRRLVKDSNTKKAGKTGPMKTLLVRVMTPDLRERLENLRKKPENIPQPISNTSRANLNKLLTDYTEMKKAILHVYWEEFQKDPVGLMSRVAQPASKKIDQNKLKPEMDEKGNLTTAGFACSQCGQPLFVYKLEQVSEKGKAYTNYFGRCNVAEHEKLIQLYQLKPEKDSDEAVTYSLGKFGQRALDFYSIHVTKESTHPVKPLAQIAGNRYASAPVGKALSDACMGTIASFLSKYQDIIIEHQKVVKGNQKRLESLRELAGKENLEYPSVTLPPQPHTKEGVDAYNEVIARVRMWVNLNLWQKLKLSRDDAKPLLRLKGFPSFPLVERQANEVDWWDMVCNVKKLINEKKEDGKVFWQNLAGYKRQEALRPYLSSEEDRKKGKKFARYQLGDLLLHLEKKHGEDWGKVYDEAWERIDKKVEGLSKHIKLEEERRSEDAQSKAALTDWLRAKASFVIEGLKEADKDEFCRCELKLQKWYGDLRGKPFAIEAENSILDISGFSKQYNCAFIWQKDGVKKLNLYLIINYFKGGKLRFKKIKPEAFEANRFYTVINKKSGEIVPMEVNFNFDDPNLIILPLAFGKRQGREFIWNDLLSLETGSLKLANGRVIEKTLYNRRTRQDEPALFVALTFERREVLDSSNIKPMNLIGVDRGENIPAVIALTDPEGCPLSRFKDSLGNPTHILRIGESYKEKQRTIQAKKEVEQRRAGGYSRKYASKAKNLADDMVRNTARDLLYYAVTQDAMLIFENLSRGFGRQGKRTFMAERQYTRMEDWLTAKLAYEGLPSKTYLSKTLAQYTSKTCSNCGFTITSADYDRVLEKLKKTATGWMTTINGKELKVEGQITYYNRYKRQNVVKDLSVELDRLSEESVNNDISSWTKGRSGEALSLLKKRFSHRPVQEKFVCLNCGFETHADEQAALNIARSWLFLRSQEYKKYQTNKTTGNTDKRAFVETWQSFYRKKLKEVWKPAV

SEQ ID NO: 43091 - protein, 978 aa, synthetic construct
  REGION 1..978: note = engineered CasX variant
QEIKRINKIRRRLVKDSNTKKAGKTGPMKTLLVRVMTPDLRERLENLRKKPENIPQPISNTSRANLNKLLTDYTEMKKAILHVYWEEFQKDPVGLMSRVAQPASKKIDQNKLKPEMDEKGNLTTAGFACSQCGQPLFVYKLEQVSEKGKAYTNYFGRCNVAEHEKLIQLYQLKPEKDSDEAVTYSLGKFGQRALDFYSIHVTKESTHPVKPLAQIAGNRYASVPVGKALSDACMGTIASFLSKYQDIIIEHQKVVKGNQKRLESLRELAGKENLEYPSVTLPPQPHTKEGVDAYNEVIARVRMWVNLNLWQKLKLSRDDAKPLLRLKGFPSFPLVERQANEVDWWDMVCNVKKLINEKKEDGKVFWQNLAGYKRQEALRPYLSSEEDRKKGKKFARYQLGDLLLHLEKKHGEDWGKVYDEAWERIDKKVEGLSKHIKLEEERRSEDAQSKAALTDWLRAKASFVIEGLKEADKDEFCRCELKLQKWYGDLRGKPFAIEAENSILDISGFSKQYNCAFIWQKDGVKKLNLYLIINYFKGGKLRFKKIKPEAFEANRFYTVINKKSGEIVPMEVNFNFDDPNLIILPLAFGKRQGREFIWNDLLSLETGSLKLANGRVIEKTLYNRRTRQDEPALFVALTFERREVLDSSNIKPMNLIGVDRGENIPAVIALTDPEGCPLSRFKDSLGNPTHILRIGESYKEKQRTIQAKKEVEQRRAGGYSRKYASKAKNLADDMVRNTARDLLYYAVTQDAMLIFENLSRGFGRQGKRTFMAERQYTRMEDWLTAKLAYEGLPSKTYLSKTLAQYTSKTCSNCGFTITSADYDRVLEKLKKTATGWMTTINGKELKVEGQITYYNRYKRQNVVKDLSVELDRLSEESVNNDISSWTKGRSGEALSLLKKRFSHRPVQEKFVCLNCGFETHADEQAALNIARSWLFLRSQEYKKYQTNKTTGNTDKRAFVETWQSFYRKKLKEVWKPAV

SEQ ID NO: 43092 - protein, 979 aa, synthetic construct
  REGION 1..979: note = engineered CasX variant
QEIKRINKIRRRLVKDSNTKKAGKTGPMKTLLVRVMTPDLRERLENLRKKPENIPQPISNTSRANLNKLLTDYTEMKKAILHVYWEEFQKDPVGLMSRVAQPASKKIDQNKLKPEMDEKGNLTTAGFACSQCGQPLFVYKLEQVSEKGKAYTNYFGRCNVAEHEKLIQKLYQLKPEKDSDEAVTYSLGKFGQRALDFYSIHVTKESTHPVKPLAQIAGNRYASGPVGKALSDACMGTIASFLSKYQDIIIEHQKVVKGNQKRLESLRELAGKENLEYPSVTLPPQPHTKEGVDAYNEVIARVRMWVNLNLWQKLKLSRDDAKPLLRLKGFPSFPLVERQANEVDWWDMVCNVKKLINEKKEDGKVFWQNLAGYKRQEALRPYLSSEEDRKKGKKFARYQLGDLLLHLEKKHGEDWGKVYDEAWERIDKKVEGLSKHIKLEEERRSEDAQSKAALTDWLRAKASFVIEGLKEADKDEFCRCELKLQKWYGDLRGKPFAIEAENSILDISGFSKQYNCAFIWQKDGVKKLNLYLIINYFKGGKLRFKKIKPEAFEANRFYTVINKKSGEIVPMEVNFNFDDPNLIILPLAFGKRQGREFIWNDLLSLETGSLKLANGRVIEKTLYNRRTRQDEPALFVALTFERREVLDSSNIKPMNLIGVDRGENIPAVIALTDPEGCPLSRFKDSLGNPTHILRIGESYKEKQRTIQAKKEVEQRRAGGYSRKYASKAKNLADDMVRNTARDLLYYAVTQDAMLIFENLSRGFGRQGKRTFMAERQYTRMEDWLTAKLAYEGLPSKTYLSKTLAQYTSKTCSNCGFTITSADYDRVLEKLKKTATGWMTTINGKELKVEGQITYYNRYKRQNVVKDLSVELDRLSEESVNNDISSWTKGRSGEALSLLKKRFSHRPVQEKFVCLNCGFETHADEQAALNIARSWLFLRSQEYKKYQTNKTTGNTDKRAFVETWQSFYRKKLKEVWKPAV

SEQ ID NO: 43093 - protein, 977 aa, synthetic construct
  REGION 1..977: note = engineered CasX variant
QEIKRINKIRRRLVKDSNTKKAGKTGPMKTLLVRVMTPDLRERLENLRKKPENIPQPISNTSRANLNKLLTDYTEMKKAILHVYWEEFQKDPVGLMSRVAQPASKKIDQNKLKPEMDEKGNLTTAGFACSQCGQPLFVYKLEQVSEKGKAYTNYFGRCNVAEHEKLIQLYQLKPEKDSDEAVTYSLGKFGQRALDFYSIHVTKESTHPVKPLAQIAGNRYASPVGKALSDACMGTIASFLSKYQDIIIEHQKVVKGNQKRLESLRELAGKENLEYPSVTLPPQPHTKEGVDAYNEVIARVRMWVNLNLWQKLKLSRDDAKPLLRLKGFPSFPLVERQANEVDWWDMVCNVKKLINEKKEDGKVFWQNLAGYKRQEALRPYLSSEEDRKKGKKFARYQLGDLLLHLEKKHGEDWGKVYDEAWERIDKKVEGLSKHIKLEEERRSEDAQSKAALTDWLRAKASFVIEGLKEADKDEFCRCELKLQKWYGDLRGKPFAIEAENSILDISGFSKQYNCAFIWQKDGVKKLNLYLIINYFKGGKLRFKKIKPEAFEANRFYTVINKKSGEIVPMEVNFNFDDPNLIILPLAFGKRQGREFIWNDLLSLETGSLKLANGRVIEKTLYNRRTRQDEPALFVALTFERREVLDSSNIKPMNLIGVDRGENIPAVIALTDPEGCPLSRFKDSLGNPTHILRIGESYKEKQRTIQAKKEVEQRRAGGYSRKYASKAKNLADDMVRNTARDLLYYAVTQDAMLIFENLSRGFGRQGKRTFMAERQYTRMEDWLTAKLAYEGLPSKTYLSKTLAQYTSKTCSNCGFTITSADYDRVLEKLKKTATGWMTTINGKELKVEGQITYYNRYKRQNVVKDLSVELDRLSEESVNNDISSWTKGRSGEALSLLKKRFSHRPVQEKFVCLNCGFETHADEQAALNIARSWLFLRSQEYKKYQTNKTTGNTDKRAFVETWQSFYRKKLKEVWKPAV

SEQ ID NO: 43094 - protein, 978 aa, synthetic construct
  REGION 1..978: note = engineered CasX variant
QEIKRINKIRRRLVKDSNTKKAGKTGPMKTLLVRVMTPDLRERLENLRKKPENIPQPISNTSRANLNKLLTDYTEMKKAILHVYWEEFQKDPVGLMSRVAQPASKKIDQNKLKPEMDEKGNLTTAGFACSQCGQPLFVYKLEQVSEKGKAYTNYFGRCNVAEHEKLILLYQLKPEKDSDEAVTYSLGKFGQRALDFYSIHVTKESTHPVKPLAQIAGNRYASYPVGKALSDACMGTIASFLSKYQDIIIEHQKVVKGNQKRLESLRELAGKENLEYPSVTLPPQPHTKEGVDAYNEVIARVRMWVNLNLWQKLKLSRDDAKPLLRLKGFPSFPLVERQANEVDWWDMVCNVKKLINEKKEDGKVFWQNLAIYKRQEALRPYLSSEEDRKKGKKFARYQLGDLLLHLEKKHGEDWGKVYDEAWERIDKKVEGLSKHIKLEEERRSEDAQSKAALTDWLRAKASFVIEGLKEADKDEFCRCELKLQKWYGDLRGKPFAIEAENSILDISGFSKQYNCAFIWQKDGVKKLNLYLIINYFKGGKLRFKKIKPEAFEANRFYTVINKKSGEIVPMEVNFNFDDPNLIILPLAFGKRQGREFIWNDLLSLETGSLKLANGRVIEKTLYNRRTRQDEPALFVALTFERREVLDSSNIKPMNLIGVDRGENIPAVIALTDPEGCPLSRFKDSLGNPTHILRIGESYKEKQRTIQAKKEVEQRRAGGYSRKYASKAKNLADDMVRNTARDLLYYAVTQDAMLIFENLSRGFGRQGKRTFMAERQYTRMEDWLTAKLAYEGLPSKTYLSKTLAQYTSKTCSNCGFTITSADYDRVLEKLKKTATGWMTTINGKELKVEGQITYYNRYKRQNVVKDLSVELDRLSEESVNNDISSWTKGRSGEALSLLKKRFSHRPVQEKFVCLNCGFETHADEQAALNIARSWLFLRSQEYKKYQTNKTTGNTDKRAFVETWQSFYRKKLKEVWKPAV

SEQ ID NO: 43095 - protein, 978 aa, synthetic construct
  REGION 1..978: note = engineered CasX variant
QEIKRINKIRRRLVKDSNTKKAGKTGPMKTLLVRVMTPDLRERLENLRKKPENIPQPISNTSRANLNKLLTDYTEMKKAILHVYWEEFQKDPVGLMSRVAQPASKKIDQNKLKPEMDEKGNLTTAGFACSQCGQPLFVYKLEQVSEKGKAYTNYFGRCNVAEHEKLILLYQLKPEKDSDEAVTYSLGKFGQRALDFYSIHVTKESTHPVKPLAQIAGNRYASHPVGKALSDACMGTIASFLSKYQDIIIEHQKVVKGNQKRLESLRELAGKENLEYPSVTLPPQPHTKEGVDAYNEVIARVRMWVNLNLWQKLKLSRDDAKPLLRLKGFPSFPLVERQANEVDWWDMVCNVKKLINEKKEDGKVFWQNLAIYKRQEALRPYLSSEEDRKKGKKFARYQLGDLLLHLEKKHGEDWGKVYDEAWERIDKKVEGLSKHIKLEEERRSEDAQSKAALTDWLRAKASFVIEGLKEADKDEFCRCELKLQKWYGDLRGKPFAIEAENSILDISGFSKQYNCAFIWQKDGVKKLNLYLIINYFKGGKLRFKKIKPEAFEANRFYTVINKKSGEIVPMEVNFNFDDPNLIILPLAFGKRQGREFIWNDLLSLETGSLKLANGRVIEKTLYNRRTRQDEPALFVALTFERREVLDSSNIKPMNLIGVDRGENIPAVIALTDPEGCPLSRFKDSLGNPTHILRIGESYKEKQRTIQAKKEVEQRRAGGYSRKYASKAKNLADDMVRNTARDLLYYAVTQDAMLIFENLSRGFGRQGKRTFMAERQYTRMEDWLTAKLAYEGLPSKTYLSKTLAQYTSKTCSNCGFTITSADYDRVLEKLKKTATGWMTTINGKELKVEGQITYYNRYKRQNVVKDLSVELDRLSEESVNNDISSWTKGRSGEALSLLKKRFSHRPVQEKFVCLNCGFETHADEQAALNIARSWLFLRSQEYKKYQTNKTTGNTDKRAFVETWQSFYRKKLKEVWKPAV

SEQ ID NO: 43096 - protein, 978 aa, synthetic construct
  REGION 1..978: note = engineered CasX variant
QEIKRINKIRRRLVKDSNTKKAGKTGPMKTLLVRVMTPDLRERLENLRKKPENIPQPISNTSRANLNKLLTDYTEMKKAILHVYWEEFQKDPVGLMSRVAQPASKKIDQNKLKPEMDEKGNLTTAGFACSQCGQPLFVYKLEQVSEKGKAYTNYFGRCNVAEHEKLILLYQLKPEKDSDEAVTYSLGKFGQRALDFYSIHVTKESTHPVKPLAQIAGNRYASSPVGKALSDACMGTIASFLSKYQDIIIEHQKVVKGNQKRLESLRELAGKENLEYPSVTLPPQPHTKEGVDAYNEVIARVRMWVNLNLWQKLKLSRDDAKPLLRLKGFPSFPLVERQANEVDWWDMVCNVKKLINEKKEDGKVFWQNLAIYKRQEALRPYLSSEEDRKKGKKFARYQLGDLLLHLEKKHGEDWGKVYDEAWERIDKKVEGLSKHIKLEEERRSEDAQSKAALTDWLRAKASFVIEGLKEADKDEFCRCELKLQKWYGDLRGKPFAIEAENSILDISGFSKQYNCAFIWQKDGVKKLNLYLIINYFKGGKLRFKKIKPEAFEANRFYTVINKKSGEIVPMEVNFNFDDPNLIILPLAFGKRQGREFIWNDLLSLETGSLKLANGRVIEKTLYNRRTRQDEPALFVALTFERREVLDSSNIKPMNLIGVDRGENIPAVIALTDPEGCPLSRFKDSLGNPTHILRIGESYKEKQRTIQAKKEVEQRRAGGYSRKYASKAKNLADDMVRNTARDLLYYAVTQDAMLIFENLSRGFGRQGKRTFMAERQYTRMEDWLTAKLAYEGLPSKTYLSKTLAQYTSKTCSNCGFTITSADYDRVLEKLKKTATGWMTTINGKELKVEGQITYYNRYKRQNVVKDLSVELDRLSEESVNNDISSWTKGRSGEALSLLKKRFSHRPVQEKFVCLNCGFETHADEQAALNIARSWLFLRSQEYKKYQTNKTTGNTDKRAFVETWQSFYRKKLKEVWKPAV

SEQ ID NO: 43097 - protein, 978 aa, synthetic construct
  REGION 1..978: note = engineered CasX variant
QEIKRINKIRRRLVKDSNTKKAGKTGPMKTLLVRVMTPDLRERLENLRKKPENIPQPISNTSRANLNKLLTDYTEMKKAILHVYWEEFQKDPVGLMSRVAQPASKKIDQNKLKPEMDEKGNLTTAGFACSQCGQPLFVYKLEQVSEKGKAYTNYFGRCNVAEHEKLILLYQLKPEKDSDEAVTYSLGKFGQRALDFYSIHVTKESTHPVKPLAQIAGNRYASTPVGKALSDACMGTIASFLSKYQDIIIEHQKVVKGNQKRLESLRELAGKENLEYPSVTLPPQPHTKEGVDAYNEVIARVRMWVNLNLWQKLKLSRDDAKPLLRLKGFPSFPLVERQANEVDWWDMVCNVKKLINEKKEDGKVFWQNLAIYKRQEALRPYLSSEEDRKKGKKFARYQLGDLLLHLEKKHGEDWGKVYDEAWERIDKKVEGLSKHIKLEEERRSEDAQSKAALTDWLRAKASFVIEGLKEADKDEFCRCELKLQKWYGDLRGKPFAIEAENSILDISGFSKQYNCAFIWQKDGVKKLNLYLIINYFKGGKLRFKKIKPEAFEANRFYTVINKKSGEIVPMEVNFNFDDPNLIILPLAFGKRQGREFIWNDLLSLETGSLKLANGRVIEKTLYNRRTRQDEPALFVALTFERREVLDSSNIKPMNLIGVDRGENIPAVIALTDPEGCPLSRFKDSLGNPTHILRIGESYKEKQRTIQAKKEVEQRRAGGYSRKYASKAKNLADDMVRNTARDLLYYAVTQDAMLIFENLSRGFGRQGKRTFMAERQYTRMEDWLTAKLAYEGLPSKTYLSKTLAQYTSKTCSNCGFTITSADYDRVLEKLKKTATGWMTTINGKELKVEGQITYYNRYKRQNVVKDLSVELDRLSEESVNNDISSWTKGRSGEALSLLKKRFSHRPVQEKFVCLNCGFETHADEQAALNIARSWLFLRSQEYKKYQTNKTTGNTDKRAFVETWQSFYRKKLKEVWKPAV

SEQ ID NO: 43098 - protein, 978 aa, synthetic construct
  REGION 1..978: note = engineered CasX variant
QEIKRINKIRRRLVKDSNTKKAGKTGPMKTLLVRVMTPDLRERLENLRKKPENIPQPISNTSRANLNKLLTDYTEMKKAILHVYWEEFQKDPVGLMSRVAQPASKKIDQNKLKPEMDEKGNLTTAGFACSQCGQPLFVYKLEQVSEKGKAYTNYFGRCNVAEHEKLILLYQLKPEKDSDEAVTYSLGKFGQRALDFYSIHVTKESTHPVKPLAQIAGNRYASAPVGKALSDACMGTIASFLSKYQDIIIEHQKVVKGNQKRLESLRELAGKENLEYPSVTLPPQPHTKEGVDAYNEVIARVRMWVNLNLWQKLKLSRDDAKPLLRLKGFPSFPLVERQANEVDWWDMVCNVKKLINEKKEDGKVFWQNLAIYKRQEALRPYLSSEEDRKKGKKFARYQLGDLLLHLEKKHGEDWGKVYDEAWERIDKKVEGLSKHIKLEEERRSEDAQSKAALTDWLRAKASFVIEGLKEADKDEFCRCELKLQKWYGDLRGKPFAIEAENSILDISGFSKQYNCAFIWQKDGVKKLNLYLIINYFKGGKLRFKKIKPEAFEANRFYTVINKKSGEIVPMEVNFNFDDPNLIILPLAFGKRQGREFIWNDLLSLETGSLKLANGRVIEKTLYNRRTRQDEPALFVALTFERREVLDSSNIKPMNLIGVDRGENIPAVIALTDPEGCPLSRFKDSLGNPTHILRIGESYKEKQRTIQAKKEVEQRRAGGYSRKYASKAKNLADDMVRNTARDLLYYAVTQDAMLIFENLSRGFGRQGKRTFMAERQYTRMEDWLTAKLAYEGLPSKTYLSKTLAQYTSKTCSNCGFTITSADYDRVLEKLKKTATGWMTTINGKELKVEGQITYYNRYKRQNVVKDLSVELDRLSEESVNNDISSWTKGRSGEALSLLKKRFSHRPVQEKFVCLNCGFETHADEQAALNIARSWLFLRSQEYKKYQTNKTTGNTDKRAFVETWQSFYRKKLKEVWKPAV

SEQ ID NO: 43099 - protein, 978 aa, synthetic construct
  REGION 1..978: note = engineered CasX variant
QEIKRINKIRRRLVKDSNTKKAGKTGPMKTLLVRVMTPDLRERLENLRKKPENIPQPISNTSRANLNKLLTDYTEMKKAILHVYWEEFQKDPVGLMSRVAQPASKKIDQNKLKPEMDEKGNLTTAGFACSQCGQPLFVYKLEQVSEKGKAYTNYFGRCNVAEHEKLILLYQLKPEKDSDEAVTYSLGKFGQRALDFYSIHVTKESTHPVKPLAQIAGNRYASVPVGKALSDACMGTIASFLSKYQDIIIEHQKVVKGNQKRLESLRELAGKENLEYPSVTLPPQPHTKEGVDAYNEVIARVRMWVNLNLWQKLKLSRDDAKPLLRLKGFPSFPLVERQANEVDWWDMVCNVKKLINEKKEDGKVFWQNLAIYKRQEALRPYLSSEEDRKKGKKFARYQLGDLLLHLEKKHGEDWGKVYDEAWERIDKKVEGLSKHIKLEEERRSEDAQSKAALTDWLRAKASFVIEGLKEADKDEFCRCELKLQKWYGDLRGKPFAIEAENSILDISGFSKQYNCAFIWQKDGVKKLNLYLIINYFKGGKLRFKKIKPEAFEANRFYTVINKKSGEIVPMEVNFNFDDPNLIILPLAFGKRQGREFIWNDLLSLETGSLKLANGRVIEKTLYNRRTRQDEPALFVALTFERREVLDSSNIKPMNLIGVDRGENIPAVIALTDPEGCPLSRFKDSLGNPTHILRIGESYKEKQRTIQAKKEVEQRRAGGYSRKYASKAKNLADDMVRNTARDLLYYAVTQDAMLIFENLSRGFGRQGKRTFMAERQYTRMEDWLTAKLAYEGLPSKTYLSKTLAQYTSKTCSNCGFTITSADYDRVLEKLKKTATGWMTTINGKELKVEGQITYYNRYKRQNVVKDLSVELDRLSEESVNNDISSWTKGRSGEALSLLKKRFSHRPVQEKFVCLNCGFETHADEQAALNIARSWLFLRSQEYKKYQTNKTTGNTDKRAFVETWQSFYRKKLKEVWKPAV

SEQ ID NO: 43100 - protein, 978 aa, synthetic construct
  REGION 1..978: note = engineered CasX variant
QEIKRINKIRRRLVKDSNTKKAGKTGPMKTLLVRVMTPDLRERLENLRKKPENIPQPISNTSRANLNKLLTDYTEMKKAILHVYWEEFQKDPVGLMSRVAQPASKKIDQNKLKPEMDEKGNLTTAGFACSQCGQPLFVYKLEQVSEKGKAYTNYFGRCNVAEHEKLIKLYQLKPEKDSDEAVTYSLGKFGQRALDFYSIHVTKESTHPVKPLAQIAGNRYASGPVGKALSDACMGTIASFLSKYQDIIIEHQKVVKGNQKRLESLRELAGKENLEYPSVTLPPQPHTKEGVDAYNEVIARVRMWVNLNLWQKLKLSRDDAKPLLRLKGFPSFPLVERQANEVDWWDMVCNVKKLINEKKEDGKVFWQNLAIYKRQEALRPYLSSEEDRKKGKKFARYQLGDLLLHLEKKHGEDWGKVYDEAWERIDKKVEGLSKHIKLEEERRSEDAQSKAALTDWLRAKASFVIEGLKEADKDEFCRCELKLQKWYGDLRGKPFAIEAENSILDISGFSKQYNCAFIWQKDGVKKLNLYLIINYFKGGKLRFKKIKPEAFEANRFYTVINKKSGEIVPMEVNFNFDDPNLIILPLAFGKRQGREFIWNDLLSLETGSLKLANGRVIEKTLYNRRTRQDEPALFVALTFERREVLDSSNIKPMNLIGVDRGENIPAVIALTDPEGCPLSRFKDSLGNPTHILRIGESYKEKQRTIQAKKEVEQRRAGGYSRKYASKAKNLADDMVRNTARDLLYYAVTQDAMLIFENLSRGFGRQGKRTFMAERQYTRMEDWLTAKLAYEGLPSKTYLSKTLAQYTSKTCSNCGFTITSADYDRVLEKLKKTATGWMTTINGKELKVEGQITYYNRYKRQNVVKDLSVELDRLSEESVNNDISSWTKGRSGEALSLLKKRFSHRPVQEKFVCLNCGFETHADEQAALNIARSWLFLRSQEYKKYQTNKTTGNTDKRAFVETWQSFYRKKLKEVWKPAV

SEQ ID NO: 43101 - protein, 977 aa, synthetic construct
  REGION 1..977: note = engineered CasX variant
QEIKRINKIRRRLVKDSNTKKAGKTGPMKTLLVRVMTPDLRERLENLRKKPENIPQPISNTSRANLNKLLTDYTEMKKAILHVYWEEFQKDPVGLMSRVAQPASKKIDQNKLKPEMDEKGNLTTAGFACSQCGQPLFVYKLEQVSEKGKAYTNYFGRCNVAEHEKLILLYQLKPEKDSDEAVTYSLGKFGQRALDFYSIHVTKESTHPVKPLAQIAGNRYASPVGKALSDACMGTIASFLSKYQDIIIEHQKVVKGNQKRLESLRELAGKENLEYPSVTLPPQPHTKEGVDAYNEVIARVRMWVNLNLWQKLKLSRDDAKPLLRLKGFPSFPLVERQANEVDWWDMVCNVKKLINEKKEDGKVFWQNLAIYKRQEALRPYLSSEEDRKKGKKFARYQLGDLLLHLEKKHGEDWGKVYDEAWERIDKKVEGLSKHIKLEEERRSEDAQSKAALTDWLRAKASFVIEGLKEADKDEFCRCELKLQKWYGDLRGKPFAIEAENSILDISGFSKQYNCAFIWQKDGVKKLNLYLIINYFKGGKLRFKKIKPEAFEANRFYTVINKKSGEIVPMEVNFNFDDPNLIILPLAFGKRQGREFIWNDLLSLETGSLKLANGRVIEKTLYNRRTRQDEPALFVALTFERREVLDSSNIKPMNLIGVDRGENIPAVIALTDPEGCPLSRFKDSLGNPTHILRIGESYKEKQRTIQAKKEVEQRRAGGYSRKYASKAKNLADDMVRNTARDLLYYAVTQDAMLIFENLSRGFGRQGKRTFMAERQYTRMEDWLTAKLAYEGLPSKTYLSKTLAQYTSKTCSNCGFTITSADYDRVLEKLKKTATGWMTTINGKELKVEGQITYYNRYKRQNVVKDLSVELDRLSEESVNNDISSWTKGRSGEALSLLKKRFSHRPVQEKFVCLNCGFETHADEQAALNIARSWLFLRSQEYKKYQTNKTTGNTDKRAFVETWQSFYRKKLKEVWKPAV

SEQ ID NO: 43102 - protein, 978 aa, synthetic construct
  REGION 1..978: note = engineered CasX variant
QEIKRINKIRRRLVKDSNTKKAGKTGPMKTLLVRVMTPDLRERLENLRKKPENIPQPISNTSRANLNKLLTDYTEMKKAILHVYWEEFQKDPVGLMSRVAQPASKKIDQNKLKPEMDEKGNLTTAGFACSQCGQPLFVYKLEQVSEKGKAYTNYFGRCNVAEHEKLILLYQLKPEKDSDEAVTYSLGKFGQRALDFYSIHVTKESTHPVKPLAQIAGNRYASYPVGKALSDACMGTIASFLSKYQDIIIEHQKVVKGNQKRLESLRELAGKENLEYPSVTLPPQPHTKEGVDAYNEVIARVRMWVNLNLWQKLKLSRDDAKPLLRLKGFPSFPLVERQANEVDWWDMVCNVKKLINEKKEDGKVFWQNLAGYKRQEALRPYLSSEEDREKGKKFARYQLGDLLLHLEKKHGEDWGKVYDEAWERIDKKVEGLSKHIKLEEERRSEDAQSKAALTDWLRAKASFVIEGLKEADKDEFCRCELKLQKWYGDLRGKPFAIEAENSILDISGFSKQYNCAFIWQKDGVKKLNLYLIINYFKGGKLRFKKIKPEAFEANRFYTVINKKSGEIVPMEVNFNFDDPNLIILPLAFGKRQGREFIWNDLLSLETGSLKLANGRVIEKTLYNRRTRQDEPALFVALTFERREVLDSSNIKPMNLIGVDRGENIPAVIALTDPEGCPLSRFKDSLGNPTHILRIGESYKEKQRTIQAKKEVEQRRAGGYSRKYASKAKNLADDMVRNTARDLLYYAVTQDAMLIFENLSRGFGRQGKRTFMAERQYTRMEDWLTAKLAYEGLPSKTYLSKTLAQYTSKTCSNCGFTITSADYDRVLEKLKKTATGWMTTINGKELKVEGQITYYNRYKRQNVVKDLSVELDRLSEESVNNDISSWTKGRSGEALSLLKKRFSHRPVQEKFVCLNCGFETHADEQAALNIARSWLFLRSQEYKKYQTNKTTGNTDKRAFVETWQSFYRKKLKEVWKPAV

SEQ ID NO: 43103 - protein, 978 aa, synthetic construct
  REGION 1..978: note = engineered CasX variant
QEIKRINKIRRRLVKDSNTKKAGKTGPMKTLLVRVMTPDLRERLENLRKKPENIPQPISNTSRANLNKLLTDYTEMKKAILHVYWEEFQKDPVGLMSRVAQPASKKIDQNKLKPEMDEKGNLTTAGFACSQCGQPLFVYKLEQVSEKGKAYTNYFGRCNVAEHEKLILLYQLKPEKDSDEAVTYSLGKFGQRALDFYSIHVTKESTHPVKPLAQIAGNRYASHPVGKALSDACMGTIASFLSKYQDIIIEHQKVVKGNQKRLESLRELAGKENLEYPSVTLPPQPHTKEGVDAYNEVIARVRMWVNLNLWQKLKLSRDDAKPLLRLKGFPSFPLVERQANEVDWWDMVCNVKKLINEKKEDGKVFWQNLAGYKRQEALRPYLSSEEDREKGKKFARYQLGDLLLHLEKKHGEDWGKVYDEAWERIDKKVEGLSKHIKLEEERRSEDAQSKAALTDWLRAKASFVIEGLKEADKDEFCRCELKLQKWYGDLRGKPFAIEAENSILDISGFSKQYNCAFIWQKDGVKKLNLYLIINYFKGGKLRFKKIKPEAFEANRFYTVINKKSGEIVPMEVNFNFDDPNLIILPLAFGKRQGREFIWNDLLSLETGSLKLANGRVIEKTLYNRRTRQDEPALFVALTFERREVLDSSNIKPMNLIGVDRGENIPAVIALTDPEGCPLSRFKDSLGNPTHILRIGESYKEKQRTIQAKKEVEQRRAGGYSRKYASKAKNLADDMVRNTARDLLYYAVTQDAMLIFENLSRGFGRQGKRTFMAERQYTRMEDWLTAKLAYEGLPSKTYLSKTLAQYTSKTCSNCGFTITSADYDRVLEKLKKTATGWMTTINGKELKVEGQITYYNRYKRQNVVKDLSVELDRLSEESVNNDISSWTKGRSGEALSLLKKRFSHRPVQEKFVCLNCGFETHADEQAALNIARSWLFLRSQEYKKYQTNKTTGNTDKRAFVETWQSFYRKKLKEVWKPAV

SEQ ID NO: 43104 - protein, 978 aa, synthetic construct
  REGION 1..978: note = engineered CasX variant
QEIKRINKIRRRLVKDSNTKKAGKTGPMKTLLVRVMTPDLRERLENLRKKPENIPQPISNTSRANLNKLLTDYTEMKKAILHVYWEEFQKDPVGLMSRVAQPASKKIDQNKLKPEMDEKGNLTTAGFACSQCGQPLFVYKLEQVSEKGKAYTNYFGRCNVAEHEKLILLYQLKPEKDSDEAVTYSLGKFGQRALDFYSIHVTKESTHPVKPLAQIAGNRYASSPVGKALSDACMGTIASFLSKYQDIIIEHQKVVKGNQKRLESLRELAGKENLEYPSVTLPPQPHTKEGVDAYNEVIARVRMWVNLNLWQKLKLSRDDAKPLLRLKGFPSFPLVERQANEVDWWDMVCNVKKLINEKKEDGKVFWQNLAGYKRQEALRPYLSSEEDREKGKKFARYQLGDLLLHLEKKHGEDWGKVYDEAWERIDKKVEGLSKHIKLEEERRSEDAQSKAALTDWLRAKASFVIEGLKEADKDEFCRCELKLQKWYGDLRGKPFAIEAENSILDISGFSKQYNCAFIWQKDGVKKLNLYLIINYFKGGKLRFKKIKPEAFEANRFYTVINKKSGEIVPMEVNFNFDDPNLIILPLAFGKRQGREFIWNDLLSLETGSLKLANGRVIEKTLYNRRTRQDEPALFVALTFERREVLDSSNIKPMNLIGVDRGENIPAVIALTDPEGCPLSRFKDSLGNPTHILRIGESYKEKQRTIQAKKEVEQRRAGGYSRKYASKAKNLADDMVRNTARDLLYYAVTQDAMLIFENLSRGFGRQGKRTFMAERQYTRMEDWLTAKLAYEGLPSKTYLSKTLAQYTSKTCSNCGFTITSADYDRVLEKLKKTATGWMTTINGKELKVEGQITYYNRYKRQNVVKDLSVELDRLSEESVNNDISSWTKGRSGEALSLLKKRFSHRPVQEKFVCLNCGFETHADEQAALNIARSWLFLRSQEYKKYQTNKTTGNTDKRAFVETWQSFYRKKLKEVWKPAV

SEQ ID NO: 43105 - protein, 978 aa, synthetic construct
  REGION 1..978: note = engineered CasX variant
QEIKRINKIRRRLVKDSNTKKAGKTGPMKTLLVRVMTPDLRERLENLRKKPENIPQPISNTSRANLNKLLTDYTEMKKAILHVYWEEFQKDPVGLMSRVAQPASKKIDQNKLKPEMDEKGNLTTAGFACSQCGQPLFVYKLEQVSEKGKAYTNYFGRCNVAEHEKLILLYQLKPEKDSDEAVTYSLGKFGQRALDFYSIHVTKESTHPVKPLAQIAGNRYASTPVGKALSDACMGTIASFLSKYQDIIIEHQKVVKGNQKRLESLRELAGKENLEYPSVTLPPQPHTKEGVDAYNEVIARVRMWVNLNLWQKLKLSRDDAKPLLRLKGFPSFPLVERQANEVDWWDMVCNVKKLINEKKEDGKVFWQNLAGYKRQEALRPYLSSEEDREKGKKFARYQLGDLLLHLEKKHGEDWGKVYDEAWERIDKKVEGLSKHIKLEEERRSEDAQSKAALTDWLRAKASFVIEGLKEADKDEFCRCELKLQKWYGDLRGKPFAIEAENSILDISGFSKQYNCAFIWQKDGVKKLNLYLIINYFKGGKLRFKKIKPEAFEANRFYTVINKKSGEIVPMEVNFNFDDPNLIILPLAFGKRQGREFIWNDLLSLETGSLKLANGRVIEKTLYNRRTRQDEPALFVALTFERREVLDSSNIKPMNLIGVDRGENIPAVIALTDPEGCPLSRFKDSLGNPTHILRIGESYKEKQRTIQAKKEVEQRRAGGYSRKYASKAKNLADDMVRNTARDLLYYAVTQDAMLIFENLSRGFGRQGKRTFMAERQYTRMEDWLTAKLAYEGLPSKTYLSKTLAQYTSKTCSNCGFTITSADYDRVLEKLKKTATGWMTTINGKELKVEGQITYYNRYKRQNVVKDLSVELDRLSEESVNNDISSWTKGRSGEALSLLKKRFSHRPVQEKFVCLNCGFETHADEQAALNIARSWLFLRSQEYKKYQTNKTTGNTDKRAFVETWQSFYRKKLKEVWKPAV

SEQ ID NO: 43106 - protein, 978 aa, synthetic construct
  REGION 1..978: note = engineered CasX variant
QEIKRINKIRRRLVKDSNTKKAGKTGPMKTLLVRVMTPDLRERLENLRKKPENIPQPISNTSRANLNKLLTDYTEMKKAILHVYWEEFQKDPVGLMSRVAQPASKKIDQNKLKPEMDEKGNLTTAGFACSQCGQPLFVYKLEQVSEKGKAYTNYFGRCNVAEHEKLILLYQLKPEKDSDEAVTYSLGKFGQRALDFYSIHVTKESTHPVKPLAQIAGNRYASAPVGKALSDACMGTIASFLSKYQDIIIEHQKVVKGNQKRLESLRELAGKENLEYPSVTLPPQPHTKEGVDAYNEVIARVRMWVNLNLWQKLKLSRDDAKPLLRLKGFPSFPLVERQANEVDWWDMVCNVKKLINEKKEDGKVFWQNLAGYKRQEALRPYLSSEEDREKGKKFARYQLGDLLLHLEKKHGEDWGKVYDEAWERIDKKVEGLSKHIKLEEERRSEDAQSKAALTDWLRAKASFVIEGLKEADKDEFCRCELKLQKWYGDLRGKPFAIEAENSILDISGFSKQYNCAFIWQKDGVKKLNLYLIINYFKGGKLRFKKIKPEAFEANRFYTVINKKSGEIVPMEVNFNFDDPNLIILPLAFGKRQGREFIWNDLLSLETGSLKLANGRVIEKTLYNRRTRQDEPALFVALTFERREVLDSSNIKPMNLIGVDRGENIPAVIALTDPEGCPLSRFKDSLGNPTHILRIGESYKEKQRTIQAKKEVEQRRAGGYSRKYASKAKNLADDMVRNTARDLLYYAVTQDAMLIFENLSRGFGRQGKRTFMAERQYTRMEDWLTAKLAYEGLPSKTYLSKTLAQYTSKTCSNCGFTITSADYDRVLEKLKKTATGWMTTINGKELKVEGQITYYNRYKRQNVVKDLSVELDRLSEESVNNDISSWTKGRSGEALSLLKKRFSHRPVQEKFVCLNCGFETHADEQAALNIARSWLFLRSQEYKKYQTNKTTGNTDKRAFVETWQSFYRKKLKEVWKPAV

SEQ ID NO: 43107 - protein, 978 aa, synthetic construct
  REGION 1..978: note = engineered CasX variant
QEIKRINKIRRRLVKDSNTKKAGKTGPMKTLLVRVMTPDLRERLENLRKKPENIPQPISNTSRANLNKLLTDYTEMKKAILHVYWEEFQKDPVGLMSRVAQPASKKIDQNKLKPEMDEKGNLTTAGFACSQCGQPLFVYKLEQVSEKGKAYTNYFGRCNVAEHEKLILLYQLKPEKDSDEAVTYSLGKFGQRALDFYSIHVTKESTHPVKPLAQIAGNRYASVPVGKALSDACMGTIASFLSKYQDIIIEHQKVVKGNQKRLESLRELAGKENLEYPSVTLPPQPHTKEGVDAYNEVIARVRMWVNLNLWQKLKLSRDDAKPLLRLKGFPSFPLVERQANEVDWWDMVCNVKKLINEKKEDGKVFWQNLAGYKRQEALRPYLSSEEDREKGKKFARYQLGDLLLHLEKKHGEDWGKVYDEAWERIDKKVEGLSKHIKLEEERRSEDAQSKAALTDWLRAKASFVIEGLKEADKDEFCRCELKLQKWYGDLRGKPFAIEAENSILDISGFSKQYNCAFIWQKDGVKKLNLYLIINYFKGGKLRFKKIKPEAFEANRFYTVINKKSGEIVPMEVNFNFDDPNLIILPLAFGKRQGREFIWNDLLSLETGSLKLANGRVIEKTLYNRRTRQDEPALFVALTFERREVLDSSNIKPMNLIGVDRGENIPAVIALTDPEGCPLSRFKDSLGNPTHILRIGESYKEKQRTIQAKKEVEQRRAGGYSRKYASKAKNLADDMVRNTARDLLYYAVTQDAMLIFENLSRGFGRQGKRTFMAERQYTRMEDWLTAKLAYEGLPSKTYLSKTLAQYTSKTCSNCGFTITSADYDRVLEKLKKTATGWMTTINGKELKVEGQITYYNRYKRQNVVKDLSVELDRLSEESVNNDISSWTKGRSGEALSLLKKRFSHRPVQEKFVCLNCGFETHADEQAALNIARSWLFLRSQEYKKYQTNKTTGNTDKRAFVETWQSFYRKKLKEVWKPAV

SEQ ID NO: 43108 - protein, 978 aa, synthetic construct
  REGION 1..978: note = engineered CasX variant
QEIKRINKIRRRLVKDSNTKKAGKTGPMKTLLVRVMTPDLRERLENLRKKPENIPQPISNTSRANLNKLLTDYTEMKKAILHVYWEEFQKDPVGLMSRVAQPASKKIDQNKLKPEMDEKGNLTTAGFACSQCGQPLFVYKLEQVSEKGKAYTNYFGRCNVAEHEKLIKLYQLKPEKDSDEAVTYSLGKFGQRALDFYSIHVTKESTHPVKPLAQIAGNRYASGPVGKALSDACMGTIASFLSKYQDIIIEHQKVVKGNQKRLESLRELAGKENLEYPSVTLPPQPHTKEGVDAYNEVIARVRMWVNLNLWQKLKLSRDDAKPLLRLKGFPSFPLVERQANEVDWWDMVCNVKKLINEKKEDGKVFWQNLAGYKRQEALRPYLSSEEDREKGKKFARYQLGDLLLHLEKKHGEDWGKVYDEAWERIDKKVEGLSKHIKLEEERRSEDAQSKAALTDWLRAKASFVIEGLKEADKDEFCRCELKLQKWYGDLRGKPFAIEAENSILDISGFSKQYNCAFIWQKDGVKKLNLYLIINYFKGGKLRFKKIKPEAFEANRFYTVINKKSGEIVPMEVNFNFDDPNLIILPLAFGKRQGREFIWNDLLSLETGSLKLANGRVIEKTLYNRRTRQDEPALFVALTFERREVLDSSNIKPMNLIGVDRGENIPAVIALTDPEGCPLSRFKDSLGNPTHILRIGESYKEKQRTIQAKKEVEQRRAGGYSRKYASKAKNLADDMVRNTARDLLYYAVTQDAMLIFENLSRGFGRQGKRTFMAERQYTRMEDWLTAKLAYEGLPSKTYLSKTLAQYTSKTCSNCGFTITSADYDRVLEKLKKTATGWMTTINGKELKVEGQITYYNRYKRQNVVKDLSVELDRLSEESVNNDISSWTKGRSGEALSLLKKRFSHRPVQEKFVCLNCGFETHADEQAALNIARSWLFLRSQEYKKYQTNKTTGNTDKRAFVETWQSFYRKKLKEVWKPAV

SEQ ID NO: 43109 - protein, 977 aa, synthetic construct
  REGION 1..977: note = engineered CasX variant
QEIKRINKIRRRLVKDSNTKKAGKTGPMKTLLVRVMTPDLRERLENLRKKPENIPQPISNTSRANLNKLLTDYTEMKKAILHVYWEEFQKDPVGLMSRVAQPASKKIDQNKLKPEMDEKGNLTTAGFACSQCGQPLFVYKLEQVSEKGKAYTNYFGRCNVAEHEKLILLYQLKPEKDSDEAVTYSLGKFGQRALDFYSIHVTKESTHPVKPLAQIAGNRYASPVGKALSDACMGTIASFLSKYQDIIIEHQKVVKGNQKRLESLRELAGKENLEYPSVTLPPQPHTKEGVDAYNEVIARVRMWVNLNLWQKLKLSRDDAKPLLRLKGFPSFPLVERQANEVDWWDMVCNVKKLINEKKEDGKVFWQNLAGYKRQEALRPYLSSEEDREKGKKFARYQLGDLLLHLEKKHGEDWGKVYDEAWERIDKKVEGLSKHIKLEEERRSEDAQSKAALTDWLRAKASFVIEGLKEADKDEFCRCELKLQKWYGDLRGKPFAIEAENSILDISGFSKQYNCAFIWQKDGVKKLNLYLIINYFKGGKLRFKKIKPEAFEANRFYTVINKKSGEIVPMEVNFNFDDPNLIILPLAFGKRQGREFIWNDLLSLETGSLKLANGRVIEKTLYNRRTRQDEPALFVALTFERREVLDSSNIKPMNLIGVDRGENIPAVIALTDPEGCPLSRFKDSLGNPTHILRIGESYKEKQRTIQAKKEVEQRRAGGYSRKYASKAKNLADDMVRNTARDLLYYAVTQDAMLIFENLSRGFGRQGKRTFMAERQYTRMEDWLTAKLAYEGLPSKTYLSKTLAQYTSKTCSNCGFTITSADYDRVLEKLKKTATGWMTTINGKELKVEGQITYYNRYKRQNVVKDLSVELDRLSEESVNNDISSWTKGRSGEALSLLKKRFSHRPVQEKFVCLNCGFETHADEQAALNIARSWLFLRSQEYKKYQTNKTTGNTDKRAFVETWQSFYRKKLKEVWKPAV

SEQ ID NO: 43110 - protein, 978 aa, synthetic construct
  REGION 1..978: note = engineered CasX variant
QEIKRINKIRRRLVKDSNTKKAGKTGPMKTLLVRVMTPDLRERLENLRKKPENIPQPISNTSRANLNKLLTDYTEMKKAILHVYWEEFQKDPVGLMSRVAQPASKKIDQNKLKPEMDEKGNLTTAGFACSQCGQPLFVYKLEQVSEKGKAYTNYFGRCNVAEHEKLILLYQLKPEKDSDEAVTYSLGKFGQRALDFYSIHVTKESTHPVKPLAQIAGNRYASYPVGKALSDACMGTIASFLSKYQDIIIEHQKVVKGNQKRLESLRELAGKENLEYPSVTLPPQPHTKEGVDAYNEVIARVRMWVNLNLWQKLKLSRDDAKPLLRLKGFPSFPLVERQANEVDWWDMVCNVKKLINEKKEDGKVFWQNLAGYKRQEALRPYLSSEEDRKKGKKFARYQLGDLLLHLEKKHGEDWGKVYDEAWERIDKKVEGLSKHIKLEEERRSEDAQSKAALTDWLRAKASFVIEGLKEADKDEFCRCELKLQKWYGDLRGKPFAIEAENSILDISGFSKQYNCAFIWQKDGVKKLNLYLIINYFKGGKLRFKKIKPEAFEANRFYTVINKKSGEIVIMEVNFNFDDPNLIILPLAFGKRQGREFIWNDLLSLETGSLKLANGRVIEKTLYNRRTRQDEPALFVALTFERREVLDSSNIKPMNLIGVDRGENIPAVIALTDPEGCPLSRFKDSLGNPTHILRIGESYKEKQRTIQAKKEVEQRRAGGYSRKYASKAKNLADDMVRNTARDLLYYAVTQDAMLIFENLSRGFGRQGKRTFMAERQYTRMEDWLTAKLAYEGLPSKTYLSKTLAQYTSKTCSNCGFTITSADYDRVLEKLKKTATGWMTTINGKELKVEGQITYYNRYKRQNVVKDLSVELDRLSEESVNNDISSWTKGRSGEALSLLKKRFSHRPVQEKFVCLNCGFETHADEQAALNIARSWLFLRSQEYKKYQTNKTTGNTDKRAFVETWQSFYRKKLKEVWKPAV

SEQ ID NO: 43111 - protein, 978 aa, synthetic construct
  REGION 1..978: note = engineered CasX variant
QEIKRINKIRRRLVKDSNTKKAGKTGPMKTLLVRVMTPDLRERLENLRKKPENIPQPISNTSRANLNKLLTDYTEMKKAILHVYWEEFQKDPVGLMSRVAQPASKKIDQNKLKPEMDEKGNLTTAGFACSQCGQPLFVYKLEQVSEKGKAYTNYFGRCNVAEHEKLILLYQLKPEKDSDEAVTYSLGKFGQRALDFYSIHVTKESTHPVKPLAQIAGNRYASHPVGKALSDACMGTIASFLSKYQDIIIEHQKVVKGNQKRLESLRELAGKENLEYPSVTLPPQPHTKEGVDAYNEVIARVRMWVNLNLWQKLKLSRDDAKPLLRLKGFPSFPLVERQANEVDWWDMVCNVKKLINEKKEDGKVFWQNLAGYKRQEALRPYLSSEEDRKKGKKFARYQLGDLLLHLEKKHGEDWGKVYDEAWERIDKKVEGLSKHIKLEEERRSEDAQSKAALTDWLRAKASFVIEGLKEADKDEFCRCELKLQKWYGDLRGKPFAIEAENSILDISGFSKQYNCAFIWQKDGVKKLNLYLIINYFKGGKLRFKKIKPEAFEANRFYTVINKKSGEIVIMEVNFNFDDPNLIILPLAFGKRQGREFIWNDLLSLETGSLKLANGRVIEKTLYNRRTRQDEPALFVALTFERREVLDSSNIKPMNLIGVDRGENIPAVIALTDPEGCPLSRFKDSLGNPTHILRIGESYKEKQRTIQAKKEVEQRRAGGYSRKYASKAKNLADDMVRNTARDLLYYAVTQDAMLIFENLSRGFGRQGKRTFMAERQYTRMEDWLTAKLAYEGLPSKTYLSKTLAQYTSKTCSNCGFTITSADYDRVLEKLKKTATGWMTTINGKELKVEGQITYYNRYKRQNVVKDLSVELDRLSEESVNNDISSWTKGRSGEALSLLKKRFSHRPVQEKFVCLNCGFETHADEQAALNIARSWLFLRSQEYKKYQTNKTTGNTDKRAFVETWQSFYRKKLKEVWKPAV

SEQ ID NO: 43112 - protein, 978 aa, synthetic construct
  REGION 1..978: note = engineered CasX variant
QEIKRINKIRRRLVKDSNTKKAGKTGPMKTLLVRVMTPDLRERLENLRKKPENIPQPISNTSRANLNKLLTDYTEMKKAILHVYWEEFQKDPVGLMSRVAQPASKKIDQNKLKPEMDEKGNLTTAGFACSQCGQPLFVYKLEQVSEKGKAYTNYFGRCNVAEHEKLILLYQLKPEKDSDEAVTYSLGKFGQRALDFYSIHVTKESTHPVKPLAQIAGNRYASSPVGKALSDACMGTIASFLSKYQDIIIEHQKVVKGNQKRLESLRELAGKENLEYPSVTLPPQPHTKEGVDAYNEVIARVRMWVNLNLWQKLKLSRDDAKPLLRLKGFPSFPLVERQANEVDWWDMVCNVKKLINEKKEDGKVFWQNLAGYKRQEALRPYLSSEEDRKKGKKFARYQLGDLLLHLEKKHGEDWGKVYDEAWERIDKKVEGLSKHIKLEEERRSEDAQSKAALTDWLRAKASFVIEGLKEADKDEFCRCELKLQKWYGDLRGKPFAIEAENSILDISGFSKQYNCAFIWQKDGVKKLNLYLIINYFKGGKLRFKKIKPEAFEANRFYTVINKKSGEIVIMEVNFNFDDPNLIILPLAFGKRQGREFIWNDLLSLETGSLKLANGRVIEKTLYNRRTRQDEPALFVALTFERREVLDSSNIKPMNLIGVDRGENIPAVIALTDPEGCPLSRFKDSLGNPTHILRIGESYKEKQRTIQAKKEVEQRRAGGYSRKYASKAKNLADDMVRNTARDLLYYAVTQDAMLIFENLSRGFGRQGKRTFMAERQYTRMEDWLTAKLAYEGLPSKTYLSKTLAQYTSKTCSNCGFTITSADYDRVLEKLKKTATGWMTTINGKELKVEGQITYYNRYKRQNVVKDLSVELDRLSEESVNNDISSWTKGRSGEALSLLKKRFSHRPVQEKFVCLNCGFETHADEQAALNIARSWLFLRSQEYKKYQTNKTTGNTDKRAFVETWQSFYRKKLKEVWKPAV

SEQ ID NO: 43113 - protein, 978 aa, synthetic construct
  REGION 1..978: note = engineered CasX variant
QEIKRINKIRRRLVKDSNTKKAGKTGPMKTLLVRVMTPDLRERLENLRKKPENIPQPISNTSRANLNKLLTDYTEMKKAILHVYWEEFQKDPVGLMSRVAQPASKKIDQNKLKPEMDEKGNLTTAGFACSQCGQPLFVYKLEQVSEKGKAYTNYFGRCNVAEHEKLILLYQLKPEKDSDEAVTYSLGKFGQRALDFYSIHVTKESTHPVKPLAQIAGNRYASTPVGKALSDACMGTIASFLSKYQDIIIEHQKVVKGNQKRLESLRELAGKENLEYPSVTLPPQPHTKEGVDAYNEVIARVRMWVNLNLWQKLKLSRDDAKPLLRLKGFPSFPLVERQANEVDWWDMVCNVKKLINEKKEDGKVFWQNLAGYKRQEALRPYLSSEEDRKKGKKFARYQLGDLLLHLEKKHGEDWGKVYDEAWERIDKKVEGLSKHIKLEEERRSEDAQSKAALTDWLRAKASFVIEGLKEADKDEFCRCELKLQKWYGDLRGKPFAIEAENSILDISGFSKQYNCAFIWQKDGVKKLNLYLIINYFKGGKLRFKKIKPEAFEANRFYTVINKKSGEIVIMEVNFNFDDPNLIILPLAFGKRQGREFIWNDLLSLETGSLKLANGRVIEKTLYNRRTRQDEPALFVALTFERREVLDSSNIKPMNLIGVDRGENIPAVIALTDPEGCPLSRFKDSLGNPTHILRIGESYKEKQRTIQAKKEVEQRRAGGYSRKYASKAKNLADDMVRNTARDLLYYAVTQDAMLIFENLSRGFGRQGKRTFMAERQYTRMEDWLTAKLAYEGLPSKTYLSKTLAQYTSKTCSNCGFTITSADYDRVLEKLKKTATGWMTTINGKELKVEGQITYYNRYKRQNVVKDLSVELDRLSEESVNNDISSWTKGRSGEALSLLKKRFSHRPVQEKFVCLNCGFETHADEQAALNIARSWLFLRSQEYKKYQTNKTTGNTDKRAFVETWQSFYRKKLKEVWKPAV

SEQ ID NO: 43114 - protein, 978 aa, synthetic construct
  REGION 1..978: note = engineered CasX variant
QEIKRINKIRRRLVKDSNTKKAGKTGPMKTLLVRVMTPDLRERLENLRKKPENIPQPISNTSRANLNKLLTDYTEMKKAILHVYWEEFQKDPVGLMSRVAQPASKKIDQNKLKPEMDEKGNLTTAGFACSQCGQPLFVYKLEQVSEKGKAYTNYFGRCNVAEHEKLILLYQLKPEKDSDEAVTYSLGKFGQRALDFYSIHVTKESTHPVKPLAQIAGNRYASAPVGKALSDACMGTIASFLSKYQDIIIEHQKVVKGNQKRLESLRELAGKENLEYPSVTLPPQPHTKEGVDAYNEVIARVRMWVNLNLWQKLKLSRDDAKPLLRLKGFPSFPLVERQANEVDWWDMVCNVKKLINEKKEDGKVFWQNLAGYKRQEALRPYLSSEEDRKKGKKFARYQLGDLLLHLEKKHGEDWGKVYDEAWERIDKKVEGLSKHIKLEEERRSEDAQSKAALTDWLRAKASFVIEGLKEADKDEFCRCELKLQKWYGDLRGKPFAIEAENSILDISGFSKQYNCAFIWQKDGVKKLNLYLIINYFKGGKLRFKKIKPEAFEANRFYTVINKKSGEIVIMEVNFNFDDPNLIILPLAFGKRQGREFIWNDLLSLETGSLKLANGRVIEKTLYNRRTRQDEPALFVALTFERREVLDSSNIKPMNLIGVDRGENIPAVIALTDPEGCPLSRFKDSLGNPTHILRIGESYKEKQRTIQAKKEVEQRRAGGYSRKYASKAKNLADDMVRNTARDLLYYAVTQDAMLIFENLSRGFGRQGKRTFMAERQYTRMEDWLTAKLAYEGLPSKTYLSKTLAQYTSKTCSNCGFTITSADYDRVLEKLKKTATGWMTTINGKELKVEGQITYYNRYKRQNVVKDLSVELDRLSEESVNNDISSWTKGRSGEALSLLKKRFSHRPVQEKFVCLNCGFETHADEQAALNIARSWLFLRSQEYKKYQTNKTTGNTDKRAFVETWQSFYRKKLKEVWKPAV

SEQ ID NO: 43115 - protein, 978 aa, synthetic construct
  REGION 1..978: note = engineered CasX variant
QEIKRINKIRRRLVKDSNTKKAGKTGPMKTLLVRVMTPDLRERLENLRKKPENIPQPISNTSRANLNKLLTDYTEMKKAILHVYWEEFQKDPVGLMSRVAQPASKKIDQNKLKPEMDEKGNLTTAGFACSQCGQPLFVYKLEQVSEKGKAYTNYFGRCNVAEHEKLILLYQLKPEKDSDEAVTYSLGKFGQRALDFYSIHVTKESTHPVKPLAQIAGNRYASVPVGKALSDACMGTIASFLSKYQDIIIEHQKVVKGNQKRLESLRELAGKENLEYPSVTLPPQPHTKEGVDAYNEVIARVRMWVNLNLWQKLKLSRDDAKPLLRLKGFPSFPLVERQANEVDWWDMVCNVKKLINEKKEDGKVFWQNLAGYKRQEALRPYLSSEEDRKKGKKFARYQLGDLLLHLEKKHGEDWGKVYDEAWERIDKKVEGLSKHIKLEEERRSEDAQSKAALTDWLRAKASFVIEGLKEADKDEFCRCELKLQKWYGDLRGKPFAIEAENSILDISGFSKQYNCAFIWQKDGVKKLNLYLIINYFKGGKLRFKKIKPEAFEANRFYTVINKKSGEIVIMEVNFNFDDPNLIILPLAFGKRQGREFIWNDLLSLETGSLKLANGRVIEKTLYNRRTRQDEPALFVALTFERREVLDSSNIKPMNLIGVDRGENIPAVIALTDPEGCPLSRFKDSLGNPTHILRIGESYKEKQRTIQAKKEVEQRRAGGYSRKYASKAKNLADDMVRNTARDLLYYAVTQDAMLIFENLSRGFGRQGKRTFMAERQYTRMEDWLTAKLAYEGLPSKTYLSKTLAQYTSKTCSNCGFTITSADYDRVLEKLKKTATGWMTTINGKELKVEGQITYYNRYKRQNVVKDLSVELDRLSEESVNNDISSWTKGRSGEALSLLKKRFSHRPVQEKFVCLNCGFETHADEQAALNIARSWLFLRSQEYKKYQTNKTTGNTDKRAFVETWQSFYRKKLKEVWKPAV

SEQ ID NO: 43116 - protein, 978 aa, synthetic construct
  REGION 1..978: note = engineered CasX variant
QEIKRINKIRRRLVKDSNTKKAGKTGPMKTLLVRVMTPDLRERLENLRKKPENIPQPISNTSRANLNKLLTDYTEMKKAILHVYWEEFQKDPVGLMSRVAQPASKKIDQNKLKPEMDEKGNLTTAGFACSQCGQPLFVYKLEQVSEKGKAYTNYFGRCNVAEHEKLIKLYQLKPEKDSDEAVTYSLGKFGQRALDFYSIHVTKESTHPVKPLAQIAGNRYASGPVGKALSDACMGTIASFLSKYQDIIIEHQKVVKGNQKRLESLRELAGKENLEYPSVTLPPQPHTKEGVDAYNEVIARVRMWVNLNLWQKLKLSRDDAKPLLRLKGFPSFPLVERQANEVDWWDMVCNVKKLINEKKEDGKVFWQNLAGYKRQEALRPYLSSEEDRKKGKKFARYQLGDLLLHLEKKHGEDWGKVYDEAWERIDKKVEGLSKHIKLEEERRSEDAQSKAALTDWLRAKASFVIEGLKEADKDEFCRCELKLQKWYGDLRGKPFAIEAENSILDISGFSKQYNCAFIWQKDGVKKLNLYLIINYFKGGKLRFKKIKPEAFEANRFYTVINKKSGEIVIMEVNFNFDDPNLIILPLAFGKRQGREFIWNDLLSLETGSLKLANGRVIEKTLYNRRTRQDEPALFVALTFERREVLDSSNIKPMNLIGVDRGENIPAVIALTDPEGCPLSRFKDSLGNPTHILRIGESYKEKQRTIQAKKEVEQRRAGGYSRKYASKAKNLADDMVRNTARDLLYYAVTQDAMLIFENLSRGFGRQGKRTFMAERQYTRMEDWLTAKLAYEGLPSKTYLSKTLAQYTSKTCSNCGFTITSADYDRVLEKLKKTATGWMTTINGKELKVEGQITYYNRYKRQNVVKDLSVELDRLSEESVNNDISSWTKGRSGEALSLLKKRFSHRPVQEKFVCLNCGFETHADEQAALNIARSWLFLRSQEYKKYQTNKTTGNTDKRAFVETWQSFYRKKLKEVWKPAV

SEQ ID NO: 43117 - protein, 977 aa, synthetic construct
  REGION 1..977: note = engineered CasX variant
QEIKRINKIRRRLVKDSNTKKAGKTGPMKTLLVRVMTPDLRERLENLRKKPENIPQPISNTSRANLNKLLTDYTEMKKAILHVYWEEFQKDPVGLMSRVAQPASKKIDQNKLKPEMDEKGNLTTAGFACSQCGQPLFVYKLEQVSEKGKAYTNYFGRCNVAEHEKLILLYQLKPEKDSDEAVTYSLGKFGQRALDFYSIHVTKESTHPVKPLAQIAGNRYASPVGKALSDACMGTIASFLSKYQDIIIEHQKVVKGNQKRLESLRELAGKENLEYPSVTLPPQPHTKEGVDAYNEVIARVRMWVNLNLWQKLKLSRDDAKPLLRLKGFPSFPLVERQANEVDWWDMVCNVKKLINEKKEDGKVFWQNLAGYKRQEALRPYLSSEEDRKKGKKFARYQLGDLLLHLEKKHGEDWGKVYDEAWERIDKKVEGLSKHIKLEEERRSEDAQSKAALTDWLRAKASFVIEGLKEADKDEFCRCELKLQKWYGDLRGKPFAIEAENSILDISGFSKQYNCAFIWQKDGVKKLNLYLIINYFKGGKLRFKKIKPEAFEANRFYTVINKKSGEIVIMEVNFNFDDPNLIILPLAFGKRQGREFIWNDLLSLETGSLKLANGRVIEKTLYNRRTRQDEPALFVALTFERREVLDSSNIKPMNLIGVDRGENIPAVIALTDPEGCPLSRFKDSLGNPTHILRIGESYKEKQRTIQAKKEVEQRRAGGYSRKYASKAKNLADDMVRNTARDLLYYAVTQDAMLIFENLSRGFGRQGKRTFMAERQYTRMEDWLTAKLAYEGLPSKTYLSKTLAQYTSKTCSNCGFTITSADYDRVLEKLKKTATGWMTTINGKELKVEGQITYYNRYKRQNVVKDLSVELDRLSEESVNNDISSWTKGRSGEALSLLKKRFSHRPVQEKFVCLNCGFETHADEQAALNIARSWLFLRSQEYKKYQTNKTTGNTDKRAFVETWQSFYRKKLKEVWKPAV

SEQ ID NO: 43118 - protein, 978 aa, synthetic construct
  REGION 1..978: note = engineered CasX variant
QEIKRINKIRRRLVKDSNTKKAGKTGPMKTLLVRVMTPDLRERLENLRKKPENIPQPISNTSRANLNKLLTDYTEMKKAILHVYWEEFQKDPVGLMSRVAQPASKKIDQNKLKPEMDEKGNLTTAGFACSQCGQPLFVYKLEQVSEKGKAYTNYFGRCNVAEHEKLILLSQLKPEKDSDEAVTYSLGKFGQRALDFYSIHVTKESTHPVKPLAQIAGNRYASYPVGKALSGACMGTIASFLSKYQDIIIEHQKVVKGNQKRLESLRELAGKENLEYPSVTLPPQPHTKEGVDAYNEVIARVRMWVNLNLWQKLKLSRDDAKPLLRLKGFPSFPLVERQANEVDWWDMVCNVKKLINEKKEDGKVFWQNLAGYKRQEALRPYLSSEEDRKKGKKFARYQLGDLLLHLEKKHGEDWGKVYDEAWERIDKKVEGLSKHIKLEEERRSEDAQSKAALTDWLRAKASFVIEGLKEADKDEFCRCELKLQKWYGDLRGKPFAIEAENSILDISGFSKQYNCAFIWQKDGVKKLNLYLIINYFKGGKLRFKKIKPEAFEANRFYTVINKKSGEIVPMEVNFNFDDPNLIILPLAFGKRQGREFIWNDLLSLETGSLKLANGRVIEKTLYNRRTRQDEPALFVALTFERREVLDSSNIKPMNLIGVDRGENIPAVIALTDPEGCPLSRFKDSLGNPTHILRIGESYKEKQRTIQAKKEVEQRRAGGYSRKYASKAKNLADDMVRNTARDLLYYAVTQDAMLIFENLSRGFGRQGKRTFMAERQYTRMEDWLTAKLAYEGLPSKTYLSKTLAQYTSKTCSNCGFTITSADYDRVLEKLKKTATGWMTTINGKELKVEGQITYYNRYKRQNVVKDLSVELDRLSEESVNNDISSWTKGRSGEALSLLKKRFSHRPVQEKFVCLNCGFETHADEQAALNIARSWLFLRSQEYKKYQTNKTTGNTDKRAFVETWQSFYRKKLKEVWKPAV

SEQ ID NO: 43119 - protein, 978 aa, synthetic construct
  REGION 1..978: note = engineered CasX variant
QEIKRINKIRRRLVKDSNTKKAGKTGPMKTLLVRVMTPDLRERLENLRKKPENIPQPISNTSRANLNKLLTDYTEMKKAILHVYWEEFQKDPVGLMSRVAQPASKKIDQNKLKPEMDEKGNLTTAGFACSQCGQPLFVYKLEQVSEKGKAYTNYFGRCNVAEHEKLILLSQLKPEKDSDEAVTYSLGKFGQRALDFYSIHVTKESTHPVKPLAQIAGNRYASHPVGKALSGACMGTIASFLSKYQDIIIEHQKVVKGNQKRLESLRELAGKENLEYPSVTLPPQPHTKEGVDAYNEVIARVRMWVNLNLWQKLKLSRDDAKPLLRLKGFPSFPLVERQANEVDWWDMVCNVKKLINEKKEDGKVFWQNLAGYKRQEALRPYLSSEEDRKKGKKFARYQLGDLLLHLEKKHGEDWGKVYDEAWERIDKKVEGLSKHIKLEEERRSEDAQSKAALTDWLRAKASFVIEGLKEADKDEFCRCELKLQKWYGDLRGKPFAIEAENSILDISGFSKQYNCAFIWQKDGVKKLNLYLIINYFKGGKLRFKKIKPEAFEANRFYTVINKKSGEIVPMEVNFNFDDPNLIILPLAFGKRQGREFIWNDLLSLETGSLKLANGRVIEKTLYNRRTRQDEPALFVALTFERREVLDSSNIKPMNLIGVDRGENIPAVIALTDPEGCPLSRFKDSLGNPTHILRIGESYKEKQRTIQAKKEVEQRRAGGYSRKYASKAKNLADDMVRNTARDLLYYAVTQDAMLIFENLSRGFGRQGKRTFMAERQYTRMEDWLTAKLAYEGLPSKTYLSKTLAQYTSKTCSNCGFTITSADYDRVLEKLKKTATGWMTTINGKELKVEGQITYYNRYKRQNVVKDLSVELDRLSEESVNNDISSWTKGRSGEALSLLKKRFSHRPVQEKFVCLNCGFETHADEQAALNIARSWLFLRSQEYKKYQTNKTTGNTDKRAFVETWQSFYRKKLKEVWKPAV

SEQ ID NO: 43120 - protein, 978 aa, synthetic construct
  REGION 1..978: note = engineered CasX variant
QEIKRINKIRRRLVKDSNTKKAGKTGPMKTLLVRVMTPDLRERLENLRKKPENIPQPISNTSRANLNKLLTDYTEMKKAILHVYWEEFQKDPVGLMSRVAQPASKKIDQNKLKPEMDEKGNLTTAGFACSQCGQPLFVYKLEQVSEKGKAYTNYFGRCNVAEHEKLILLSQLKPEKDSDEAVTYSLGKFGQRALDFYSIHVTKESTHPVKPLAQIAGNRYASSPVGKALSGACMGTIASFLSKYQDIIIEHQKVVKGNQKRLESLRELAGKENLEYPSVTLPPQPHTKEGVDAYNEVIARVRMWVNLNLWQKLKLSRDDAKPLLRLKGFPSFPLVERQANEVDWWDMVCNVKKLINEKKEDGKVFWQNLAGYKRQEALRPYLSSEEDRKKGKKFARYQLGDLLLHLEKKHGEDWGKVYDEAWERIDKKVEGLSKHIKLEEERRSEDAQSKAALTDWLRAKASFVIEGLKEADKDEFCRCELKLQKWYGDLRGKPFAIEAENSILDISGFSKQYNCAFIWQKDGVKKLNLYLIINYFKGGKLRFKKIKPEAFEANRFYTVINKKSGEIVPMEVNFNFDDPNLIILPLAFGKRQGREFIWNDLLSLETGSLKLANGRVIEKTLYNRRTRQDEPALFVALTFERREVLDSSNIKPMNLIGVDRGENIPAVIALTDPEGCPLSRFKDSLGNPTHILRIGESYKEKQRTIQAKKEVEQRRAGGYSRKYASKAKNLADDMVRNTARDLLYYAVTQDAMLIFENLSRGFGRQGKRTFMAERQYTRMEDWLTAKLAYEGLPSKTYLSKTLAQYTSKTCSNCGFTITSADYDRVLEKLKKTATGWMTTINGKELKVEGQITYYNRYKRQNVVKDLSVELDRLSEESVNNDISSWTKGRSGEALSLLKKRFSHRPVQEKFVCLNCGFETHADEQAALNIARSWLFLRSQEYKKYQTNKTTGNTDKRAFVETWQSFYRKKLKEVWKPAV

SEQ ID NO: 43121 - protein, 978 aa, synthetic construct
  REGION 1..978: note = engineered CasX variant
QEIKRINKIRRRLVKDSNTKKAGKTGPMKTLLVRVMTPDLRERLENLRKKPENIPQPISNTSRANLNKLLTDYTEMKKAILHVYWEEFQKDPVGLMSRVAQPASKKIDQNKLKPEMDEKGNLTTAGFACSQCGQPLFVYKLEQVSEKGKAYTNYFGRCNVAEHEKLILLSQLKPEKDSDEAVTYSLGKFGQRALDFYSIHVTKESTHPVKPLAQIAGNRYASTPVGKALSGACMGTIASFLSKYQDIIIEHQKVVKGNQKRLESLRELAGKENLEYPSVTLPPQPHTKEGVDAYNEVIARVRMWVNLNLWQKLKLSRDDAKPLLRLKGFPSFPLVERQANEVDWWDMVCNVKKLINEKKEDGKVFWQNLAGYKRQEALRPYLSSEEDRKKGKKFARYQLGDLLLHLEKKHGEDWGKVYDEAWERIDKKVEGLSKHIKLEEERRSEDAQSKAALTDWLRAKASFVIEGLKEADKDEFCRCELKLQKWYGDLRGKPFAIEAENSILDISGFSKQYNCAFIWQKDGVKKLNLYLIINYFKGGKLRFKKIKPEAFEANRFYTVINKKSGEIVPMEVNFNFDDPNLIILPLAFGKRQGREFIWNDLLSLETGSLKLANGRVIEKTLYNRRTRQDEPALFVALTFERREVLDSSNIKPMNLIGVDRGENIPAVIALTDPEGCPLSRFKDSLGNPTHILRIGESYKEKQRTIQAKKEVEQRRAGGYSRKYASKAKNLADDMVRNTARDLLYYAVTQDAMLIFENLSRGFGRQGKRTFMAERQYTRMEDWLTAKLAYEGLPSKTYLSKTLAQYTSKTCSNCGFTITSADYDRVLEKLKKTATGWMTTINGKELKVEGQITYYNRYKRQNVVKDLSVELDRLSEESVNNDISSWTKGRSGEALSLLKKRFSHRPVQEKFVCLNCGFETHADEQAALNIARSWLFLRSQEYKKYQTNKTTGNTDKRAFVETWQSFYRKKLKEVWKPAV

SEQ ID NO: 43122 - protein, 978 aa, synthetic construct
  REGION 1..978: note = engineered CasX variant
QEIKRINKIRRRLVKDSNTKKAGKTGPMKTLLVRVMTPDLRERLENLRKKPENIPQPISNTSRANLNKLLTDYTEMKKAILHVYWEEFQKDPVGLMSRVAQPASKKIDQNKLKPEMDEKGNLTTAGFACSQCGQPLFVYKLEQVSEKGKAYTNYFGRCNVAEHEKLILLSQLKPEKDSDEAVTYSLGKFGQRALDFYSIHVTKESTHPVKPLAQIAGNRYASAPVGKALSGACMGTIASFLSKYQDIIIEHQKVVKGNQKRLESLRELAGKENLEYPSVTLPPQPHTKEGVDAYNEVIARVRMWVNLNLWQKLKLSRDDAKPLLRLKGFPSFPLVERQANEVDWWDMVCNVKKLINEKKEDGKVFWQNLAGYKRQEALRPYLSSEEDRKKGKKFARYQLGDLLLHLEKKHGEDWGKVYDEAWERIDKKVEGLSKHIKLEEERRSEDAQSKAALTDWLRAKASFVIEGLKEADKDEFCRCELKLQKWYGDLRGKPFAIEAENSILDISGFSKQYNCAFIWQKDGVKKLNLYLIINYFKGGKLRFKKIKPEAFEANRFYTVINKKSGEIVPMEVNFNFDDPNLIILPLAFGKRQGREFIWNDLLSLETGSLKLANGRVIEKTLYNRRTRQDEPALFVALTFERREVLDSSNIKPMNLIGVDRGENIPAVIALTDPEGCPLSRFKDSLGNPTHILRIGESYKEKQRTIQAKKEVEQRRAGGYSRKYASKAKNLADDMVRNTARDLLYYAVTQDAMLIFENLSRGFGRQGKRTFMAERQYTRMEDWLTAKLAYEGLPSKTYLSKTLAQYTSKTCSNCGFTITSADYDRVLEKLKKTATGWMTTINGKELKVEGQITYYNRYKRQNVVKDLSVELDRLSEESVNNDISSWTKGRSGEALSLLKKRFSHRPVQEKFVCLNCGFETHADEQAALNIARSWLFLRSQEYKKYQTNKTTGNTDKRAFVETWQSFYRKKLKEVWKPAV

SEQ ID NO: 43123 - protein, 978 aa, synthetic construct
  REGION 1..978: note = engineered CasX variant
QEIKRINKIRRRLVKDSNTKKAGKTGPMKTLLVRVMTPDLRERLENLRKKPENIPQPISNTSRANLNKLLTDYTEMKKAILHVYWEEFQKDPVGLMSRVAQPASKKIDQNKLKPEMDEKGNLTTAGFACSQCGQPLFVYKLEQVSEKGKAYTNYFGRCNVAEHEKLILLSQLKPEKDSDEAVTYSLGKFGQRALDFYSIHVTKESTHPVKPLAQIAGNRYASVPVGKALSGACMGTIASFLSKYQDIIIEHQKVVKGNQKRLESLRELAGKENLEYPSVTLPPQPHTKEGVDAYNEVIARVRMWVNLNLWQKLKLSRDDAKPLLRLKGFPSFPLVERQANEVDWWDMVCNVKKLINEKKEDGKVFWQNLAGYKRQEALRPYLSSEEDRKKGKKFARYQLGDLLLHLEKKHGEDWGKVYDEAWERIDKKVEGLSKHIKLEEERRSEDAQSKAALTDWLRAKASFVIEGLKEADKDEFCRCELKLQKWYGDLRGKPFAIEAENSILDISGFSKQYNCAFIWQKDGVKKLNLYLIINYFKGGKLRFKKIKPEAFEANRFYTVINKKSGEIVPMEVNFNFDDPNLIILPLAFGKRQGREFIWNDLLSLETGSLKLANGRVIEKTLYNRRTRQDEPALFVALTFERREVLDSSNIKPMNLIGVDRGENIPAVIALTDPEGCPLSRFKDSLGNPTHILRIGESYKEKQRTIQAKKEVEQRRAGGYSRKYASKAKNLADDMVRNTARDLLYYAVTQDAMLIFENLSRGFGRQGKRTFMAERQYTRMEDWLTAKLAYEGLPSKTYLSKTLAQYTSKTCSNCGFTITSADYDRVLEKLKKTATGWMTTINGKELKVEGQITYYNRYKRQNVVKDLSVELDRLSEESVNNDISSWTKGRSGEALSLLKKRFSHRPVQEKFVCLNCGFETHADEQAALNIARSWLFLRSQEYKKYQTNKTTGNTDKRAFVETWQSFYRKKLKEVWKPAV

SEQ ID NO: 43124 - protein, 978 aa, synthetic construct
  REGION 1..978: note = engineered CasX variant
QEIKRINKIRRRLVKDSNTKKAGKTGPMKTLLVRVMTPDLRERLENLRKKPENIPQPISNTSRANLNKLLTDYTEMKKAILHVYWEEFQKDPVGLMSRVAQPASKKIDQNKLKPEMDEKGNLTTAGFACSQCGQPLFVYKLEQVSEKGKAYTNYFGRCNVAEHEKLIKLSQLKPEKDSDEAVTYSLGKFGQRALDFYSIHVTKESTHPVKPLAQIAGNRYASGPVGKALSGACMGTIASFLSKYQDIIIEHQKVVKGNQKRLESLRELAGKENLEYPSVTLPPQPHTKEGVDAYNEVIARVRMWVNLNLWQKLKLSRDDAKPLLRLKGFPSFPLVERQANEVDWWDMVCNVKKLINEKKEDGKVFWQNLAGYKRQEALRPYLSSEEDRKKGKKFARYQLGDLLLHLEKKHGEDWGKVYDEAWERIDKKVEGLSKHIKLEEERRSEDAQSKAALTDWLRAKASFVIEGLKEADKDEFCRCELKLQKWYGDLRGKPFAIEAENSILDISGFSKQYNCAFIWQKDGVKKLNLYLIINYFKGGKLRFKKIKPEAFEANRFYTVINKKSGEIVPMEVNFNFDDPNLIILPLAFGKRQGREFIWNDLLSLETGSLKLANGRVIEKTLYNRRTRQDEPALFVALTFERREVLDSSNIKPMNLIGVDRGENIPAVIALTDPEGCPLSRFKDSLGNPTHILRIGESYKEKQRTIQAKKEVEQRRAGGYSRKYASKAKNLADDMVRNTARDLLYYAVTQDAMLIFENLSRGFGRQGKRTFMAERQYTRMEDWLTAKLAYEGLPSKTYLSKTLAQYTSKTCSNCGFTITSADYDRVLEKLKKTATGWMTTINGKELKVEGQITYYNRYKRQNVVKDLSVELDRLSEESVNNDISSWTKGRSGEALSLLKKRFSHRPVQEKFVCLNCGFETHADEQAALNIARSWLFLRSQEYKKYQTNKTTGNTDKRAFVETWQSFYRKKLKEVWKPAV

SEQ ID NO: 43125 - protein, 977 aa, synthetic construct
  REGION 1..977: note = engineered CasX variant
QEIKRINKIRRRLVKDSNTKKAGKTGPMKTLLVRVMTPDLRERLENLRKKPENIPQPISNTSRANLNKLLTDYTEMKKAILHVYWEEFQKDPVGLMSRVAQPASKKIDQNKLKPEMDEKGNLTTAGFACSQCGQPLFVYKLEQVSEKGKAYTNYFGRCNVAEHEKLILLSQLKPEKDSDEAVTYSLGKFGQRALDFYSIHVTKESTHPVKPLAQIAGNRYASPVGKALSGACMGTIASFLSKYQDIIIEHQKVVKGNQKRLESLRELAGKENLEYPSVTLPPQPHTKEGVDAYNEVIARVRMWVNLNLWQKLKLSRDDAKPLLRLKGFPSFPLVERQANEVDWWDMVCNVKKLINEKKEDGKVFWQNLAGYKRQEALRPYLSSEEDRKKGKKFARYQLGDLLLHLEKKHGEDWGKVYDEAWERIDKKVEGLSKHIKLEEERRSEDAQSKAALTDWLRAKASFVIEGLKEADKDEFCRCELKLQKWYGDLRGKPFAIEAENSILDISGFSKQYNCAFIWQKDGVKKLNLYLIINYFKGGKLRFKKIKPEAFEANRFYTVINKKSGEIVPMEVNFNFDDPNLIILPLAFGKRQGREFIWNDLLSLETGSLKLANGRVIEKTLYNRRTRQDEPALFVALTFERREVLDSSNIKPMNLIGVDRGENIPAVIALTDPEGCPLSRFKDSLGNPTHILRIGESYKEKQRTIQAKKEVEQRRAGGYSRKYASKAKNLADDMVRNTARDLLYYAVTQDAMLIFENLSRGFGRQGKRTFMAERQYTRMEDWLTAKLAYEGLPSKTYLSKTLAQYTSKTCSNCGFTITSADYDRVLEKLKKTATGWMTTINGKELKVEGQITYYNRYKRQNVVKDLSVELDRLSEESVNNDISSWTKGRSGEALSLLKKRFSHRPVQEKFVCLNCGFETHADEQAALNIARSWLFLRSQEYKKYQTNKTTGNTDKRAFVETWQSFYRKKLKEVWKPAV

SEQ ID NO: 43126 - protein, 978 aa, synthetic construct
  REGION 1..978: note = engineered CasX variant
QEIKRINKIRRRLVKDSNTKKAGKTGPMKTLLVRVMTPDLRERLENLRKKPENIPQPISNTSRANLNKLLTDYTEMKKAILHVYWEEFQKDPVGLMSRVAQPASKKIDQNKLKPEMDEKGNLTTAGFACSQCGQPLFVYKLEQVSEKGKAYTNYFGRCNVAEHEKLILLSQLKPEKDSDEAVTYSLGKFGQRALDFYSIHVTKESTHPVKPLAQIAGNRYASYPVGKALSDACMGTIASFLSKYQDIIIEHQKVVKGNQKRLESLRELAGKENLEYPSVTLPPQPHTKEGVDAYNEVIARVRMWVNLNLWQKLKLSRDDAKPLLRLKNFPSFPLVERQANEVDWWDMVCNVKKLINEKKEDGKVFWQNLAGYKRQEALRPYLSSEEDRKKGKKFARYQLGDLLLHLEKKHGEDWGKVYDEAWERIDKKVEGLSKHIKLEEERRSEDAQSKAALTDWLRAKASFVIEGLKEADKDEFCRCELKLQKWYGDLRGKPFAIEAENSILDISGFSKQYNCAFIWQKDGVKKLNLYLIINYFKGGKLRFKKIKPEAFEANRFYTVINKKSGEIVPMEVNFNFDDPNLIILPLAFGKRQGREFIWNDLLSLETGSLKLANGRVIEKTLYNRRTRQDEPALFVALTFERREVLDSSNIKPMNLIGVDRGENIPAVIALTDPEGCPLSRFKDSLGNPTHILRIGESYKEKQRTIQAKKEVEQRRAGGYSRKYASKAKNLADDMVRNTARDLLYYAVTQDAMLIFENLSRGFGRQGKRTFMAERQYTRMEDWLTAKLAYEGLPSKTYLSKTLAQYTSKTCSNCGFTITSADYDRVLEKLKKTATGWMTTINGKELKVEGQITYYNRYKRQNVVKDLSVELDRLSEESVNNDISSWTKGRSGEALSLLKKRFSHRPVQEKFVCLNCGFETHADEQAALNIARSWLFLRSQEYKKYQTNKTTGNTDKRAFVETWQSFYRKKLKEVWKPAV

SEQ ID NO: 43127 - protein, 978 aa, synthetic construct
  REGION 1..978: note = engineered CasX variant
QEIKRINKIRRRLVKDSNTKKAGKTGPMKTLLVRVMTPDLRERLENLRKKPENIPQPISNTSRANLNKLLTDYTEMKKAILHVYWEEFQKDPVGLMSRVAQPASKKIDQNKLKPEMDEKGNLTTAGFACSQCGQPLFVYKLEQVSEKGKAYTNYFGRCNVAEHEKLILLSQLKPEKDSDEAVTYSLGKFGQRALDFYSIHVTKESTHPVKPLAQIAGNRYASHPVGKALSDACMGTIASFLSKYQDIIIEHQKVVKGNQKRLESLRELAGKENLEYPSVTLPPQPHTKEGVDAYNEVIARVRMWVNLNLWQKLKLSRDDAKPLLRLKNFPSFPLVERQANEVDWWDMVCNVKKLINEKKEDGKVFWQNLAGYKRQEALRPYLSSEEDRKKGKKFARYQLGDLLLHLEKKHGEDWGKVYDEAWERIDKKVEGLSKHIKLEEERRSEDAQSKAALTDWLRAKASFVIEGLKEADKDEFCRCELKLQKWYGDLRGKPFAIEAENSILDISGFSKQYNCAFIWQKDGVKKLNLYLIINYFKGGKLRFKKIKPEAFEANRFYTVINKKSGEIVPMEVNFNFDDPNLIILPLAFGKRQGREFIWNDLLSLETGSLKLANGRVIEKTLYNRRTRQDEPALFVALTFERREVLDSSNIKPMNLIGVDRGENIPAVIALTDPEGCPLSRFKDSLGNPTHILRIGESYKEKQRTIQAKKEVEQRRAGGYSRKYASKAKNLADDMVRNTARDLLYYAVTQDAMLIFENLSRGFGRQGKRTFMAERQYTRMEDWLTAKLAYEGLPSKTYLSKTLAQYTSKTCSNCGFTITSADYDRVLEKLKKTATGWMTTINGKELKVEGQITYYNRYKRQNVVKDLSVELDRLSEESVNNDISSWTKGRSGEALSLLKKRFSHRPVQEKFVCLNCGFETHADEQAALNIARSWLFLRSQEYKKYQTNKTTGNTDKRAFVETWQSFYRKKLKEVWKPAV

SEQ ID NO: 43128 - protein, 978 aa, synthetic construct
  REGION 1..978: note = engineered CasX variant
QEIKRINKIRRRLVKDSNTKKAGKTGPMKTLLVRVMTPDLRERLENLRKKPENIPQPISNTSRANLNKLLTDYTEMKKAILHVYWEEFQKDPVGLMSRVAQPASKKIDQNKLKPEMDEKGNLTTAGFACSQCGQPLFVYKLEQVSEKGKAYTNYFGRCNVAEHEKLILLSQLKPEKDSDEAVTYSLGKFGQRALDFYSIHVTKESTHPVKPLAQIAGNRYASSPVGKALSDACMGTIASFLSKYQDIIIEHQKVVKGNQKRLESLRELAGKENLEYPSVTLPPQPHTKEGVDAYNEVIARVRMWVNLNLWQKLKLSRDDAKPLLRLKNFPSFPLVERQANEVDWWDMVCNVKKLINEKKEDGKVFWQNLAGYKRQEALRPYLSSEEDRKKGKKFARYQLGDLLLHLEKKHGEDWGKVYDEAWERIDKKVEGLSKHIKLEEERRSEDAQSKAALTDWLRAKASFVIEGLKEADKDEFCRCELKLQKWYGDLRGKPFAIEAENSILDISGFSKQYNCAFIWQKDGVKKLNLYLIINYFKGGKLRFKKIKPEAFEANRFYTVINKKSGEIVPMEVNFNFDDPNLIILPLAFGKRQGREFIWNDLLSLETGSLKLANGRVIEKTLYNRRTRQDEPALFVALTFERREVLDSSNIKPMNLIGVDRGENIPAVIALTDPEGCPLSRFKDSLGNPTHILRIGESYKEKQRTIQAKKEVEQRRAGGYSRKYASKAKNLADDMVRNTARDLLYYAVTQDAMLIFENLSRGFGRQGKRTFMAERQYTRMEDWLTAKLAYEGLPSKTYLSKTLAQYTSKTCSNCGFTITSADYDRVLEKLKKTATGWMTTINGKELKVEGQITYYNRYKRQNVVKDLSVELDRLSEESVNNDISSWTKGRSGEALSLLKKRFSHRPVQEKFVCLNCGFETHADEQAALNIARSWLFLRSQEYKKYQTNKTTGNTDKRAFVETWQSFYRKKLKEVWKPAV

SEQ ID NO: 43129 - protein, 978 aa, synthetic construct
  REGION 1..978: note = engineered CasX variant
QEIKRINKIRRRLVKDSNTKKAGKTGPMKTLLVRVMTPDLRERLENLRKKPENIPQPISNTSRANLNKLLTDYTEMKKAILHVYWEEFQKDPVGLMSRVAQPASKKIDQNKLKPEMDEKGNLTTAGFACSQCGQPLFVYKLEQVSEKGKAYTNYFGRCNVAEHEKLILLSQLKPEKDSDEAVTYSLGKFGQRALDFYSIHVTKESTHPVKPLAQIAGNRYASTPVGKALSDACMGTIASFLSKYQDIIIEHQKVVKGNQKRLESLRELAGKENLEYPSVTLPPQPHTKEGVDAYNEVIARVRMWVNLNLWQKLKLSRDDAKPLLRLKNFPSFPLVERQANEVDWWDMVCNVKKLINEKKEDGKVFWQNLAGYKRQEALRPYLSSEEDRKKGKKFARYQLGDLLLHLEKKHGEDWGKVYDEAWERIDKKVEGLSKHIKLEEERRSEDAQSKAALTDWLRAKASFVIEGLKEADKDEFCRCELKLQKWYGDLRGKPFAIEAENSILDISGFSKQYNCAFIWQKDGVKKLNLYLIINYFKGGKLRFKKIKPEAFEANRFYTVINKKSGEIVPMEVNFNFDDPNLIILPLAFGKRQGREFIWNDLLSLETGSLKLANGRVIEKTLYNRRTRQDEPALFVALTFERREVLDSSNIKPMNLIGVDRGENIPAVIALTDPEGCPLSRFKDSLGNPTHILRIGESYKEKQRTIQAKKEVEQRRAGGYSRKYASKAKNLADDMVRNTARDLLYYAVTQDAMLIFENLSRGFGRQGKRTFMAERQYTRMEDWLTAKLAYEGLPSKTYLSKTLAQYTSKTCSNCGFTITSADYDRVLEKLKKTATGWMTTINGKELKVEGQITYYNRYKRQNVVKDLSVELDRLSEESVNNDISSWTKGRSGEALSLLKKRFSHRPVQEKFVCLNCGFETHADEQAALNIARSWLFLRSQEYKKYQTNKTTGNTDKRAFVETWQSFYRKKLKEVWKPAV

SEQ ID NO: 43130 - protein, 978 aa, synthetic construct
  REGION 1..978: note = engineered CasX variant
QEIKRINKIRRRLVKDSNTKKAGKTGPMKTLLVRVMTPDLRERLENLRKKPENIPQPISNTSRANLNKLLTDYTEMKKAILHVYWEEFQKDPVGLMSRVAQPASKKIDQNKLKPEMDEKGNLTTAGFACSQCGQPLFVYKLEQVSEKGKAYTNYFGRCNVAEHEKLILLSQLKPEKDSDEAVTYSLGKFGQRALDFYSIHVTKESTHPVKPLAQIAGNRYASAPVGKALSDACMGTIASFLSKYQDIIIEHQKVVKGNQKRLESLRELAGKENLEYPSVTLPPQPHTKEGVDAYNEVIARVRMWVNLNLWQKLKLSRDDAKPLLRLKNFPSFPLVERQANEVDWWDMVCNVKKLINEKKEDGKVFWQNLAGYKRQEALRPYLSSEEDRKKGKKFARYQLGDLLLHLEKKHGEDWGKVYDEAWERIDKKVEGLSKHIKLEEERRSEDAQSKAALTDWLRAKASFVIEGLKEADKDEFCRCELKLQKWYGDLRGKPFAIEAENSILDISGFSKQYNCAFIWQKDGVKKLNLYLIINYFKGGKLRFKKIKPEAFEANRFYTVINKKSGEIVPMEVNFNFDDPNLIILPLAFGKRQGREFIWNDLLSLETGSLKLANGRVIEKTLYNRRTRQDEPALFVALTFERREVLDSSNIKPMNLIGVDRGENIPAVIALTDPEGCPLSRFKDSLGNPTHILRIGESYKEKQRTIQAKKEVEQRRAGGYSRKYASKAKNLADDMVRNTARDLLYYAVTQDAMLIFENLSRGFGRQGKRTFMAERQYTRMEDWLTAKLAYEGLPSKTYLSKTLAQYTSKTCSNCGFTITSADYDRVLEKLKKTATGWMTTINGKELKVEGQITYYNRYKRQNVVKDLSVELDRLSEESVNNDISSWTKGRSGEALSLLKKRFSHRPVQEKFVCLNCGFETHADEQAALNIARSWLFLRSQEYKKYQTNKTTGNTDKRAFVETWQSFYRKKLKEVWKPAV

SEQ ID NO: 43131 - protein, 978 aa, synthetic construct
  REGION 1..978: note = engineered CasX variant
QEIKRINKIRRRLVKDSNTKKAGKTGPMKTLLVRVMTPDLRERLENLRKKPENIPQPISNTSRANLNKLLTDYTEMKKAILHVYWEEFQKDPVGLMSRVAQPASKKIDQNKLKPEMDEKGNLTTAGFACSQCGQPLFVYKLEQVSEKGKAYTNYFGRCNVAEHEKLILLSQLKPEKDSDEAVTYSLGKFGQRALDFYSIHVTKESTHPVKPLAQIAGNRYASVPVGKALSDACMGTIASFLSKYQDIIIEHQKVVKGNQKRLESLRELAGKENLEYPSVTLPPQPHTKEGVDAYNEVIARVRMWVNLNLWQKLKLSRDDAKPLLRLKNFPSFPLVERQANEVDWWDMVCNVKKLINEKKEDGKVFWQNLAGYKRQEALRPYLSSEEDRKKGKKFARYQLGDLLLHLEKKHGEDWGKVYDEAWERIDKKVEGLSKHIKLEEERRSEDAQSKAALTDWLRAKASFVIEGLKEADKDEFCRCELKLQKWYGDLRGKPFAIEAENSILDISGFSKQYNCAFIWQKDGVKKLNLYLIINYFKGGKLRFKKIKPEAFEANRFYTVINKKSGEIVPMEVNFNFDDPNLIILPLAFGKRQGREFIWNDLLSLETGSLKLANGRVIEKTLYNRRTRQDEPALFVALTFERREVLDSSNIKPMNLIGVDRGENIPAVIALTDPEGCPLSRFKDSLGNPTHILRIGESYKEKQRTIQAKKEVEQRRAGGYSRKYASKAKNLADDMVRNTARDLLYYAVTQDAMLIFENLSRGFGRQGKRTFMAERQYTRMEDWLTAKLAYEGLPSKTYLSKTLAQYTSKTCSNCGFTITSADYDRVLEKLKKTATGWMTTINGKELKVEGQITYYNRYKRQNVVKDLSVELDRLSEESVNNDISSWTKGRSGEALSLLKKRFSHRPVQEKFVCLNCGFETHADEQAALNIARSWLFLRSQEYKKYQTNKTTGNTDKRAFVETWQSFYRKKLKEVWKPAV

SEQ ID NO: 43132 - protein, 978 aa, synthetic construct
  REGION 1..978: note = engineered CasX variant
QEIKRINKIRRRLVKDSNTKKAGKTGPMKTLLVRVMTPDLRERLENLRKKPENIPQPISNTSRANLNKLLTDYTEMKKAILHVYWEEFQKDPVGLMSRVAQPASKKIDQNKLKPEMDEKGNLTTAGFACSQCGQPLFVYKLEQVSEKGKAYTNYFGRCNVAEHEKLIKLSQLKPEKDSDEAVTYSLGKFGQRALDFYSIHVTKESTHPVKPLAQIAGNRYASGPVGKALSDACMGTIASFLSKYQDIIIEHQKVVKGNQKRLESLRELAGKENLEYPSVTLPPQPHTKEGVDAYNEVIARVRMWVNLNLWQKLKLSRDDAKPLLRLKNFPSFPLVERQANEVDWWDMVCNVKKLINEKKEDGKVFWQNLAGYKRQEALRPYLSSEEDRKKGKKFARYQLGDLLLHLEKKHGEDWGKVYDEAWERIDKKVEGLSKHIKLEEERRSEDAQSKAALTDWLRAKASFVIEGLKEADKDEFCRCELKLQKWYGDLRGKPFAIEAENSILDISGFSKQYNCAFIWQKDGVKKLNLYLIINYFKGGKLRFKKIKPEAFEANRFYTVINKKSGEIVPMEVNFNFDDPNLIILPLAFGKRQGREFIWNDLLSLETGSLKLANGRVIEKTLYNRRTRQDEPALFVALTFERREVLDSSNIKPMNLIGVDRGENIPAVIALTDPEGCPLSRFKDSLGNPTHILRIGESYKEKQRTIQAKKEVEQRRAGGYSRKYASKAKNLADDMVRNTARDLLYYAVTQDAMLIFENLSRGFGRQGKRTFMAERQYTRMEDWLTAKLAYEGLPSKTYLSKTLAQYTSKTCSNCGFTITSADYDRVLEKLKKTATGWMTTINGKELKVEGQITYYNRYKRQNVVKDLSVELDRLSEESVNNDISSWTKGRSGEALSLLKKRFSHRPVQEKFVCLNCGFETHADEQAALNIARSWLFLRSQEYKKYQTNKTTGNTDKRAFVETWQSFYRKKLKEVWKPAV

SEQ ID NO: 43133 - protein, 977 aa, synthetic construct
  REGION 1..977: note = engineered CasX variant
QEIKRINKIRRRLVKDSNTKKAGKTGPMKTLLVRVMTPDLRERLENLRKKPENIPQPISNTSRANLNKLLTDYTEMKKAILHVYWEEFQKDPVGLMSRVAQPASKKIDQNKLKPEMDEKGNLTTAGFACSQCGQPLFVYKLEQVSEKGKAYTNYFGRCNVAEHEKLILLSQLKPEKDSDEAVTYSLGKFGQRALDFYSIHVTKESTHPVKPLAQIAGNRYASPVGKALSDACMGTIASFLSKYQDIIIEHQKVVKGNQKRLESLRELAGKENLEYPSVTLPPQPHTKEGVDAYNEVIARVRMWVNLNLWQKLKLSRDDAKPLLRLKNFPSFPLVERQANEVDWWDMVCNVKKLINEKKEDGKVFWQNLAGYKRQEALRPYLSSEEDRKKGKKFARYQLGDLLLHLEKKHGEDWGKVYDEAWERIDKKVEGLSKHIKLEEERRSEDAQSKAALTDWLRAKASFVIEGLKEADKDEFCRCELKLQKWYGDLRGKPFAIEAENSILDISGFSKQYNCAFIWQKDGVKKLNLYLIINYFKGGKLRFKKIKPEAFEANRFYTVINKKSGEIVPMEVNFNFDDPNLIILPLAFGKRQGREFIWNDLLSLETGSLKLANGRVIEKTLYNRRTRQDEPALFVALTFERREVLDSSNIKPMNLIGVDRGENIPAVIALTDPEGCPLSRFKDSLGNPTHILRIGESYKEKQRTIQAKKEVEQRRAGGYSRKYASKAKNLADDMVRNTARDLLYYAVTQDAMLIFENLSRGFGRQGKRTFMAERQYTRMEDWLTAKLAYEGLPSKTYLSKTLAQYTSKTCSNCGFTITSADYDRVLEKLKKTATGWMTTINGKELKVEGQITYYNRYKRQNVVKDLSVELDRLSEESVNNDISSWTKGRSGEALSLLKKRFSHRPVQEKFVCLNCGFETHADEQAALNIARSWLFLRSQEYKKYQTNKTTGNTDKRAFVETWQSFYRKKLKEVWKPAV

SEQ ID NO: 43134 - protein, 978 aa, synthetic construct
  REGION 1..978: note = engineered CasX variant
QEIKRINKIRRRLVKDSNTKKAGKTGPMKTLLVRVMTPDLRERLENLRKKPENIPQPISNTSRANLNKLLTDYTEMKKAILHVYWEEFQKDPVGLMSRVAQPASKKIDQNKLKPEMDEKGNLTTAGFACSQCGQPLFVYKLEQVSEKGKAYTNYFGRCNVAEHEKLILLSQLKPEKDSDEAVTYSLGKFGQRALDFYSIHVTKESTHPVKPLAQIAGNRYASYPVGKALSDACMGTIASFLSKYQDIIIEHQKVVKGNQKRLESLRELAGKENLEYPSVTLPPQPHTKEGVDAYNEVIARVRMWVNLNLWQKLKLSRDDAKPLLRLKGFPSFPLVERQANEVDWWDMVCNVKKLINEKKEDGKVFWQNLAGYKRQEALRPYLSSEEDRKKGKKFARYQLGDLLNHLEKKHGEDWGKVYDEAWERIDKKVEGLSKHIKLEEERRSEDAQSKAALTDWLRAKASFVIEGLKEADKDEFCRCELKLQKWYGDLRGKPFAIEAENSILDISGFSKQYNCAFIWQKDGVKKLNLYLIINYFKGGKLRFKKIKPEAFEANRFYTVINKKSGEIVPMEVNFNFDDPNLIILPLAFGKRQGREFIWNDLLSLETGSLKLANGRVIEKTLYNRRTRQDEPALFVALTFERREVLDSSNIKPMNLIGVDRGENIPAVIALTDPEGCPLSRFKDSLGNPTHILRIGESYKEKQRTIQAKKEVEQRRAGGYSRKYASKAKNLADDMVRNTARDLLYYAVTQDAMLIFENLSRGFGRQGKRTFMAERQYTRMEDWLTAKLAYEGLPSKTYLSKTLAQYTSKTCSNCGFTITSADYDRVLEKLKKTATGWMTTINGKELKVEGQITYYNRYKRQNVVKDLSVELDRLSEESVNNDISSWTKGRSGEALSLLKKRFSHRPVQEKFVCLNCGFETHADEQAALNIARSWLFLRSQEYKKYQTNKTTGNTDKRAFVETWQSFYRKKLKEVWKPAV

SEQ ID NO: 43135 - protein, 978 aa, synthetic construct
  REGION 1..978: note = engineered CasX variant
QEIKRINKIRRRLVKDSNTKKAGKTGPMKTLLVRVMTPDLRERLENLRKKPENIPQPISNTSRANLNKLLTDYTEMKKAILHVYWEEFQKDPVGLMSRVAQPASKKIDQNKLKPEMDEKGNLTTAGFACSQCGQPLFVYKLEQVSEKGKAYTNYFGRCNVAEHEKLILLSQLKPEKDSDEAVTYSLGKFGQRALDFYSIHVTKESTHPVKPLAQIAGNRYASHPVGKALSDACMGTIASFLSKYQDIIIEHQKVVKGNQKRLESLRELAGKENLEYPSVTLPPQPHTKEGVDAYNEVIARVRMWVNLNLWQKLKLSRDDAKPLLRLKGFPSFPLVERQANEVDWWDMVCNVKKLINEKKEDGKVFWQNLAGYKRQEALRPYLSSEEDRKKGKKFARYQLGDLLNHLEKKHGEDWGKVYDEAWERIDKKVEGLSKHIKLEEERRSEDAQSKAALTDWLRAKASFVIEGLKEADKDEFCRCELKLQKWYGDLRGKPFAIEAENSILDISGFSKQYNCAFIWQKDGVKKLNLYLIINYFKGGKLRFKKIKPEAFEANRFYTVINKKSGEIVPMEVNFNFDDPNLIILPLAFGKRQGREFIWNDLLSLETGSLKLANGRVIEKTLYNRRTRQDEPALFVALTFERREVLDSSNIKPMNLIGVDRGENIPAVIALTDPEGCPLSRFKDSLGNPTHILRIGESYKEKQRTIQAKKEVEQRRAGGYSRKYASKAKNLADDMVRNTARDLLYYAVTQDAMLIFENLSRGFGRQGKRTFMAERQYTRMEDWLTAKLAYEGLPSKTYLSKTLAQYTSKTCSNCGFTITSADYDRVLEKLKKTATGWMTTINGKELKVEGQITYYNRYKRQNVVKDLSVELDRLSEESVNNDISSWTKGRSGEALSLLKKRFSHRPVQEKFVCLNCGFETHADEQAALNIARSWLFLRSQEYKKYQTNKTTGNTDKRAFVETWQSFYRKKLKEVWKPAV

SEQ ID NO: 43136 - protein, 978 aa, synthetic construct
  REGION 1..978: note = engineered CasX variant
QEIKRINKIRRRLVKDSNTKKAGKTGPMKTLLVRVMTPDLRERLENLRKKPENIPQPISNTSRANLNKLLTDYTEMKKAILHVYWEEFQKDPVGLMSRVAQPASKKIDQNKLKPEMDEKGNLTTAGFACSQCGQPLFVYKLEQVSEKGKAYTNYFGRCNVAEHEKLILLSQLKPEKDSDEAVTYSLGKFGQRALDFYSIHVTKESTHPVKPLAQIAGNRYASSPVGKALSDACMGTIASFLSKYQDIIIEHQKVVKGNQKRLESLRELAGKENLEYPSVTLPPQPHTKEGVDAYNEVIARVRMWVNLNLWQKLKLSRDDAKPLLRLKGFPSFPLVERQANEVDWWDMVCNVKKLINEKKEDGKVFWQNLAGYKRQEALRPYLSSEEDRKKGKKFARYQLGDLLNHLEKKHGEDWGKVYDEAWERIDKKVEGLSKHIKLEEERRSEDAQSKAALTDWLRAKASFVIEGLKEADKDEFCRCELKLQKWYGDLRGKPFAIEAENSILDISGFSKQYNCAFIWQKDGVKKLNLYLIINYFKGGKLRFKKIKPEAFEANRFYTVINKKSGEIVPMEVNFNFDDPNLIILPLAFGKRQGREFIWNDLLSLETGSLKLANGRVIEKTLYNRRTRQDEPALFVALTFERREVLDSSNIKPMNLIGVDRGENIPAVIALTDPEGCPLSRFKDSLGNPTHILRIGESYKEKQRTIQAKKEVEQRRAGGYSRKYASKAKNLADDMVRNTARDLLYYAVTQDAMLIFENLSRGFGRQGKRTFMAERQYTRMEDWLTAKLAYEGLPSKTYLSKTLAQYTSKTCSNCGFTITSADYDRVLEKLKKTATGWMTTINGKELKVEGQITYYNRYKRQNVVKDLSVELDRLSEESVNNDISSWTKGRSGEALSLLKKRFSHRPVQEKFVCLNCGFETHADEQAALNIARSWLFLRSQEYKKYQTNKTTGNTDKRAFVETWQSFYRKKLKEVWKPAV

SEQ ID NO: 43137 - protein, 978 aa, synthetic construct
  REGION 1..978: note = engineered CasX variant
QEIKRINKIRRRLVKDSNTKKAGKTGPMKTLLVRVMTPDLRERLENLRKKPENIPQPISNTSRANLNKLLTDYTEMKKAILHVYWEEFQKDPVGLMSRVAQPASKKIDQNKLKPEMDEKGNLTTAGFACSQCGQPLFVYKLEQVSEKGKAYTNYFGRCNVAEHEKLILLSQLKPEKDSDEAVTYSLGKFGQRALDFYSIHVTKESTHPVKPLAQIAGNRYASTPVGKALSDACMGTIASFLSKYQDIIIEHQKVVKGNQKRLESLRELAGKENLEYPSVTLPPQPHTKEGVDAYNEVIARVRMWVNLNLWQKLKLSRDDAKPLLRLKGFPSFPLVERQANEVDWWDMVCNVKKLINEKKEDGKVFWQNLAGYKRQEALRPYLSSEEDRKKGKKFARYQLGDLLNHLEKKHGEDWGKVYDEAWERIDKKVEGLSKHIKLEEERRSEDAQSKAALTDWLRAKASFVIEGLKEADKDEFCRCELKLQKWYGDLRGKPFAIEAENSILDISGFSKQYNCAFIWQKDGVKKLNLYLIINYFKGGKLRFKKIKPEAFEANRFYTVINKKSGEIVPMEVNFNFDDPNLIILPLAFGKRQGREFIWNDLLSLETGSLKLANGRVIEKTLYNRRTRQDEPALFVALTFERREVLDSSNIKPMNLIGVDRGENIPAVIALTDPEGCPLSRFKDSLGNPTHILRIGESYKEKQRTIQAKKEVEQRRAGGYSRKYASKAKNLADDMVRNTARDLLYYAVTQDAMLIFENLSRGFGRQGKRTFMAERQYTRMEDWLTAKLAYEGLPSKTYLSKTLAQYTSKTCSNCGFTITSADYDRVLEKLKKTATGWMTTINGKELKVEGQITYYNRYKRQNVVKDLSVELDRLSEESVNNDISSWTKGRSGEALSLLKKRFSHRPVQEKFVCLNCGFETHADEQAALNIARSWLFLRSQEYKKYQTNKTTGNTDKRAFVETWQSFYRKKLKEVWKPAV

SEQ ID NO: 43138 - protein, 978 aa, synthetic construct
  REGION 1..978: note = engineered CasX variant
QEIKRINKIRRRLVKDSNTKKAGKTGPMKTLLVRVMTPDLRERLENLRKKPENIPQPISNTSRANLNKLLTDYTEMKKAILHVYWEEFQKDPVGLMSRVAQPASKKIDQNKLKPEMDEKGNLTTAGFACSQCGQPLFVYKLEQVSEKGKAYTNYFGRCNVAEHEKLILLSQLKPEKDSDEAVTYSLGKFGQRALDFYSIHVTKESTHPVKPLAQIAGNRYASAPVGKALSDACMGTIASFLSKYQDIIIEHQKVVKGNQKRLESLRELAGKENLEYPSVTLPPQPHTKEGVDAYNEVIARVRMWVNLNLWQKLKLSRDDAKPLLRLKGFPSFPLVERQANEVDWWDMVCNVKKLINEKKEDGKVFWQNLAGYKRQEALRPYLSSEEDRKKGKKFARYQLGDLLNHLEKKHGEDWGKVYDEAWERIDKKVEGLSKHIKLEEERRSEDAQSKAALTDWLRAKASFVIEGLKEADKDEFCRCELKLQKWYGDLRGKPFAIEAENSILDISGFSKQYNCAFIWQKDGVKKLNLYLIINYFKGGKLRFKKIKPEAFEANRFYTVINKKSGEIVPMEVNFNFDDPNLIILPLAFGKRQGREFIWNDLLSLETGSLKLANGRVIEKTLYNRRTRQDEPALFVALTFERREVLDSSNIKPMNLIGVDRGENIPAVIALTDPEGCPLSRFKDSLGNPTHILRIGESYKEKQRTIQAKKEVEQRRAGGYSRKYASKAKNLADDMVRNTARDLLYYAVTQDAMLIFENLSRGFGRQGKRTFMAERQYTRMEDWLTAKLAYEGLPSKTYLSKTLAQYTSKTCSNCGFTITSADYDRVLEKLKKTATGWMTTINGKELKVEGQITYYNRYKRQNVVKDLSVELDRLSEESVNNDISSWTKGRSGEALSLLKKRFSHRPVQEKFVCLNCGFETHADEQAALNIARSWLFLRSQEYKKYQTNKTTGNTDKRAFVETWQSFYRKKLKEVWKPAV

SEQ ID NO: 43139 - protein, 978 aa, synthetic construct
  REGION 1..978: note = engineered CasX variant
QEIKRINKIRRRLVKDSNTKKAGKTGPMKTLLVRVMTPDLRERLENLRKKPENIPQPISNTSRANLNKLLTDYTEMKKAILHVYWEEFQKDPVGLMSRVAQPASKKIDQNKLKPEMDEKGNLTTAGFACSQCGQPLFVYKLEQVSEKGKAYTNYFGRCNVAEHEKLILLSQLKPEKDSDEAVTYSLGKFGQRALDFYSIHVTKESTHPVKPLAQIAGNRYASVPVGKALSDACMGTIASFLSKYQDIIIEHQKVVKGNQKRLESLRELAGKENLEYPSVTLPPQPHTKEGVDAYNEVIARVRMWVNLNLWQKLKLSRDDAKPLLRLKGFPSFPLVERQANEVDWWDMVCNVKKLINEKKEDGKVFWQNLAGYKRQEALRPYLSSEEDRKKGKKFARYQLGDLLNHLEKKHGEDWGKVYDEAWERIDKKVEGLSKHIKLEEERRSEDAQSKAALTDWLRAKASFVIEGLKEADKDEFCRCELKLQKWYGDLRGKPFAIEAENSILDISGFSKQYNCAFIWQKDGVKKLNLYLIINYFKGGKLRFKKIKPEAFEANRFYTVINKKSGEIVPMEVNFNFDDPNLIILPLAFGKRQGREFIWNDLLSLETGSLKLANGRVIEKTLYNRRTRQDEPALFVALTFERREVLDSSNIKPMNLIGVDRGENIPAVIALTDPEGCPLSRFKDSLGNPTHILRIGESYKEKQRTIQAKKEVEQRRAGGYSRKYASKAKNLADDMVRNTARDLLYYAVTQDAMLIFENLSRGFGRQGKRTFMAERQYTRMEDWLTAKLAYEGLPSKTYLSKTLAQYTSKTCSNCGFTITSADYDRVLEKLKKTATGWMTTINGKELKVEGQITYYNRYKRQNVVKDLSVELDRLSEESVNNDISSWTKGRSGEALSLLKKRFSHRPVQEKFVCLNCGFETHADEQAALNIARSWLFLRSQEYKKYQTNKTTGNTDKRAFVETWQSFYRKKLKEVWKPAV

SEQ ID NO: 43140 - protein, 978 aa, synthetic construct
  REGION 1..978: note = engineered CasX variant
QEIKRINKIRRRLVKDSNTKKAGKTGPMKTLLVRVMTPDLRERLENLRKKPENIPQPISNTSRANLNKLLTDYTEMKKAILHVYWEEFQKDPVGLMSRVAQPASKKIDQNKLKPEMDEKGNLTTAGFACSQCGQPLFVYKLEQVSEKGKAYTNYFGRCNVAEHEKLIKLSQLKPEKDSDEAVTYSLGKFGQRALDFYSIHVTKESTHPVKPLAQIAGNRYASGPVGKALSDACMGTIASFLSKYQDIIIEHQKVVKGNQKRLESLRELAGKENLEYPSVTLPPQPHTKEGVDAYNEVIARVRMWVNLNLWQKLKLSRDDAKPLLRLKGFPSFPLVERQANEVDWWDMVCNVKKLINEKKEDGKVFWQNLAGYKRQEALRPYLSSEEDRKKGKKFARYQLGDLLNHLEKKHGEDWGKVYDEAWERIDKKVEGLSKHIKLEEERRSEDAQSKAALTDWLRAKASFVIEGLKEADKDEFCRCELKLQKWYGDLRGKPFAIEAENSILDISGFSKQYNCAFIWQKDGVKKLNLYLIINYFKGGKLRFKKIKPEAFEANRFYTVINKKSGEIVPMEVNFNFDDPNLIILPLAFGKRQGREFIWNDLLSLETGSLKLANGRVIEKTLYNRRTRQDEPALFVALTFERREVLDSSNIKPMNLIGVDRGENIPAVIALTDPEGCPLSRFKDSLGNPTHILRIGESYKEKQRTIQAKKEVEQRRAGGYSRKYASKAKNLADDMVRNTARDLLYYAVTQDAMLIFENLSRGFGRQGKRTFMAERQYTRMEDWLTAKLAYEGLPSKTYLSKTLAQYTSKTCSNCGFTITSADYDRVLEKLKKTATGWMTTINGKELKVEGQITYYNRYKRQNVVKDLSVELDRLSEESVNNDISSWTKGRSGEALSLLKKRFSHRPVQEKFVCLNCGFETHADEQAALNIARSWLFLRSQEYKKYQTNKTTGNTDKRAFVETWQSFYRKKLKEVWKPAV

SEQ ID NO: 43141 - protein, 977 aa, synthetic construct
  REGION 1..977: note = engineered CasX variant
QEIKRINKIRRRLVKDSNTKKAGKTGPMKTLLVRVMTPDLRERLENLRKKPENIPQPISNTSRANLNKLLTDYTEMKKAILHVYWEEFQKDPVGLMSRVAQPASKKIDQNKLKPEMDEKGNLTTAGFACSQCGQPLFVYKLEQVSEKGKAYTNYFGRCNVAEHEKLILLSQLKPEKDSDEAVTYSLGKFGQRALDFYSIHVTKESTHPVKPLAQIAGNRYASPVGKALSDACMGTIASFLSKYQDIIIEHQKVVKGNQKRLESLRELAGKENLEYPSVTLPPQPHTKEGVDAYNEVIARVRMWVNLNLWQKLKLSRDDAKPLLRLKGFPSFPLVERQANEVDWWDMVCNVKKLINEKKEDGKVFWQNLAGYKRQEALRPYLSSEEDRKKGKKFARYQLGDLLNHLEKKHGEDWGKVYDEAWERIDKKVEGLSKHIKLEEERRSEDAQSKAALTDWLRAKASFVIEGLKEADKDEFCRCELKLQKWYGDLRGKPFAIEAENSILDISGFSKQYNCAFIWQKDGVKKLNLYLIINYFKGGKLRFKKIKPEAFEANRFYTVINKKSGEIVPMEVNFNFDDPNLIILPLAFGKRQGREFIWNDLLSLETGSLKLANGRVIEKTLYNRRTRQDEPALFVALTFERREVLDSSNIKPMNLIGVDRGENIPAVIALTDPEGCPLSRFKDSLGNPTHILRIGESYKEKQRTIQAKKEVEQRRAGGYSRKYASKAKNLADDMVRNTARDLLYYAVTQDAMLIFENLSRGFGRQGKRTFMAERQYTRMEDWLTAKLAYEGLPSKTYLSKTLAQYTSKTCSNCGFTITSADYDRVLEKLKKTATGWMTTINGKELKVEGQITYYNRYKRQNVVKDLSVELDRLSEESVNNDISSWTKGRSGEALSLLKKRFSHRPVQEKFVCLNCGFETHADEQAALNIARSWLFLRSQEYKKYQTNKTTGNTDKRAFVETWQSFYRKKLKEVWKPAV

SEQ ID NO: 43142 - protein, 978 aa, synthetic construct
  REGION 1..978: note = engineered CasX variant
QEIKRINKIRRRLVKDSNTKKAGKTGPMKTLLVRVMTPDLRERLENLRKKPENIPQPISNTSRANLNKLLTDYTEMKKAILHVYWEEFQKDPVGLMSRVAQPASKKIDQNKLKPEMDEKGNLTTAGFACSQCGQPLFVYKLEQVSEKGKAYTNYFGRCNVAEHEKLILLSQLKPEKDSDEAVTYSLGKFGQRALDFYSIHVTKESTHPVKPLAQIAGNRYASYPVGKALSDACMGTIASFLSKYQDIIIEHQKVVKGNQKRLESLRELAGKENLEYPSVTLPPQPHTKEGVDAYNEVIARVRMWVNLNLWQKLKLSRDDAKPLLRLKGFPSFPLVERQANEVDWWDMVCNVKKLINEKKEDGKVFWQNLAGYKRQEALRPYLSSEEDRKKGKKFARYQLGDLLWHLEKKHGEDWGKVYDEAWERIDKKVEGLSKHIKLEEERRSEDAQSKAALTDWLRAKASFVIEGLKEADKDEFCRCELKLQKWYGDLRGKPFAIEAENSILDISGFSKQYNCAFIWQKDGVKKLNLYLIINYFKGGKLRFKKIKPEAFEANRFYTVINKKSGEIVPMEVNFNFDDPNLIILPLAFGKRQGREFIWNDLLSLETGSLKLANGRVIEKTLYNRRTRQDEPALFVALTFERREVLDSSNIKPMNLIGVDRGENIPAVIALTDPEGCPLSRFKDSLGNPTHILRIGESYKEKQRTIQAKKEVEQRRAGGYSRKYASKAKNLADDMVRNTARDLLYYAVTQDAMLIFENLSRGFGRQGKRTFMAERQYTRMEDWLTAKLAYEGLPSKTYLSKTLAQYTSKTCSNCGFTITSADYDRVLEKLKKTATGWMTTINGKELKVEGQITYYNRYKRQNVVKDLSVELDRLSEESVNNDISSWTKGRSGEALSLLKKRFSHRPVQEKFVCLNCGFETHADEQAALNIARSWLFLRSQEYKKYQTNKTTGNTDKRAFVETWQSFYRKKLKEVWKPAV

SEQ ID NO: 43143 - protein, 978 aa, synthetic construct
  REGION 1..978: note = engineered CasX variant
QEIKRINKIRRRLVKDSNTKKAGKTGPMKTLLVRVMTPDLRERLENLRKKPENIPQPISNTSRANLNKLLTDYTEMKKAILHVYWEEFQKDPVGLMSRVAQPASKKIDQNKLKPEMDEKGNLTTAGFACSQCGQPLFVYKLEQVSEKGKAYTNYFGRCNVAEHEKLILLSQLKPEKDSDEAVTYSLGKFGQRALDFYSIHVTKESTHPVKPLAQIAGNRYASHPVGKALSDACMGTIASFLSKYQDIIIEHQKVVKGNQKRLESLRELAGKENLEYPSVTLPPQPHTKEGVDAYNEVIARVRMWVNLNLWQKLKLSRDDAKPLLRLKGFPSFPLVERQANEVDWWDMVCNVKKLINEKKEDGKVFWQNLAGYKRQEALRPYLSSEEDRKKGKKFARYQLGDLLWHLEKKHGEDWGKVYDEAWERIDKKVEGLSKHIKLEEERRSEDAQSKAALTDWLRAKASFVIEGLKEADKDEFCRCELKLQKWYGDLRGKPFAIEAENSILDISGFSKQYNCAFIWQKDGVKKLNLYLIINYFKGGKLRFKKIKPEAFEANRFYTVINKKSGEIVPMEVNFNFDDPNLIILPLAFGKRQGREFIWNDLLSLETGSLKLANGRVIEKTLYNRRTRQDEPALFVALTFERREVLDSSNIKPMNLIGVDRGENIPAVIALTDPEGCPLSRFKDSLGNPTHILRIGESYKEKQRTIQAKKEVEQRRAGGYSRKYASKAKNLADDMVRNTARDLLYYAVTQDAMLIFENLSRGFGRQGKRTFMAERQYTRMEDWLTAKLAYEGLPSKTYLSKTLAQYTSKTCSNCGFTITSADYDRVLEKLKKTATGWMTTINGKELKVEGQITYYNRYKRQNVVKDLSVELDRLSEESVNNDISSWTKGRSGEALSLLKKRFSHRPVQEKFVCLNCGFETHADEQAALNIARSWLFLRSQEYKKYQTNKTTGNTDKRAFVETWQSFYRKKLKEVWKPAV

SEQ ID NO: 43144 - protein, 978 aa, synthetic construct
  REGION 1..978: note = engineered CasX variant
QEIKRINKIRRRLVKDSNTKKAGKTGPMKTLLVRVMTPDLRERLENLRKKPENIPQPISNTSRANLNKLLTDYTEMKKAILHVYWEEFQKDPVGLMSRVAQPASKKIDQNKLKPEMDEKGNLTTAGFACSQCGQPLFVYKLEQVSEKGKAYTNYFGRCNVAEHEKLILLSQLKPEKDSDEAVTYSLGKFGQRALDFYSIHVTKESTHPVKPLAQIAGNRYASSPVGKALSDACMGTIASFLSKYQDIIIEHQKVVKGNQKRLESLRELAGKENLEYPSVTLPPQPHTKEGVDAYNEVIARVRMWVNLNLWQKLKLSRDDAKPLLRLKGFPSFPLVERQANEVDWWDMVCNVKKLINEKKEDGKVFWQNLAGYKRQEALRPYLSSEEDRKKGKKFARYQLGDLLWHLEKKHGEDWGKVYDEAWERIDKKVEGLSKHIKLEEERRSEDAQSKAALTDWLRAKASFVIEGLKEADKDEFCRCELKLQKWYGDLRGKPFAIEAENSILDISGFSKQYNCAFIWQKDGVKKLNLYLIINYFKGGKLRFKKIKPEAFEANRFYTVINKKSGEIVPMEVNFNFDDPNLIILPLAFGKRQGREFIWNDLLSLETGSLKLANGRVIEKTLYNRRTRQDEPALFVALTFERREVLDSSNIKPMNLIGVDRGENIPAVIALTDPEGCPLSRFKDSLGNPTHILRIGESYKEKQRTIQAKKEVEQRRAGGYSRKYASKAKNLADDMVRNTARDLLYYAVTQDAMLIFENLSRGFGRQGKRTFMAERQYTRMEDWLTAKLAYEGLPSKTYLSKTLAQYTSKTCSNCGFTITSADYDRVLEKLKKTATGWMTTINGKELKVEGQITYYNRYKRQNVVKDLSVELDRLSEESVNNDISSWTKGRSGEALSLLKKRFSHRPVQEKFVCLNCGFETHADEQAALNIARSWLFLRSQEYKKYQTNKTTGNTDKRAFVETWQSFYRKKLKEVWKPAV

SEQ ID NO: 43145 - protein, 978 aa, synthetic construct
  REGION 1..978: note = engineered CasX variant
QEIKRINKIRRRLVKDSNTKKAGKTGPMKTLLVRVMTPDLRERLENLRKKPENIPQPISNTSRANLNKLLTDYTEMKKAILHVYWEEFQKDPVGLMSRVAQPASKKIDQNKLKPEMDEKGNLTTAGFACSQCGQPLFVYKLEQVSEKGKAYTNYFGRCNVAEHEKLILLSQLKPEKDSDEAVTYSLGKFGQRALDFYSIHVTKESTHPVKPLAQIAGNRYASTPVGKALSDACMGTIASFLSKYQDIIIEHQKVVKGNQKRLESLRELAGKENLEYPSVTLPPQPHTKEGVDAYNEVIARVRMWVNLNLWQKLKLSRDDAKPLLRLKGFPSFPLVERQANEVDWWDMVCNVKKLINEKKEDGKVFWQNLAGYKRQEALRPYLSSEEDRKKGKKFARYQLGDLLWHLEKKHGEDWGKVYDEAWERIDKKVEGLSKHIKLEEERRSEDAQSKAALTDWLRAKASFVIEGLKEADKDEFCRCELKLQKWYGDLRGKPFAIEAENSILDISGFSKQYNCAFIWQKDGVKKLNLYLIINYFKGGKLRFKKIKPEAFEANRFYTVINKKSGEIVPMEVNFNFDDPNLIILPLAFGKRQGREFIWNDLLSLETGSLKLANGRVIEKTLYNRRTRQDEPALFVALTFERREVLDSSNIKPMNLIGVDRGENIPAVIALTDPEGCPLSRFKDSLGNPTHILRIGESYKEKQRTIQAKKEVEQRRAGGYSRKYASKAKNLADDMVRNTARDLLYYAVTQDAMLIFENLSRGFGRQGKRTFMAERQYTRMEDWLTAKLAYEGLPSKTYLSKTLAQYTSKTCSNCGFTITSADYDRVLEKLKKTATGWMTTINGKELKVEGQITYYNRYKRQNVVKDLSVELDRLSEESVNNDISSWTKGRSGEALSLLKKRFSHRPVQEKFVCLNCGFETHADEQAALNIARSWLFLRSQEYKKYQTNKTTGNTDKRAFVETWQSFYRKKLKEVWKPAV

SEQ ID NO: 43146 - protein, 978 aa, synthetic construct
  REGION 1..978: note = engineered CasX variant
QEIKRINKIRRRLVKDSNTKKAGKTGPMKTLLVRVMTPDLRERLENLRKKPENIPQPISNTSRANLNKLLTDYTEMKKAILHVYWEEFQKDPVGLMSRVAQPASKKIDQNKLKPEMDEKGNLTTAGFACSQCGQPLFVYKLEQVSEKGKAYTNYFGRCNVAEHEKLILLSQLKPEKDSDEAVTYSLGKFGQRALDFYSIHVTKESTHPVKPLAQIAGNRYASAPVGKALSDACMGTIASFLSKYQDIIIEHQKVVKGNQKRLESLRELAGKENLEYPSVTLPPQPHTKEGVDAYNEVIARVRMWVNLNLWQKLKLSRDDAKPLLRLKGFPSFPLVERQANEVDWWDMVCNVKKLINEKKEDGKVFWQNLAGYKRQEALRPYLSSEEDRKKGKKFARYQLGDLLWHLEKKHGEDWGKVYDEAWERIDKKVEGLSKHIKLEEERRSEDAQSKAALTDWLRAKASFVIEGLKEADKDEFCRCELKLQKWYGDLRGKPFAIEAENSILDISGFSKQYNCAFIWQKDGVKKLNLYLIINYFKGGKLRFKKIKPEAFEANRFYTVINKKSGEIVPMEVNFNFDDPNLIILPLAFGKRQGREFIWNDLLSLETGSLKLANGRVIEKTLYNRRTRQDEPALFVALTFERREVLDSSNIKPMNLIGVDRGENIPAVIALTDPEGCPLSRFKDSLGNPTHILRIGESYKEKQRTIQAKKEVEQRRAGGYSRKYASKAKNLADDMVRNTARDLLYYAVTQDAMLIFENLSRGFGRQGKRTFMAERQYTRMEDWLTAKLAYEGLPSKTYLSKTLAQYTSKTCSNCGFTITSADYDRVLEKLKKTATGWMTTINGKELKVEGQITYYNRYKRQNVVKDLSVELDRLSEESVNNDISSWTKGRSGEALSLLKKRFSHRPVQEKFVCLNCGFETHADEQAALNIARSWLFLRSQEYKKYQTNKTTGNTDKRAFVETWQSFYRKKLKEVWKPAV

SEQ ID NO: 43147 - protein, 978 aa, synthetic construct
  REGION 1..978: note = engineered CasX variant
QEIKRINKIRRRLVKDSNTKKAGKTGPMKTLLVRVMTPDLRERLENLRKKPENIPQPISNTSRANLNKLLTDYTEMKKAILHVYWEEFQKDPVGLMSRVAQPASKKIDQNKLKPEMDEKGNLTTAGFACSQCGQPLFVYKLEQVSEKGKAYTNYFGRCNVAEHEKLILLSQLKPEKDSDEAVTYSLGKFGQRALDFYSIHVTKESTHPVKPLAQIAGNRYASVPVGKALSDACMGTIASFLSKYQDIIIEHQKVVKGNQKRLESLRELAGKENLEYPSVTLPPQPHTKEGVDAYNEVIARVRMWVNLNLWQKLKLSRDDAKPLLRLKGFPSFPLVERQANEVDWWDMVCNVKKLINEKKEDGKVFWQNLAGYKRQEALRPYLSSEEDRKKGKKFARYQLGDLLWHLEKKHGEDWGKVYDEAWERIDKKVEGLSKHIKLEEERRSEDAQSKAALTDWLRAKASFVIEGLKEADKDEFCRCELKLQKWYGDLRGKPFAIEAENSILDISGFSKQYNCAFIWQKDGVKKLNLYLIINYFKGGKLRFKKIKPEAFEANRFYTVINKKSGEIVPMEVNFNFDDPNLIILPLAFGKRQGREFIWNDLLSLETGSLKLANGRVIEKTLYNRRTRQDEPALFVALTFERREVLDSSNIKPMNLIGVDRGENIPAVIALTDPEGCPLSRFKDSLGNPTHILRIGESYKEKQRTIQAKKEVEQRRAGGYSRKYASKAKNLADDMVRNTARDLLYYAVTQDAMLIFENLSRGFGRQGKRTFMAERQYTRMEDWLTAKLAYEGLPSKTYLSKTLAQYTSKTCSNCGFTITSADYDRVLEKLKKTATGWMTTINGKELKVEGQITYYNRYKRQNVVKDLSVELDRLSEESVNNDISSWTKGRSGEALSLLKKRFSHRPVQEKFVCLNCGFETHADEQAALNIARSWLFLRSQEYKKYQTNKTTGNTDKRAFVETWQSFYRKKLKEVWKPAV

SEQ ID NO: 43148 - protein, 978 aa, synthetic construct
  REGION 1..978: note = engineered CasX variant
QEIKRINKIRRRLVKDSNTKKAGKTGPMKTLLVRVMTPDLRERLENLRKKPENIPQPISNTSRANLNKLLTDYTEMKKAILHVYWEEFQKDPVGLMSRVAQPASKKIDQNKLKPEMDEKGNLTTAGFACSQCGQPLFVYKLEQVSEKGKAYTNYFGRCNVAEHEKLIKLSQLKPEKDSDEAVTYSLGKFGQRALDFYSIHVTKESTHPVKPLAQIAGNRYASGPVGKALSDACMGTIASFLSKYQDIIIEHQKVVKGNQKRLESLRELAGKENLEYPSVTLPPQPHTKEGVDAYNEVIARVRMWVNLNLWQKLKLSRDDAKPLLRLKGFPSFPLVERQANEVDWWDMVCNVKKLINEKKEDGKVFWQNLAGYKRQEALRPYLSSEEDRKKGKKFARYQLGDLLWHLEKKHGEDWGKVYDEAWERIDKKVEGLSKHIKLEEERRSEDAQSKAALTDWLRAKASFVIEGLKEADKDEFCRCELKLQKWYGDLRGKPFAIEAENSILDISGFSKQYNCAFIWQKDGVKKLNLYLIINYFKGGKLRFKKIKPEAFEANRFYTVINKKSGEIVPMEVNFNFDDPNLIILPLAFGKRQGREFIWNDLLSLETGSLKLANGRVIEKTLYNRRTRQDEPALFVALTFERREVLDSSNIKPMNLIGVDRGENIPAVIALTDPEGCPLSRFKDSLGNPTHILRIGESYKEKQRTIQAKKEVEQRRAGGYSRKYASKAKNLADDMVRNTARDLLYYAVTQDAMLIFENLSRGFGRQGKRTFMAERQYTRMEDWLTAKLAYEGLPSKTYLSKTLAQYTSKTCSNCGFTITSADYDRVLEKLKKTATGWMTTINGKELKVEGQITYYNRYKRQNVVKDLSVELDRLSEESVNNDISSWTKGRSGEALSLLKKRFSHRPVQEKFVCLNCGFETHADEQAALNIARSWLFLRSQEYKKYQTNKTTGNTDKRAFVETWQSFYRKKLKEVWKPAV

SEQ ID NO: 43149 - protein, 977 aa, synthetic construct
  REGION 1..977: note = engineered CasX variant
QEIKRINKIRRRLVKDSNTKKAGKTGPMKTLLVRVMTPDLRERLENLRKKPENIPQPISNTSRANLNKLLTDYTEMKKAILHVYWEEFQKDPVGLMSRVAQPASKKIDQNKLKPEMDEKGNLTTAGFACSQCGQPLFVYKLEQVSEKGKAYTNYFGRCNVAEHEKLILLSQLKPEKDSDEAVTYSLGKFGQRALDFYSIHVTKESTHPVKPLAQIAGNRYASPVGKALSDACMGTIASFLSKYQDIIIEHQKVVKGNQKRLESLRELAGKENLEYPSVTLPPQPHTKEGVDAYNEVIARVRMWVNLNLWQKLKLSRDDAKPLLRLKGFPSFPLVERQANEVDWWDMVCNVKKLINEKKEDGKVFWQNLAGYKRQEALRPYLSSEEDRKKGKKFARYQLGDLLWHLEKKHGEDWGKVYDEAWERIDKKVEGLSKHIKLEEERRSEDAQSKAALTDWLRAKASFVIEGLKEADKDEFCRCELKLQKWYGDLRGKPFAIEAENSILDISGFSKQYNCAFIWQKDGVKKLNLYLIINYFKGGKLRFKKIKPEAFEANRFYTVINKKSGEIVPMEVNFNFDDPNLIILPLAFGKRQGREFIWNDLLSLETGSLKLANGRVIEKTLYNRRTRQDEPALFVALTFERREVLDSSNIKPMNLIGVDRGENIPAVIALTDPEGCPLSRFKDSLGNPTHILRIGESYKEKQRTIQAKKEVEQRRAGGYSRKYASKAKNLADDMVRNTARDLLYYAVTQDAMLIFENLSRGFGRQGKRTFMAERQYTRMEDWLTAKLAYEGLPSKTYLSKTLAQYTSKTCSNCGFTITSADYDRVLEKLKKTATGWMTTINGKELKVEGQITYYNRYKRQNVVKDLSVELDRLSEESVNNDISSWTKGRSGEALSLLKKRFSHRPVQEKFVCLNCGFETHADEQAALNIARSWLFLRSQEYKKYQTNKTTGNTDKRAFVETWQSFYRKKLKEVWKPAV

SEQ ID NO: 43150 - protein, 978 aa, synthetic construct
  REGION 1..978: note = engineered CasX variant
QEIKRINKIRRRLVKDSNTKKAGKTGPMKTLLVRVMTPDLRERLENLRKKPENIPQPISNTSRANLNKLLTDYTEMKKAILHVYWEEFQKDPVGLMSRVAQPASKKIDQNKLKPEMDEKGNLTTAGFACSQCGQPLFVYKLEQVSEKGKAYTNYFGRCNVAEHEKLILLSQLKPEKDSDEAVTYSLGKFGQRALDFYSIHVTKESTHPVKPLAQIAGNRYASYPVGKALSDACMGTIASFLSKYQDIIIEHQKVVKGNQKRLESLRELAGKENLEYPSVTLPPQPHTKEGVDAYNEVIARVRMWVNLNLWQKLKLSRDDAKPLLRLKGFPSFPLVERQANEVDWWDMVCNVKKLINEKKEDGKVFWQNLAGYKRQEALRPYLSSEEDRKKGKKFARYQLGDLLLHLYKKHGEDWGKVYDEAWERIDKKVEGLSKHIKLEEERRSEDAQSKAALTDWLRAKASFVIEGLKEADKDEFCRCELKLQKWYGDLRGKPFAIEAENSILDISGFSKQYNCAFIWQKDGVKKLNLYLIINYFKGGKLRFKKIKPEAFEANRFYTVINKKSGEIVPMEVNFNFDDPNLIILPLAFGKRQGREFIWNDLLSLETGSLKLANGRVIEKTLYNRRTRQDEPALFVALTFERREVLDSSNIKPMNLIGVDRGENIPAVIALTDPEGCPLSRFKDSLGNPTHILRIGESYKEKQRTIQAKKEVEQRRAGGYSRKYASKAKNLADDMVRNTARDLLYYAVTQDAMLIFENLSRGFGRQGKRTFMAERQYTRMEDWLTAKLAYEGLPSKTYLSKTLAQYTSKTCSNCGFTITSADYDRVLEKLKKTATGWMTTINGKELKVEGQITYYNRYKRQNVVKDLSVELDRLSEESVNNDISSWTKGRSGEALSLLKKRFSHRPVQEKFVCLNCGFETHADEQAALNIARSWLFLRSQEYKKYQTNKTTGNTDKRAFVETWQSFYRKKLKEVWKPAV

SEQ ID NO: 43151 - protein, 978 aa, synthetic construct
  REGION 1..978: note = engineered CasX variant
QEIKRINKIRRRLVKDSNTKKAGKTGPMKTLLVRVMTPDLRERLENLRKKPENIPQPISNTSRANLNKLLTDYTEMKKAILHVYWEEFQKDPVGLMSRVAQPASKKIDQNKLKPEMDEKGNLTTAGFACSQCGQPLFVYKLEQVSEKGKAYTNYFGRCNVAEHEKLILLSQLKPEKDSDEAVTYSLGKFGQRALDFYSIHVTKESTHPVKPLAQIAGNRYASHPVGKALSDACMGTIASFLSKYQDIIIEHQKVVKGNQKRLESLRELAGKENLEYPSVTLPPQPHTKEGVDAYNEVIARVRMWVNLNLWQKLKLSRDDAKPLLRLKGFPSFPLVERQANEVDWWDMVCNVKKLINEKKEDGKVFWQNLAGYKRQEALRPYLSSEEDRKKGKKFARYQLGDLLLHLYKKHGEDWGKVYDEAWERIDKKVEGLSKHIKLEEERRSEDAQSKAALTDWLRAKASFVIEGLKEADKDEFCRCELKLQKWYGDLRGKPFAIEAENSILDISGFSKQYNCAFIWQKDGVKKLNLYLIINYFKGGKLRFKKIKPEAFEANRFYTVINKKSGEIVPMEVNFNFDDPNLIILPLAFGKRQGREFIWNDLLSLETGSLKLANGRVIEKTLYNRRTRQDEPALFVALTFERREVLDSSNIKPMNLIGVDRGENIPAVIALTDPEGCPLSRFKDSLGNPTHILRIGESYKEKQRTIQAKKEVEQRRAGGYSRKYASKAKNLADDMVRNTARDLLYYAVTQDAMLIFENLSRGFGRQGKRTFMAERQYTRMEDWLTAKLAYEGLPSKTYLSKTLAQYTSKTCSNCGFTITSADYDRVLEKLKKTATGWMTTINGKELKVEGQITYYNRYKRQNVVKDLSVELDRLSEESVNNDISSWTKGRSGEALSLLKKRFSHRPVQEKFVCLNCGFETHADEQAALNIARSWLFLRSQEYKKYQTNKTTGNTDKRAFVETWQSFYRKKLKEVWKPAV

SEQ ID NO: 43152 - protein, 978 aa, synthetic construct
  REGION 1..978: note = engineered CasX variant
QEIKRINKIRRRLVKDSNTKKAGKTGPMKTLLVRVMTPDLRERLENLRKKPENIPQPISNTSRANLNKLLTDYTEMKKAILHVYWEEFQKDPVGLMSRVAQPASKKIDQNKLKPEMDEKGNLTTAGFACSQCGQPLFVYKLEQVSEKGKAYTNYFGRCNVAEHEKLILLSQLKPEKDSDEAVTYSLGKFGQRALDFYSIHVTKESTHPVKPLAQIAGNRYASSPVGKALSDACMGTIASFLSKYQDIIIEHQKVVKGNQKRLESLRELAGKENLEYPSVTLPPQPHTKEGVDAYNEVIARVRMWVNLNLWQKLKLSRDDAKPLLRLKGFPSFPLVERQANEVDWWDMVCNVKKLINEKKEDGKVFWQNLAGYKRQEALRPYLSSEEDRKKGKKFARYQLGDLLLHLYKKHGEDWGKVYDEAWERIDKKVEGLSKHIKLEEERRSEDAQSKAALTDWLRAKASFVIEGLKEADKDEFCRCELKLQKWYGDLRGKPFAIEAENSILDISGFSKQYNCAFIWQKDGVKKLNLYLIINYFKGGKLRFKKIKPEAFEANRFYTVINKKSGEIVPMEVNFNFDDPNLIILPLAFGKRQGREFIWNDLLSLETGSLKLANGRVIEKTLYNRRTRQDEPALFVALTFERREVLDSSNIKPMNLIGVDRGENIPAVIALTDPEGCPLSRFKDSLGNPTHILRIGESYKEKQRTIQAKKEVEQRRAGGYSRKYASKAKNLADDMVRNTARDLLYYAVTQDAMLIFENLSRGFGRQGKRTFMAERQYTRMEDWLTAKLAYEGLPSKTYLSKTLAQYTSKTCSNCGFTITSADYDRVLEKLKKTATGWMTTINGKELKVEGQITYYNRYKRQNVVKDLSVELDRLSEESVNNDISSWTKGRSGEALSLLKKRFSHRPVQEKFVCLNCGFETHADEQAALNIARSWLFLRSQEYKKYQTNKTTGNTDKRAFVETWQSFYRKKLKEVWKPAV

SEQ ID NO: 43153 - protein, 978 aa, synthetic construct
  REGION 1..978: note = engineered CasX variant
QEIKRINKIRRRLVKDSNTKKAGKTGPMKTLLVRVMTPDLRERLENLRKKPENIPQPISNTSRANLNKLLTDYTEMKKAILHVYWEEFQKDPVGLMSRVAQPASKKIDQNKLKPEMDEKGNLTTAGFACSQCGQPLFVYKLEQVSEKGKAYTNYFGRCNVAEHEKLILLSQLKPEKDSDEAVTYSLGKFGQRALDFYSIHVTKESTHPVKPLAQIAGNRYASTPVGKALSDACMGTIASFLSKYQDIIIEHQKVVKGNQKRLESLRELAGKENLEYPSVTLPPQPHTKEGVDAYNEVIARVRMWVNLNLWQKLKLSRDDAKPLLRLKGFPSFPLVERQANEVDWWDMVCNVKKLINEKKEDGKVFWQNLAGYKRQEALRPYLSSEEDRKKGKKFARYQLGDLLLHLYKKHGEDWGKVYDEAWERIDKKVEGLSKHIKLEEERRSEDAQSKAALTDWLRAKASFVIEGLKEADKDEFCRCELKLQKWYGDLRGKPFAIEAENSILDISGFSKQYNCAFIWQKDGVKKLNLYLIINYFKGGKLRFKKIKPEAFEANRFYTVINKKSGEIVPMEVNFNFDDPNLIILPLAFGKRQGREFIWNDLLSLETGSLKLANGRVIEKTLYNRRTRQDEPALFVALTFERREVLDSSNIKPMNLIGVDRGENIPAVIALTDPEGCPLSRFKDSLGNPTHILRIGESYKEKQRTIQAKKEVEQRRAGGYSRKYASKAKNLADDMVRNTARDLLYYAVTQDAMLIFENLSRGFGRQGKRTFMAERQYTRMEDWLTAKLAYEGLPSKTYLSKTLAQYTSKTCSNCGFTITSADYDRVLEKLKKTATGWMTTINGKELKVEGQITYYNRYKRQNVVKDLSVELDRLSEESVNNDISSWTKGRSGEALSLLKKRFSHRPVQEKFVCLNCGFETHADEQAALNIARSWLFLRSQEYKKYQTNKTTGNTDKRAFVETWQSFYRKKLKEVWKPAV

SEQ ID NO: 43154 - protein, 978 aa, synthetic construct
  REGION 1..978: note = engineered CasX variant
QEIKRINKIRRRLVKDSNTKKAGKTGPMKTLLVRVMTPDLRERLENLRKKPENIPQPISNTSRANLNKLLTDYTEMKKAILHVYWEEFQKDPVGLMSRVAQPASKKIDQNKLKPEMDEKGNLTTAGFACSQCGQPLFVYKLEQVSEKGKAYTNYFGRCNVAEHEKLILLSQLKPEKDSDEAVTYSLGKFGQRALDFYSIHVTKESTHPVKPLAQIAGNRYASAPVGKALSDACMGTIASFLSKYQDIIIEHQKVVKGNQKRLESLRELAGKENLEYPSVTLPPQPHTKEGVDAYNEVIARVRMWVNLNLWQKLKLSRDDAKPLLRLKGFPSFPLVERQANEVDWWDMVCNVKKLINEKKEDGKVFWQNLAGYKRQEALRPYLSSEEDRKKGKKFARYQLGDLLLHLYKKHGEDWGKVYDEAWERIDKKVEGLSKHIKLEEERRSEDAQSKAALTDWLRAKASFVIEGLKEADKDEFCRCELKLQKWYGDLRGKPFAIEAENSILDISGFSKQYNCAFIWQKDGVKKLNLYLIINYFKGGKLRFKKIKPEAFEANRFYTVINKKSGEIVPMEVNFNFDDPNLIILPLAFGKRQGREFIWNDLLSLETGSLKLANGRVIEKTLYNRRTRQDEPALFVALTFERREVLDSSNIKPMNLIGVDRGENIPAVIALTDPEGCPLSRFKDSLGNPTHILRIGESYKEKQRTIQAKKEVEQRRAGGYSRKYASKAKNLADDMVRNTARDLLYYAVTQDAMLIFENLSRGFGRQGKRTFMAERQYTRMEDWLTAKLAYEGLPSKTYLSKTLAQYTSKTCSNCGFTITSADYDRVLEKLKKTATGWMTTINGKELKVEGQITYYNRYKRQNVVKDLSVELDRLSEESVNNDISSWTKGRSGEALSLLKKRFSHRPVQEKFVCLNCGFETHADEQAALNIARSWLFLRSQEYKKYQTNKTTGNTDKRAFVETWQSFYRKKLKEVWKPAV

SEQ ID NO: 43155 - protein, 978 aa, synthetic construct
  REGION 1..978: note = engineered CasX variant
QEIKRINKIRRRLVKDSNTKKAGKTGPMKTLLVRVMTPDLRERLENLRKKPENIPQPISNTSRANLNKLLTDYTEMKKAILHVYWEEFQKDPVGLMSRVAQPASKKIDQNKLKPEMDEKGNLTTAGFACSQCGQPLFVYKLEQVSEKGKAYTNYFGRCNVAEHEKLILLSQLKPEKDSDEAVTYSLGKFGQRALDFYSIHVTKESTHPVKPLAQIAGNRYASVPVGKALSDACMGTIASFLSKYQDIIIEHQKVVKGNQKRLESLRELAGKENLEYPSVTLPPQPHTKEGVDAYNEVIARVRMWVNLNLWQKLKLSRDDAKPLLRLKGFPSFPLVERQANEVDWWDMVCNVKKLINEKKEDGKVFWQNLAGYKRQEALRPYLSSEEDRKKGKKFARYQLGDLLLHLYKKHGEDWGKVYDEAWERIDKKVEGLSKHIKLEEERRSEDAQSKAALTDWLRAKASFVIEGLKEADKDEFCRCELKLQKWYGDLRGKPFAIEAENSILDISGFSKQYNCAFIWQKDGVKKLNLYLIINYFKGGKLRFKKIKPEAFEANRFYTVINKKSGEIVPMEVNFNFDDPNLIILPLAFGKRQGREFIWNDLLSLETGSLKLANGRVIEKTLYNRRTRQDEPALFVALTFERREVLDSSNIKPMNLIGVDRGENIPAVIALTDPEGCPLSRFKDSLGNPTHILRIGESYKEKQRTIQAKKEVEQRRAGGYSRKYASKAKNLADDMVRNTARDLLYYAVTQDAMLIFENLSRGFGRQGKRTFMAERQYTRMEDWLTAKLAYEGLPSKTYLSKTLAQYTSKTCSNCGFTITSADYDRVLEKLKKTATGWMTTINGKELKVEGQITYYNRYKRQNVVKDLSVELDRLSEESVNNDISSWTKGRSGEALSLLKKRFSHRPVQEKFVCLNCGFETHADEQAALNIARSWLFLRSQEYKKYQTNKTTGNTDKRAFVETWQSFYRKKLKEVWKPAV

SEQ ID NO: 43156 - protein, 978 aa, synthetic construct
  REGION 1..978: note = engineered CasX variant
QEIKRINKIRRRLVKDSNTKKAGKTGPMKTLLVRVMTPDLRERLENLRKKPENIPQPISNTSRANLNKLLTDYTEMKKAILHVYWEEFQKDPVGLMSRVAQPASKKIDQNKLKPEMDEKGNLTTAGFACSQCGQPLFVYKLEQVSEKGKAYTNYFGRCNVAEHEKLIKLSQLKPEKDSDEAVTYSLGKFGQRALDFYSIHVTKESTHPVKPLAQIAGNRYASGPVGKALSDACMGTIASFLSKYQDIIIEHQKVVKGNQKRLESLRELAGKENLEYPSVTLPPQPHTKEGVDAYNEVIARVRMWVNLNLWQKLKLSRDDAKPLLRLKGFPSFPLVERQANEVDWWDMVCNVKKLINEKKEDGKVFWQNLAGYKRQEALRPYLSSEEDRKKGKKFARYQLGDLLLHLYKKHGEDWGKVYDEAWERIDKKVEGLSKHIKLEEERRSEDAQSKAALTDWLRAKASFVIEGLKEADKDEFCRCELKLQKWYGDLRGKPFAIEAENSILDISGFSKQYNCAFIWQKDGVKKLNLYLIINYFKGGKLRFKKIKPEAFEANRFYTVINKKSGEIVPMEVNFNFDDPNLIILPLAFGKRQGREFIWNDLLSLETGSLKLANGRVIEKTLYNRRTRQDEPALFVALTFERREVLDSSNIKPMNLIGVDRGENIPAVIALTDPEGCPLSRFKDSLGNPTHILRIGESYKEKQRTIQAKKEVEQRRAGGYSRKYASKAKNLADDMVRNTARDLLYYAVTQDAMLIFENLSRGFGRQGKRTFMAERQYTRMEDWLTAKLAYEGLPSKTYLSKTLAQYTSKTCSNCGFTITSADYDRVLEKLKKTATGWMTTINGKELKVEGQITYYNRYKRQNVVKDLSVELDRLSEESVNNDISSWTKGRSGEALSLLKKRFSHRPVQEKFVCLNCGFETHADEQAALNIARSWLFLRSQEYKKYQTNKTTGNTDKRAFVETWQSFYRKKLKEVWKPAV

SEQ ID NO: 43157 - protein, 977 aa, synthetic construct
  REGION 1..977: note = engineered CasX variant
QEIKRINKIRRRLVKDSNTKKAGKTGPMKTLLVRVMTPDLRERLENLRKKPENIPQPISNTSRANLNKLLTDYTEMKKAILHVYWEEFQKDPVGLMSRVAQPASKKIDQNKLKPEMDEKGNLTTAGFACSQCGQPLFVYKLEQVSEKGKAYTNYFGRCNVAEHEKLILLSQLKPEKDSDEAVTYSLGKFGQRALDFYSIHVTKESTHPVKPLAQIAGNRYASPVGKALSDACMGTIASFLSKYQDIIIEHQKVVKGNQKRLESLRELAGKENLEYPSVTLPPQPHTKEGVDAYNEVIARVRMWVNLNLWQKLKLSRDDAKPLLRLKGFPSFPLVERQANEVDWWDMVCNVKKLINEKKEDGKVFWQNLAGYKRQEALRPYLSSEEDRKKGKKFARYQLGDLLLHLYKKHGEDWGKVYDEAWERIDKKVEGLSKHIKLEEERRSEDAQSKAALTDWLRAKASFVIEGLKEADKDEFCRCELKLQKWYGDLRGKPFAIEAENSILDISGFSKQYNCAFIWQKDGVKKLNLYLIINYFKGGKLRFKKIKPEAFEANRFYTVINKKSGEIVPMEVNFNFDDPNLIILPLAFGKRQGREFIWNDLLSLETGSLKLANGRVIEKTLYNRRTRQDEPALFVALTFERREVLDSSNIKPMNLIGVDRGENIPAVIALTDPEGCPLSRFKDSLGNPTHILRIGESYKEKQRTIQAKKEVEQRRAGGYSRKYASKAKNLADDMVRNTARDLLYYAVTQDAMLIFENLSRGFGRQGKRTFMAERQYTRMEDWLTAKLAYEGLPSKTYLSKTLAQYTSKTCSNCGFTITSADYDRVLEKLKKTATGWMTTINGKELKVEGQITYYNRYKRQNVVKDLSVELDRLSEESVNNDISSWTKGRSGEALSLLKKRFSHRPVQEKFVCLNCGFETHADEQAALNIARSWLFLRSQEYKKYQTNKTTGNTDKRAFVETWQSFYRKKLKEVWKPAV

SEQ ID NO: 43158 - protein, 978 aa, synthetic construct
  REGION 1..978: note = engineered CasX variant
QEIKRINKIRRRLVKDSNTKKAGKTGPMKTLLVRVMTPDLRERLENLRKKPENIPQPISNTSRANLNKLLTDYTEMKKAILHVYWEEFQKDPVGLMSRVAQPASKKIDQNKLKPEMDEKGNLTTAGFACSQCGQPLFVYKLEQVSEKGKAYTNYFGRCNVAEHEKLILLSQLKPEKDSDEAVTYSLGKFGQRALDFYSIHVTKESTHPVKPLAQIAGNRYASYPVGKALSDACMGTIASFLSKYQDIIIEHQKVVKGNQKRLESLRELAGKENLEYPSVTLPPQPHTKEGVDAYNEVIARVRMWVNLNLWQKLKLSRDDAKPLLRLKGFPSFPLVERQANEVDWWDMVCNVKKLINEKKEDGKVFWQNLAGYKRQEALRPYLSSEEDRKKGKKFARYQLGDLLLHLEKKHPEDWGKVYDEAWERIDKKVEGLSKHIKLEEERRSEDAQSKAALTDWLRAKASFVIEGLKEADKDEFCRCELKLQKWYGDLRGKPFAIEAENSILDISGFSKQYNCAFIWQKDGVKKLNLYLIINYFKGGKLRFKKIKPEAFEANRFYTVINKKSGEIVPMEVNFNFDDPNLIILPLAFGKRQGREFIWNDLLSLETGSLKLANGRVIEKTLYNRRTRQDEPALFVALTFERREVLDSSNIKPMNLIGVDRGENIPAVIALTDPEGCPLSRFKDSLGNPTHILRIGESYKEKQRTIQAKKEVEQRRAGGYSRKYASKAKNLADDMVRNTARDLLYYAVTQDAMLIFENLSRGFGRQGKRTFMAERQYTRMEDWLTAKLAYEGLPSKTYLSKTLAQYTSKTCSNCGFTITSADYDRVLEKLKKTATGWMTTINGKELKVEGQITYYNRYKRQNVVKDLSVELDRLSEESVNNDISSWTKGRSGEALSLLKKRFSHRPVQEKFVCLNCGFETHADEQAALNIARSWLFLRSQEYKKYQTNKTTGNTDKRAFVETWQSFYRKKLKEVWKPAV

SEQ ID NO: 43159 - protein, 978 aa, synthetic construct
  REGION 1..978: note = engineered CasX variant
QEIKRINKIRRRLVKDSNTKKAGKTGPMKTLLVRVMTPDLRERLENLRKKPENIPQPISNTSRANLNKLLTDYTEMKKAILHVYWEEFQKDPVGLMSRVAQPASKKIDQNKLKPEMDEKGNLTTAGFACSQCGQPLFVYKLEQVSEKGKAYTNYFGRCNVAEHEKLILLSQLKPEKDSDEAVTYSLGKFGQRALDFYSIHVTKESTHPVKPLAQIAGNRYASHPVGKALSDACMGTIASFLSKYQDIIIEHQKVVKGNQKRLESLRELAGKENLEYPSVTLPPQPHTKEGVDAYNEVIARVRMWVNLNLWQKLKLSRDDAKPLLRLKGFPSFPLVERQANEVDWWDMVCNVKKLINEKKEDGKVFWQNLAGYKRQEALRPYLSSEEDRKKGKKFARYQLGDLLLHLEKKHPEDWGKVYDEAWERIDKKVEGLSKHIKLEEERRSEDAQSKAALTDWLRAKASFVIEGLKEADKDEFCRCELKLQKWYGDLRGKPFAIEAENSILDISGFSKQYNCAFIWQKDGVKKLNLYLIINYFKGGKLRFKKIKPEAFEANRFYTVINKKSGEIVPMEVNFNFDDPNLIILPLAFGKRQGREFIWNDLLSLETGSLKLANGRVIEKTLYNRRTRQDEPALFVALTFERREVLDSSNIKPMNLIGVDRGENIPAVIALTDPEGCPLSRFKDSLGNPTHILRIGESYKEKQRTIQAKKEVEQRRAGGYSRKYASKAKNLADDMVRNTARDLLYYAVTQDAMLIFENLSRGFGRQGKRTFMAERQYTRMEDWLTAKLAYEGLPSKTYLSKTLAQYTSKTCSNCGFTITSADYDRVLEKLKKTATGWMTTINGKELKVEGQITYYNRYKRQNVVKDLSVELDRLSEESVNNDISSWTKGRSGEALSLLKKRFSHRPVQEKFVCLNCGFETHADEQAALNIARSWLFLRSQEYKKYQTNKTTGNTDKRAFVETWQSFYRKKLKEVWKPAV

SEQ ID NO: 43160 - protein, 978 aa, synthetic construct
  REGION 1..978: note = engineered CasX variant
QEIKRINKIRRRLVKDSNTKKAGKTGPMKTLLVRVMTPDLRERLENLRKKPENIPQPISNTSRANLNKLLTDYTEMKKAILHVYWEEFQKDPVGLMSRVAQPASKKIDQNKLKPEMDEKGNLTTAGFACSQCGQPLFVYKLEQVSEKGKAYTNYFGRCNVAEHEKLILLSQLKPEKDSDEAVTYSLGKFGQRALDFYSIHVTKESTHPVKPLAQIAGNRYASSPVGKALSDACMGTIASFLSKYQDIIIEHQKVVKGNQKRLESLRELAGKENLEYPSVTLPPQPHTKEGVDAYNEVIARVRMWVNLNLWQKLKLSRDDAKPLLRLKGFPSFPLVERQANEVDWWDMVCNVKKLINEKKEDGKVFWQNLAGYKRQEALRPYLSSEEDRKKGKKFARYQLGDLLLHLEKKHPEDWGKVYDEAWERIDKKVEGLSKHIKLEEERRSEDAQSKAALTDWLRAKASFVIEGLKEADKDEFCRCELKLQKWYGDLRGKPFAIEAENSILDISGFSKQYNCAFIWQKDGVKKLNLYLIINYFKGGKLRFKKIKPEAFEANRFYTVINKKSGEIVPMEVNFNFDDPNLIILPLAFGKRQGREFIWNDLLSLETGSLKLANGRVIEKTLYNRRTRQDEPALFVALTFERREVLDSSNIKPMNLIGVDRGENIPAVIALTDPEGCPLSRFKDSLGNPTHILRIGESYKEKQRTIQAKKEVEQRRAGGYSRKYASKAKNLADDMVRNTARDLLYYAVTQDAMLIFENLSRGFGRQGKRTFMAERQYTRMEDWLTAKLAYEGLPSKTYLSKTLAQYTSKTCSNCGFTITSADYDRVLEKLKKTATGWMTTINGKELKVEGQITYYNRYKRQNVVKDLSVELDRLSEESVNNDISSWTKGRSGEALSLLKKRFSHRPVQEKFVCLNCGFETHADEQAALNIARSWLFLRSQEYKKYQTNKTTGNTDKRAFVETWQSFYRKKLKEVWKPAV

SEQ ID NO: 43161 - protein, 978 aa, synthetic construct
  REGION 1..978: note = engineered CasX variant
QEIKRINKIRRRLVKDSNTKKAGKTGPMKTLLVRVMTPDLRERLENLRKKPENIPQPISNTSRANLNKLLTDYTEMKKAILHVYWEEFQKDPVGLMSRVAQPASKKIDQNKLKPEMDEKGNLTTAGFACSQCGQPLFVYKLEQVSEKGKAYTNYFGRCNVAEHEKLILLSQLKPEKDSDEAVTYSLGKFGQRALDFYSIHVTKESTHPVKPLAQIAGNRYASTPVGKALSDACMGTIASFLSKYQDIIIEHQKVVKGNQKRLESLRELAGKENLEYPSVTLPPQPHTKEGVDAYNEVIARVRMWVNLNLWQKLKLSRDDAKPLLRLKGFPSFPLVERQANEVDWWDMVCNVKKLINEKKEDGKVFWQNLAGYKRQEALRPYLSSEEDRKKGKKFARYQLGDLLLHLEKKHPEDWGKVYDEAWERIDKKVEGLSKHIKLEEERRSEDAQSKAALTDWLRAKASFVIEGLKEADKDEFCRCELKLQKWYGDLRGKPFAIEAENSILDISGFSKQYNCAFIWQKDGVKKLNLYLIINYFKGGKLRFKKIKPEAFEANRFYTVINKKSGEIVPMEVNFNFDDPNLIILPLAFGKRQGREFIWNDLLSLETGSLKLANGRVIEKTLYNRRTRQDEPALFVALTFERREVLDSSNIKPMNLIGVDRGENIPAVIALTDPEGCPLSRFKDSLGNPTHILRIGESYKEKQRTIQAKKEVEQRRAGGYSRKYASKAKNLADDMVRNTARDLLYYAVTQDAMLIFENLSRGFGRQGKRTFMAERQYTRMEDWLTAKLAYEGLPSKTYLSKTLAQYTSKTCSNCGFTITSADYDRVLEKLKKTATGWMTTINGKELKVEGQITYYNRYKRQNVVKDLSVELDRLSEESVNNDISSWTKGRSGEALSLLKKRFSHRPVQEKFVCLNCGFETHADEQAALNIARSWLFLRSQEYKKYQTNKTTGNTDKRAFVETWQSFYRKKLKEVWKPAV

SEQ ID NO: 43162 - protein, 978 aa, synthetic construct
  REGION 1..978: note = engineered CasX variant
QEIKRINKIRRRLVKDSNTKKAGKTGPMKTLLVRVMTPDLRERLENLRKKPENIPQPISNTSRANLNKLLTDYTEMKKAILHVYWEEFQKDPVGLMSRVAQPASKKIDQNKLKPEMDEKGNLTTAGFACSQCGQPLFVYKLEQVSEKGKAYTNYFGRCNVAEHEKLILLSQLKPEKDSDEAVTYSLGKFGQRALDFYSIHVTKESTHPVKPLAQIAGNRYASAPVGKALSDACMGTIASFLSKYQDIIIEHQKVVKGNQKRLESLRELAGKENLEYPSVTLPPQPHTKEGVDAYNEVIARVRMWVNLNLWQKLKLSRDDAKPLLRLKGFPSFPLVERQANEVDWWDMVCNVKKLINEKKEDGKVFWQNLAGYKRQEALRPYLSSEEDRKKGKKFARYQLGDLLLHLEKKHPEDWGKVYDEAWERIDKKVEGLSKHIKLEEERRSEDAQSKAALTDWLRAKASFVIEGLKEADKDEFCRCELKLQKWYGDLRGKPFAIEAENSILDISGFSKQYNCAFIWQKDGVKKLNLYLIINYFKGGKLRFKKIKPEAFEANRFYTVINKKSGEIVPMEVNFNFDDPNLIILPLAFGKRQGREFIWNDLLSLETGSLKLANGRVIEKTLYNRRTRQDEPALFVALTFERREVLDSSNIKPMNLIGVDRGENIPAVIALTDPEGCPLSRFKDSLGNPTHILRIGESYKEKQRTIQAKKEVEQRRAGGYSRKYASKAKNLADDMVRNTARDLLYYAVTQDAMLIFENLSRGFGRQGKRTFMAERQYTRMEDWLTAKLAYEGLPSKTYLSKTLAQYTSKTCSNCGFTITSADYDRVLEKLKKTATGWMTTINGKELKVEGQITYYNRYKRQNVVKDLSVELDRLSEESVNNDISSWTKGRSGEALSLLKKRFSHRPVQEKFVCLNCGFETHADEQAALNIARSWLFLRSQEYKKYQTNKTTGNTDKRAFVETWQSFYRKKLKEVWKPAV

SEQ ID NO: 43163 - protein, 978 aa, synthetic construct
  REGION 1..978: note = engineered CasX variant
QEIKRINKIRRRLVKDSNTKKAGKTGPMKTLLVRVMTPDLRERLENLRKKPENIPQPISNTSRANLNKLLTDYTEMKKAILHVYWEEFQKDPVGLMSRVAQPASKKIDQNKLKPEMDEKGNLTTAGFACSQCGQPLFVYKLEQVSEKGKAYTNYFGRCNVAEHEKLILLSQLKPEKDSDEAVTYSLGKFGQRALDFYSIHVTKESTHPVKPLAQIAGNRYASVPVGKALSDACMGTIASFLSKYQDIIIEHQKVVKGNQKRLESLRELAGKENLEYPSVTLPPQPHTKEGVDAYNEVIARVRMWVNLNLWQKLKLSRDDAKPLLRLKGFPSFPLVERQANEVDWWDMVCNVKKLINEKKEDGKVFWQNLAGYKRQEALRPYLSSEEDRKKGKKFARYQLGDLLLHLEKKHPEDWGKVYDEAWERIDKKVEGLSKHIKLEEERRSEDAQSKAALTDWLRAKASFVIEGLKEADKDEFCRCELKLQKWYGDLRGKPFAIEAENSILDISGFSKQYNCAFIWQKDGVKKLNLYLIINYFKGGKLRFKKIKPEAFEANRFYTVINKKSGEIVPMEVNFNFDDPNLIILPLAFGKRQGREFIWNDLLSLETGSLKLANGRVIEKTLYNRRTRQDEPALFVALTFERREVLDSSNIKPMNLIGVDRGENIPAVIALTDPEGCPLSRFKDSLGNPTHILRIGESYKEKQRTIQAKKEVEQRRAGGYSRKYASKAKNLADDMVRNTARDLLYYAVTQDAMLIFENLSRGFGRQGKRTFMAERQYTRMEDWLTAKLAYEGLPSKTYLSKTLAQYTSKTCSNCGFTITSADYDRVLEKLKKTATGWMTTINGKELKVEGQITYYNRYKRQNVVKDLSVELDRLSEESVNNDISSWTKGRSGEALSLLKKRFSHRPVQEKFVCLNCGFETHADEQAALNIARSWLFLRSQEYKKYQTNKTTGNTDKRAFVETWQSFYRKKLKEVWKPAV

SEQ ID NO: 43164 - protein, 978 aa, synthetic construct
  REGION 1..978: note = engineered CasX variant
QEIKRINKIRRRLVKDSNTKKAGKTGPMKTLLVRVMTPDLRERLENLRKKPENIPQPISNTSRANLNKLLTDYTEMKKAILHVYWEEFQKDPVGLMSRVAQPASKKIDQNKLKPEMDEKGNLTTAGFACSQCGQPLFVYKLEQVSEKGKAYTNYFGRCNVAEHEKLIKLSQLKPEKDSDEAVTYSLGKFGQRALDFYSIHVTKESTHPVKPLAQIAGNRYASGPVGKALSDACMGTIASFLSKYQDIIIEHQKVVKGNQKRLESLRELAGKENLEYPSVTLPPQPHTKEGVDAYNEVIARVRMWVNLNLWQKLKLSRDDAKPLLRLKGFPSFPLVERQANEVDWWDMVCNVKKLINEKKEDGKVFWQNLAGYKRQEALRPYLSSEEDRKKGKKFARYQLGDLLLHLEKKHPEDWGKVYDEAWERIDKKVEGLSKHIKLEEERRSEDAQSKAALTDWLRAKASFVIEGLKEADKDEFCRCELKLQKWYGDLRGKPFAIEAENSILDISGFSKQYNCAFIWQKDGVKKLNLYLIINYFKGGKLRFKKIKPEAFEANRFYTVINKKSGEIVPMEVNFNFDDPNLIILPLAFGKRQGREFIWNDLLSLETGSLKLANGRVIEKTLYNRRTRQDEPALFVALTFERREVLDSSNIKPMNLIGVDRGENIPAVIALTDPEGCPLSRFKDSLGNPTHILRIGESYKEKQRTIQAKKEVEQRRAGGYSRKYASKAKNLADDMVRNTARDLLYYAVTQDAMLIFENLSRGFGRQGKRTFMAERQYTRMEDWLTAKLAYEGLPSKTYLSKTLAQYTSKTCSNCGFTITSADYDRVLEKLKKTATGWMTTINGKELKVEGQITYYNRYKRQNVVKDLSVELDRLSEESVNNDISSWTKGRSGEALSLLKKRFSHRPVQEKFVCLNCGFETHADEQAALNIARSWLFLRSQEYKKYQTNKTTGNTDKRAFVETWQSFYRKKLKEVWKPAV

SEQ ID NO: 43165 - protein, 977 aa, synthetic construct
  REGION 1..977: note = engineered CasX variant
QEIKRINKIRRRLVKDSNTKKAGKTGPMKTLLVRVMTPDLRERLENLRKKPENIPQPISNTSRANLNKLLTDYTEMKKAILHVYWEEFQKDPVGLMSRVAQPASKKIDQNKLKPEMDEKGNLTTAGFACSQCGQPLFVYKLEQVSEKGKAYTNYFGRCNVAEHEKLILLSQLKPEKDSDEAVTYSLGKFGQRALDFYSIHVTKESTHPVKPLAQIAGNRYASPVGKALSDACMGTIASFLSKYQDIIIEHQKVVKGNQKRLESLRELAGKENLEYPSVTLPPQPHTKEGVDAYNEVIARVRMWVNLNLWQKLKLSRDDAKPLLRLKGFPSFPLVERQANEVDWWDMVCNVKKLINEKKEDGKVFWQNLAGYKRQEALRPYLSSEEDRKKGKKFARYQLGDLLLHLEKKHPEDWGKVYDEAWERIDKKVEGLSKHIKLEEERRSEDAQSKAALTDWLRAKASFVIEGLKEADKDEFCRCELKLQKWYGDLRGKPFAIEAENSILDISGFSKQYNCAFIWQKDGVKKLNLYLIINYFKGGKLRFKKIKPEAFEANRFYTVINKKSGEIVPMEVNFNFDDPNLIILPLAFGKRQGREFIWNDLLSLETGSLKLANGRVIEKTLYNRRTRQDEPALFVALTFERREVLDSSNIKPMNLIGVDRGENIPAVIALTDPEGCPLSRFKDSLGNPTHILRIGESYKEKQRTIQAKKEVEQRRAGGYSRKYASKAKNLADDMVRNTARDLLYYAVTQDAMLIFENLSRGFGRQGKRTFMAERQYTRMEDWLTAKLAYEGLPSKTYLSKTLAQYTSKTCSNCGFTITSADYDRVLEKLKKTATGWMTTINGKELKVEGQITYYNRYKRQNVVKDLSVELDRLSEESVNNDISSWTKGRSGEALSLLKKRFSHRPVQEKFVCLNCGFETHADEQAALNIARSWLFLRSQEYKKYQTNKTTGNTDKRAFVETWQSFYRKKLKEVWKPAV

SEQ ID NO: 43166 - protein, 979 aa, synthetic construct
  REGION 1..979: note = engineered CasX variant
QEIKRINKIRRRLVKDSNTKKAGKTGPMKTLLVRVMTPDLRERLENLRKKPENIPQPISNTSRANLNKLLTDYTEMKKAILHVYWEEFQKDPVGLMSRVAQPASKKIDQNKLKPEMDEKGNLTTAGFACSQCGQPLFVYKLEQVSEKGKAYTNYFGRCNVAEHEKLILLSQLKPEKDSDEAVTYSLGKFGQRALDFYSIHVTKESTHPVKPLAQIAGNRYASYPVGKALSDACMGTIASFLSKYQDIIIEHQKVVKGNQKRLESLRELAGKENLEYPSVTLPPQPHTKEGVDAYNEVIARVRMWVNLNLWQKLKLSRDDAKPLLRLKGFPSFPLVERQANEVDWWDMVCNVKKLINEKKEDGKVFWQNLAGYKRQEALRPYLSSEEDRKKGKKFARYQLGDLLLHLEKKHGERDWGKVYDEAWERIDKKVEGLSKHIKLEEERRSEDAQSKAALTDWLRAKASFVIEGLKEADKDEFCRCELKLQKWYGDLRGKPFAIEAENSILDISGFSKQYNCAFIWQKDGVKKLNLYLIINYFKGGKLRFKKIKPEAFEANRFYTVINKKSGEIVPMEVNFNFDDPNLIILPLAFGKRQGREFIWNDLLSLETGSLKLANGRVIEKTLYNRRTRQDEPALFVALTFERREVLDSSNIKPMNLIGVDRGENIPAVIALTDPEGCPLSRFKDSLGNPTHILRIGESYKEKQRTIQAKKEVEQRRAGGYSRKYASKAKNLADDMVRNTARDLLYYAVTQDAMLIFENLSRGFGRQGKRTFMAERQYTRMEDWLTAKLAYEGLPSKTYLSKTLAQYTSKTCSNCGFTITSADYDRVLEKLKKTATGWMTTINGKELKVEGQITYYNRYKRQNVVKDLSVELDRLSEESVNNDISSWTKGRSGEALSLLKKRFSHRPVQEKFVCLNCGFETHADEQAALNIARSWLFLRSQEYKKYQTNKTTGNTDKRAFVETWQSFYRKKLKEVWKPAV

SEQ ID NO: 43167 - protein, 979 aa, synthetic construct
  REGION 1..979: note = engineered CasX variant
QEIKRINKIRRRLVKDSNTKKAGKTGPMKTLLVRVMTPDLRERLENLRKKPENIPQPISNTSRANLNKLLTDYTEMKKAILHVYWEEFQKDPVGLMSRVAQPASKKIDQNKLKPEMDEKGNLTTAGFACSQCGQPLFVYKLEQVSEKGKAYTNYFGRCNVAEHEKLILLSQLKPEKDSDEAVTYSLGKFGQRALDFYSIHVTKESTHPVKPLAQIAGNRYASHPVGKALSDACMGTIASFLSKYQDIIIEHQKVVKGNQKRLESLRELAGKENLEYPSVTLPPQPHTKEGVDAYNEVIARVRMWVNLNLWQKLKLSRDDAKPLLRLKGFPSFPLVERQANEVDWWDMVCNVKKLINEKKEDGKVFWQNLAGYKRQEALRPYLSSEEDRKKGKKFARYQLGDLLLHLEKKHGERDWGKVYDEAWERIDKKVEGLSKHIKLEEERRSEDAQSKAALTDWLRAKASFVIEGLKEADKDEFCRCELKLQKWYGDLRGKPFAIEAENSILDISGFSKQYNCAFIWQKDGVKKLNLYLIINYFKGGKLRFKKIKPEAFEANRFYTVINKKSGEIVPMEVNFNFDDPNLIILPLAFGKRQGREFIWNDLLSLETGSLKLANGRVIEKTLYNRRTRQDEPALFVALTFERREVLDSSNIKPMNLIGVDRGENIPAVIALTDPEGCPLSRFKDSLGNPTHILRIGESYKEKQRTIQAKKEVEQRRAGGYSRKYASKAKNLADDMVRNTARDLLYYAVTQDAMLIFENLSRGFGRQGKRTFMAERQYTRMEDWLTAKLAYEGLPSKTYLSKTLAQYTSKTCSNCGFTITSADYDRVLEKLKKTATGWMTTINGKELKVEGQITYYNRYKRQNVVKDLSVELDRLSEESVNNDISSWTKGRSGEALSLLKKRFSHRPVQEKFVCLNCGFETHADEQAALNIARSWLFLRSQEYKKYQTNKTTGNTDKRAFVETWQSFYRKKLKEVWKPAV

SEQ ID NO: 43168 - protein, 979 aa, synthetic construct
  REGION 1..979: note = engineered CasX variant
QEIKRINKIRRRLVKDSNTKKAGKTGPMKTLLVRVMTPDLRERLENLRKKPENIPQPISNTSRANLNKLLTDYTEMKKAILHVYWEEFQKDPVGLMSRVAQPASKKIDQNKLKPEMDEKGNLTTAGFACSQCGQPLFVYKLEQVSEKGKAYTNYFGRCNVAEHEKLILLSQLKPEKDSDEAVTYSLGKFGQRALDFYSIHVTKESTHPVKPLAQIAGNRYASSPVGKALSDACMGTIASFLSKYQDIIIEHQKVVKGNQKRLESLRELAGKENLEYPSVTLPPQPHTKEGVDAYNEVIARVRMWVNLNLWQKLKLSRDDAKPLLRLKGFPSFPLVERQANEVDWWDMVCNVKKLINEKKEDGKVFWQNLAGYKRQEALRPYLSSEEDRKKGKKFARYQLGDLLLHLEKKHGERDWGKVYDEAWERIDKKVEGLSKHIKLEEERRSEDAQSKAALTDWLRAKASFVIEGLKEADKDEFCRCELKLQKWYGDLRGKPFAIEAENSILDISGFSKQYNCAFIWQKDGVKKLNLYLIINYFKGGKLRFKKIKPEAFEANRFYTVINKKSGEIVPMEVNFNFDDPNLIILPLAFGKRQGREFIWNDLLSLETGSLKLANGRVIEKTLYNRRTRQDEPALFVALTFERREVLDSSNIKPMNLIGVDRGENIPAVIALTDPEGCPLSRFKDSLGNPTHILRIGESYKEKQRTIQAKKEVEQRRAGGYSRKYASKAKNLADDMVRNTARDLLYYAVTQDAMLIFENLSRGFGRQGKRTFMAERQYTRMEDWLTAKLAYEGLPSKTYLSKTLAQYTSKTCSNCGFTITSADYDRVLEKLKKTATGWMTTINGKELKVEGQITYYNRYKRQNVVKDLSVELDRLSEESVNNDISSWTKGRSGEALSLLKKRFSHRPVQEKFVCLNCGFETHADEQAALNIARSWLFLRSQEYKKYQTNKTTGNTDKRAFVETWQSFYRKKLKEVWKPAV

SEQ ID NO: 43169 - protein, 979 aa, synthetic construct
  REGION 1..979: note = engineered CasX variant
QEIKRINKIRRRLVKDSNTKKAGKTGPMKTLLVRVMTPDLRERLENLRKKPENIPQPISNTSRANLNKLLTDYTEMKKAILHVYWEEFQKDPVGLMSRVAQPASKKIDQNKLKPEMDEKGNLTTAGFACSQCGQPLFVYKLEQVSEKGKAYTNYFGRCNVAEHEKLILLSQLKPEKDSDEAVTYSLGKFGQRALDFYSIHVTKESTHPVKPLAQIAGNRYASTPVGKALSDACMGTIASFLSKYQDIIIEHQKVVKGNQKRLESLRELAGKENLEYPSVTLPPQPHTKEGVDAYNEVIARVRMWVNLNLWQKLKLSRDDAKPLLRLKGFPSFPLVERQANEVDWWDMVCNVKKLINEKKEDGKVFWQNLAGYKRQEALRPYLSSEEDRKKGKKFARYQLGDLLLHLEKKHGERDWGKVYDEAWERIDKKVEGLSKHIKLEEERRSEDAQSKAALTDWLRAKASFVIEGLKEADKDEFCRCELKLQKWYGDLRGKPFAIEAENSILDISGFSKQYNCAFIWQKDGVKKLNLYLIINYFKGGKLRFKKIKPEAFEANRFYTVINKKSGEIVPMEVNFNFDDPNLIILPLAFGKRQGREFIWNDLLSLETGSLKLANGRVIEKTLYNRRTRQDEPALFVALTFERREVLDSSNIKPMNLIGVDRGENIPAVIALTDPEGCPLSRFKDSLGNPTHILRIGESYKEKQRTIQAKKEVEQRRAGGYSRKYASKAKNLADDMVRNTARDLLYYAVTQDAMLIFENLSRGFGRQGKRTFMAERQYTRMEDWLTAKLAYEGLPSKTYLSKTLAQYTSKTCSNCGFTITSADYDRVLEKLKKTATGWMTTINGKELKVEGQITYYNRYKRQNVVKDLSVELDRLSEESVNNDISSWTKGRSGEALSLLKKRFSHRPVQEKFVCLNCGFETHADEQAALNIARSWLFLRSQEYKKYQTNKTTGNTDKRAFVETWQSFYRKKLKEVWKPAV

SEQ ID NO: 43170 - protein, 979 aa, synthetic construct
  REGION 1..979: note = engineered CasX variant
QEIKRINKIRRRLVKDSNTKKAGKTGPMKTLLVRVMTPDLRERLENLRKKPENIPQPISNTSRANLNKLLTDYTEMKKAILHVYWEEFQKDPVGLMSRVAQPASKKIDQNKLKPEMDEKGNLTTAGFACSQCGQPLFVYKLEQVSEKGKAYTNYFGRCNVAEHEKLILLSQLKPEKDSDEAVTYSLGKFGQRALDFYSIHVTKESTHPVKPLAQIAGNRYASAPVGKALSDACMGTIASFLSKYQDIIIEHQKVVKGNQKRLESLRELAGKENLEYPSVTLPPQPHTKEGVDAYNEVIARVRMWVNLNLWQKLKLSRDDAKPLLRLKGFPSFPLVERQANEVDWWDMVCNVKKLINEKKEDGKVFWQNLAGYKRQEALRPYLSSEEDRKKGKKFARYQLGDLLLHLEKKHGERDWGKVYDEAWERIDKKVEGLSKHIKLEEERRSEDAQSKAALTDWLRAKASFVIEGLKEADKDEFCRCELKLQKWYGDLRGKPFAIEAENSILDISGFSKQYNCAFIWQKDGVKKLNLYLIINYFKGGKLRFKKIKPEAFEANRFYTVINKKSGEIVPMEVNFNFDDPNLIILPLAFGKRQGREFIWNDLLSLETGSLKLANGRVIEKTLYNRRTRQDEPALFVALTFERREVLDSSNIKPMNLIGVDRGENIPAVIALTDPEGCPLSRFKDSLGNPTHILRIGESYKEKQRTIQAKKEVEQRRAGGYSRKYASKAKNLADDMVRNTARDLLYYAVTQDAMLIFENLSRGFGRQGKRTFMAERQYTRMEDWLTAKLAYEGLPSKTYLSKTLAQYTSKTCSNCGFTITSADYDRVLEKLKKTATGWMTTINGKELKVEGQITYYNRYKRQNVVKDLSVELDRLSEESVNNDISSWTKGRSGEALSLLKKRFSHRPVQEKFVCLNCGFETHADEQAALNIARSWLFLRSQEYKKYQTNKTTGNTDKRAFVETWQSFYRKKLKEVWKPAV

SEQ ID NO: 43171 - protein, 979 aa, synthetic construct
  REGION 1..979: note = engineered CasX variant
QEIKRINKIRRRLVKDSNTKKAGKTGPMKTLLVRVMTPDLRERLENLRKKPENIPQPISNTSRANLNKLLTDYTEMKKAILHVYWEEFQKDPVGLMSRVAQPASKKIDQNKLKPEMDEKGNLTTAGFACSQCGQPLFVYKLEQVSEKGKAYTNYFGRCNVAEHEKLILLSQLKPEKDSDEAVTYSLGKFGQRALDFYSIHVTKESTHPVKPLAQIAGNRYASVPVGKALSDACMGTIASFLSKYQDIIIEHQKVVKGNQKRLESLRELAGKENLEYPSVTLPPQPHTKEGVDAYNEVIARVRMWVNLNLWQKLKLSRDDAKPLLRLKGFPSFPLVERQANEVDWWDMVCNVKKLINEKKEDGKVFWQNLAGYKRQEALRPYLSSEEDRKKGKKFARYQLGDLLLHLEKKHGERDWGKVYDEAWERIDKKVEGLSKHIKLEEERRSEDAQSKAALTDWLRAKASFVIEGLKEADKDEFCRCELKLQKWYGDLRGKPFAIEAENSILDISGFSKQYNCAFIWQKDGVKKLNLYLIINYFKGGKLRFKKIKPEAFEANRFYTVINKKSGEIVPMEVNFNFDDPNLIILPLAFGKRQGREFIWNDLLSLETGSLKLANGRVIEKTLYNRRTRQDEPALFVALTFERREVLDSSNIKPMNLIGVDRGENIPAVIALTDPEGCPLSRFKDSLGNPTHILRIGESYKEKQRTIQAKKEVEQRRAGGYSRKYASKAKNLADDMVRNTARDLLYYAVTQDAMLIFENLSRGFGRQGKRTFMAERQYTRMEDWLTAKLAYEGLPSKTYLSKTLAQYTSKTCSNCGFTITSADYDRVLEKLKKTATGWMTTINGKELKVEGQITYYNRYKRQNVVKDLSVELDRLSEESVNNDISSWTKGRSGEALSLLKKRFSHRPVQEKFVCLNCGFETHADEQAALNIARSWLFLRSQEYKKYQTNKTTGNTDKRAFVETWQSFYRKKLKEVWKPAV

SEQ ID NO: 43172 - protein, 979 aa, synthetic construct
  REGION 1..979: note = engineered CasX variant
QEIKRINKIRRRLVKDSNTKKAGKTGPMKTLLVRVMTPDLRERLENLRKKPENIPQPISNTSRANLNKLLTDYTEMKKAILHVYWEEFQKDPVGLMSRVAQPASKKIDQNKLKPEMDEKGNLTTAGFACSQCGQPLFVYKLEQVSEKGKAYTNYFGRCNVAEHEKLIKLSQLKPEKDSDEAVTYSLGKFGQRALDFYSIHVTKESTHPVKPLAQIAGNRYASGPVGKALSDACMGTIASFLSKYQDIIIEHQKVVKGNQKRLESLRELAGKENLEYPSVTLPPQPHTKEGVDAYNEVIARVRMWVNLNLWQKLKLSRDDAKPLLRLKGFPSFPLVERQANEVDWWDMVCNVKKLINEKKEDGKVFWQNLAGYKRQEALRPYLSSEEDRKKGKKFARYQLGDLLLHLEKKHGERDWGKVYDEAWERIDKKVEGLSKHIKLEEERRSEDAQSKAALTDWLRAKASFVIEGLKEADKDEFCRCELKLQKWYGDLRGKPFAIEAENSILDISGFSKQYNCAFIWQKDGVKKLNLYLIINYFKGGKLRFKKIKPEAFEANRFYTVINKKSGEIVPMEVNFNFDDPNLIILPLAFGKRQGREFIWNDLLSLETGSLKLANGRVIEKTLYNRRTRQDEPALFVALTFERREVLDSSNIKPMNLIGVDRGENIPAVIALTDPEGCPLSRFKDSLGNPTHILRIGESYKEKQRTIQAKKEVEQRRAGGYSRKYASKAKNLADDMVRNTARDLLYYAVTQDAMLIFENLSRGFGRQGKRTFMAERQYTRMEDWLTAKLAYEGLPSKTYLSKTLAQYTSKTCSNCGFTITSADYDRVLEKLKKTATGWMTTINGKELKVEGQITYYNRYKRQNVVKDLSVELDRLSEESVNNDISSWTKGRSGEALSLLKKRFSHRPVQEKFVCLNCGFETHADEQAALNIARSWLFLRSQEYKKYQTNKTTGNTDKRAFVETWQSFYRKKLKEVWKPAV

SEQ ID NO: 43173 - protein, 978 aa, synthetic construct
  REGION 1..978: note = engineered CasX variant
QEIKRINKIRRRLVKDSNTKKAGKTGPMKTLLVRVMTPDLRERLENLRKKPENIPQPISNTSRANLNKLLTDYTEMKKAILHVYWEEFQKDPVGLMSRVAQPASKKIDQNKLKPEMDEKGNLTTAGFACSQCGQPLFVYKLEQVSEKGKAYTNYFGRCNVAEHEKLILLSQLKPEKDSDEAVTYSLGKFGQRALDFYSIHVTKESTHPVKPLAQIAGNRYASPVGKALSDACMGTIASFLSKYQDIIIEHQKVVKGNQKRLESLRELAGKENLEYPSVTLPPQPHTKEGVDAYNEVIARVRMWVNLNLWQKLKLSRDDAKPLLRLKGFPSFPLVERQANEVDWWDMVCNVKKLINEKKEDGKVFWQNLAGYKRQEALRPYLSSEEDRKKGKKFARYQLGDLLLHLEKKHGERDWGKVYDEAWERIDKKVEGLSKHIKLEEERRSEDAQSKAALTDWLRAKASFVIEGLKEADKDEFCRCELKLQKWYGDLRGKPFAIEAENSILDISGFSKQYNCAFIWQKDGVKKLNLYLIINYFKGGKLRFKKIKPEAFEANRFYTVINKKSGEIVPMEVNFNFDDPNLIILPLAFGKRQGREFIWNDLLSLETGSLKLANGRVIEKTLYNRRTRQDEPALFVALTFERREVLDSSNIKPMNLIGVDRGENIPAVIALTDPEGCPLSRFKDSLGNPTHILRIGESYKEKQRTIQAKKEVEQRRAGGYSRKYASKAKNLADDMVRNTARDLLYYAVTQDAMLIFENLSRGFGRQGKRTFMAERQYTRMEDWLTAKLAYEGLPSKTYLSKTLAQYTSKTCSNCGFTITSADYDRVLEKLKKTATGWMTTINGKELKVEGQITYYNRYKRQNVVKDLSVELDRLSEESVNNDISSWTKGRSGEALSLLKKRFSHRPVQEKFVCLNCGFETHADEQAALNIARSWLFLRSQEYKKYQTNKTTGNTDKRAFVETWQSFYRKKLKEVWKPAV

SEQ ID NO: 43174 - protein, 979 aa, synthetic construct
  REGION 1..979: note = engineered CasX variant
QEIKRINKIRRRLVKDSNTKKAGKTGPMKTLLVRVMTPDLRERLENLRKKPENIPQPISNTSRANLNKLLTDYTEMKKAILHVYWEEFQKDPVGLMSRVAQPASKKIDQNKLKPEMDEKGNLTTAGFACSQCGQPLFVYKLEQVSEKGKAYTNYFGRCNVAEHEKLILLSQLKPEKDSDEAVTYSLGKFGQRALDFYSIHVTKESTHPVKPLAQIAGNRYASYPVGKALSDACMGTIASFLSKYQDIIIEHQKVVKGNQKRLESLRELAGKENLEYPSVTLPPQPHTKEGVDAYNEVIARVRMWVNLNLWQKLKLSRDDAKPLLRLKGFPSFPLVERQANEVDWWDMVCNVKKLINEKKEDGKVFWQNLAGYKRQEALRPYLSSEEDRKKGKKFARYQLGDLLLHLEKKHGEYDWGKVYDEAWERIDKKVEGLSKHIKLEEERRSEDAQSKAALTDWLRAKASFVIEGLKEADKDEFCRCELKLQKWYGDLRGKPFAIEAENSILDISGFSKQYNCAFIWQKDGVKKLNLYLIINYFKGGKLRFKKIKPEAFEANRFYTVINKKSGEIVPMEVNFNFDDPNLIILPLAFGKRQGREFIWNDLLSLETGSLKLANGRVIEKTLYNRRTRQDEPALFVALTFERREVLDSSNIKPMNLIGVDRGENIPAVIALTDPEGCPLSRFKDSLGNPTHILRIGESYKEKQRTIQAKKEVEQRRAGGYSRKYASKAKNLADDMVRNTARDLLYYAVTQDAMLIFENLSRGFGRQGKRTFMAERQYTRMEDWLTAKLAYEGLPSKTYLSKTLAQYTSKTCSNCGFTITSADYDRVLEKLKKTATGWMTTINGKELKVEGQITYYNRYKRQNVVKDLSVELDRLSEESVNNDISSWTKGRSGEALSLLKKRFSHRPVQEKFVCLNCGFETHADEQAALNIARSWLFLRSQEYKKYQTNKTTGNTDKRAFVETWQSFYRKKLKEVWKPAV

SEQ ID NO: 43175 - protein, 979 aa, synthetic construct
  REGION 1..979: note = engineered CasX variant
QEIKRINKIRRRLVKDSNTKKAGKTGPMKTLLVRVMTPDLRERLENLRKKPENIPQPISNTSRANLNKLLTDYTEMKKAILHVYWEEFQKDPVGLMSRVAQPASKKIDQNKLKPEMDEKGNLTTAGFACSQCGQPLFVYKLEQVSEKGKAYTNYFGRCNVAEHEKLILLSQLKPEKDSDEAVTYSLGKFGQRALDFYSIHVTKESTHPVKPLAQIAGNRYASHPVGKALSDACMGTIASFLSKYQDIIIEHQKVVKGNQKRLESLRELAGKENLEYPSVTLPPQPHTKEGVDAYNEVIARVRMWVNLNLWQKLKLSRDDAKPLLRLKGFPSFPLVERQANEVDWWDMVCNVKKLINEKKEDGKVFWQNLAGYKRQEALRPYLSSEEDRKKGKKFARYQLGDLLLHLEKKHGEYDWGKVYDEAWERIDKKVEGLSKHIKLEEERRSEDAQSKAALTDWLRAKASFVIEGLKEADKDEFCRCELKLQKWYGDLRGKPFAIEAENSILDISGFSKQYNCAFIWQKDGVKKLNLYLIINYFKGGKLRFKKIKPEAFEANRFYTVINKKSGEIVPMEVNFNFDDPNLIILPLAFGKRQGREFIWNDLLSLETGSLKLANGRVIEKTLYNRRTRQDEPALFVALTFERREVLDSSNIKPMNLIGVDRGENIPAVIALTDPEGCPLSRFKDSLGNPTHILRIGESYKEKQRTIQAKKEVEQRRAGGYSRKYASKAKNLADDMVRNTARDLLYYAVTQDAMLIFENLSRGFGRQGKRTFMAERQYTRMEDWLTAKLAYEGLPSKTYLSKTLAQYTSKTCSNCGFTITSADYDRVLEKLKKTATGWMTTINGKELKVEGQITYYNRYKRQNVVKDLSVELDRLSEESVNNDISSWTKGRSGEALSLLKKRFSHRPVQEKFVCLNCGFETHADEQAALNIARSWLFLRSQEYKKYQTNKTTGNTDKRAFVETWQSFYRKKLKEVWKPAV

SEQ ID NO: 43176 - protein, 979 aa, synthetic construct
  REGION 1..979: note = engineered CasX variant
QEIKRINKIRRRLVKDSNTKKAGKTGPMKTLLVRVMTPDLRERLENLRKKPENIPQPISNTSRANLNKLLTDYTEMKKAILHVYWEEFQKDPVGLMSRVAQPASKKIDQNKLKPEMDEKGNLTTAGFACSQCGQPLFVYKLEQVSEKGKAYTNYFGRCNVAEHEKLILLSQLKPEKDSDEAVTYSLGKFGQRALDFYSIHVTKESTHPVKPLAQIAGNRYASSPVGKALSDACMGTIASFLSKYQDIIIEHQKVVKGNQKRLESLRELAGKENLEYPSVTLPPQPHTKEGVDAYNEVIARVRMWVNLNLWQKLKLSRDDAKPLLRLKGFPSFPLVERQANEVDWWDMVCNVKKLINEKKEDGKVFWQNLAGYKRQEALRPYLSSEEDRKKGKKFARYQLGDLLLHLEKKHGEYDWGKVYDEAWERIDKKVEGLSKHIKLEEERRSEDAQSKAALTDWLRAKASFVIEGLKEADKDEFCRCELKLQKWYGDLRGKPFAIEAENSILDISGFSKQYNCAFIWQKDGVKKLNLYLIINYFKGGKLRFKKIKPEAFEANRFYTVINKKSGEIVPMEVNFNFDDPNLIILPLAFGKRQGREFIWNDLLSLETGSLKLANGRVIEKTLYNRRTRQDEPALFVALTFERREVLDSSNIKPMNLIGVDRGENIPAVIALTDPEGCPLSRFKDSLGNPTHILRIGESYKEKQRTIQAKKEVEQRRAGGYSRKYASKAKNLADDMVRNTARDLLYYAVTQDAMLIFENLSRGFGRQGKRTFMAERQYTRMEDWLTAKLAYEGLPSKTYLSKTLAQYTSKTCSNCGFTITSADYDRVLEKLKKTATGWMTTINGKELKVEGQITYYNRYKRQNVVKDLSVELDRLSEESVNNDISSWTKGRSGEALSLLKKRFSHRPVQEKFVCLNCGFETHADEQAALNIARSWLFLRSQEYKKYQTNKTTGNTDKRAFVETWQSFYRKKLKEVWKPAV

SEQ ID NO: 43177 - protein, 979 aa, synthetic construct
  REGION 1..979: note = engineered CasX variant
QEIKRINKIRRRLVKDSNTKKAGKTGPMKTLLVRVMTPDLRERLENLRKKPENIPQPISNTSRANLNKLLTDYTEMKKAILHVYWEEFQKDPVGLMSRVAQPASKKIDQNKLKPEMDEKGNLTTAGFACSQCGQPLFVYKLEQVSEKGKAYTNYFGRCNVAEHEKLILLSQLKPEKDSDEAVTYSLGKFGQRALDFYSIHVTKESTHPVKPLAQIAGNRYASTPVGKALSDACMGTIASFLSKYQDIIIEHQKVVKGNQKRLESLRELAGKENLEYPSVTLPPQPHTKEGVDAYNEVIARVRMWVNLNLWQKLKLSRDDAKPLLRLKGFPSFPLVERQANEVDWWDMVCNVKKLINEKKEDGKVFWQNLAGYKRQEALRPYLSSEEDRKKGKKFARYQLGDLLLHLEKKHGEYDWGKVYDEAWERIDKKVEGLSKHIKLEEERRSEDAQSKAALTDWLRAKASFVIEGLKEADKDEFCRCELKLQKWYGDLRGKPFAIEAENSILDISGFSKQYNCAFIWQKDGVKKLNLYLIINYFKGGKLRFKKIKPEAFEANRFYTVINKKSGEIVPMEVNFNFDDPNLIILPLAFGKRQGREFIWNDLLSLETGSLKLANGRVIEKTLYNRRTRQDEPALFVALTFERREVLDSSNIKPMNLIGVDRGENIPAVIALTDPEGCPLSRFKDSLGNPTHILRIGESYKEKQRTIQAKKEVEQRRAGGYSRKYASKAKNLADDMVRNTARDLLYYAVTQDAMLIFENLSRGFGRQGKRTFMAERQYTRMEDWLTAKLAYEGLPSKTYLSKTLAQYTSKTCSNCGFTITSADYDRVLEKLKKTATGWMTTINGKELKVEGQITYYNRYKRQNVVKDLSVELDRLSEESVNNDISSWTKGRSGEALSLLKKRFSHRPVQEKFVCLNCGFETHADEQAALNIARSWLFLRSQEYKKYQTNKTTGNTDKRAFVETWQSFYRKKLKEVWKPAV

SEQ ID NO: 43178 - protein, 979 aa, synthetic construct
  REGION 1..979: note = engineered CasX variant
QEIKRINKIRRRLVKDSNTKKAGKTGPMKTLLVRVMTPDLRERLENLRKKPENIPQPISNTSRANLNKLLTDYTEMKKAILHVYWEEFQKDPVGLMSRVAQPASKKIDQNKLKPEMDEKGNLTTAGFACSQCGQPLFVYKLEQVSEKGKAYTNYFGRCNVAEHEKLILLSQLKPEKDSDEAVTYSLGKFGQRALDFYSIHVTKESTHPVKPLAQIAGNRYASAPVGKALSDACMGTIASFLSKYQDIIIEHQKVVKGNQKRLESLRELAGKENLEYPSVTLPPQPHTKEGVDAYNEVIARVRMWVNLNLWQKLKLSRDDAKPLLRLKGFPSFPLVERQANEVDWWDMVCNVKKLINEKKEDGKVFWQNLAGYKRQEALRPYLSSEEDRKKGKKFARYQLGDLLLHLEKKHGEYDWGKVYDEAWERIDKKVEGLSKHIKLEEERRSEDAQSKAALTDWLRAKASFVIEGLKEADKDEFCRCELKLQKWYGDLRGKPFAIEAENSILDISGFSKQYNCAFIWQKDGVKKLNLYLIINYFKGGKLRFKKIKPEAFEANRFYTVINKKSGEIVPMEVNFNFDDPNLIILPLAFGKRQGREFIWNDLLSLETGSLKLANGRVIEKTLYNRRTRQDEPALFVALTFERREVLDSSNIKPMNLIGVDRGENIPAVIALTDPEGCPLSRFKDSLGNPTHILRIGESYKEKQRTIQAKKEVEQRRAGGYSRKYASKAKNLADDMVRNTARDLLYYAVTQDAMLIFENLSRGFGRQGKRTFMAERQYTRMEDWLTAKLAYEGLPSKTYLSKTLAQYTSKTCSNCGFTITSADYDRVLEKLKKTATGWMTTINGKELKVEGQITYYNRYKRQNVVKDLSVELDRLSEESVNNDISSWTKGRSGEALSLLKKRFSHRPVQEKFVCLNCGFETHADEQAALNIARSWLFLRSQEYKKYQTNKTTGNTDKRAFVETWQSFYRKKLKEVWKPAV

SEQ ID NO: 43179 - protein, 979 aa, synthetic construct
  REGION 1..979: note = engineered CasX variant
QEIKRINKIRRRLVKDSNTKKAGKTGPMKTLLVRVMTPDLRERLENLRKKPENIPQPISNTSRANLNKLLTDYTEMKKAILHVYWEEFQKDPVGLMSRVAQPASKKIDQNKLKPEMDEKGNLTTAGFACSQCGQPLFVYKLEQVSEKGKAYTNYFGRCNVAEHEKLILLSQLKPEKDSDEAVTYSLGKFGQRALDFYSIHVTKESTHPVKPLAQIAGNRYASVPVGKALSDACMGTIASFLSKYQDIIIEHQKVVKGNQKRLESLRELAGKENLEYPSVTLPPQPHTKEGVDAYNEVIARVRMWVNLNLWQKLKLSRDDAKPLLRLKGFPSFPLVERQANEVDWWDMVCNVKKLINEKKEDGKVFWQNLAGYKRQEALRPYLSSEEDRKKGKKFARYQLGDLLLHLEKKHGEYDWGKVYDEAWERIDKKVEGLSKHIKLEEERRSEDAQSKAALTDWLRAKASFVIEGLKEADKDEFCRCELKLQKWYGDLRGKPFAIEAENSILDISGFSKQYNCAFIWQKDGVKKLNLYLIINYFKGGKLRFKKIKPEAFEANRFYTVINKKSGEIVPMEVNFNFDDPNLIILPLAFGKRQGREFIWNDLLSLETGSLKLANGRVIEKTLYNRRTRQDEPALFVALTFERREVLDSSNIKPMNLIGVDRGENIPAVIALTDPEGCPLSRFKDSLGNPTHILRIGESYKEKQRTIQAKKEVEQRRAGGYSRKYASKAKNLADDMVRNTARDLLYYAVTQDAMLIFENLSRGFGRQGKRTFMAERQYTRMEDWLTAKLAYEGLPSKTYLSKTLAQYTSKTCSNCGFTITSADYDRVLEKLKKTATGWMTTINGKELKVEGQITYYNRYKRQNVVKDLSVELDRLSEESVNNDISSWTKGRSGEALSLLKKRFSHRPVQEKFVCLNCGFETHADEQAALNIARSWLFLRSQEYKKYQTNKTTGNTDKRAFVETWQSFYRKKLKEVWKPAV

SEQ ID NO: 43180 - protein, 979 aa, synthetic construct
  REGION 1..979: note = engineered CasX variant
QEIKRINKIRRRLVKDSNTKKAGKTGPMKTLLVRVMTPDLRERLENLRKKPENIPQPISNTSRANLNKLLTDYTEMKKAILHVYWEEFQKDPVGLMSRVAQPASKKIDQNKLKPEMDEKGNLTTAGFACSQCGQPLFVYKLEQVSEKGKAYTNYFGRCNVAEHEKLIKLSQLKPEKDSDEAVTYSLGKFGQRALDFYSIHVTKESTHPVKPLAQIAGNRYASGPVGKALSDACMGTIASFLSKYQDIIIEHQKVVKGNQKRLESLRELAGKENLEYPSVTLPPQPHTKEGVDAYNEVIARVRMWVNLNLWQKLKLSRDDAKPLLRLKGFPSFPLVERQANEVDWWDMVCNVKKLINEKKEDGKVFWQNLAGYKRQEALRPYLSSEEDRKKGKKFARYQLGDLLLHLEKKHGEYDWGKVYDEAWERIDKKVEGLSKHIKLEEERRSEDAQSKAALTDWLRAKASFVIEGLKEADKDEFCRCELKLQKWYGDLRGKPFAIEAENSILDISGFSKQYNCAFIWQKDGVKKLNLYLIINYFKGGKLRFKKIKPEAFEANRFYTVINKKSGEIVPMEVNFNFDDPNLIILPLAFGKRQGREFIWNDLLSLETGSLKLANGRVIEKTLYNRRTRQDEPALFVALTFERREVLDSSNIKPMNLIGVDRGENIPAVIALTDPEGCPLSRFKDSLGNPTHILRIGESYKEKQRTIQAKKEVEQRRAGGYSRKYASKAKNLADDMVRNTARDLLYYAVTQDAMLIFENLSRGFGRQGKRTFMAERQYTRMEDWLTAKLAYEGLPSKTYLSKTLAQYTSKTCSNCGFTITSADYDRVLEKLKKTATGWMTTINGKELKVEGQITYYNRYKRQNVVKDLSVELDRLSEESVNNDISSWTKGRSGEALSLLKKRFSHRPVQEKFVCLNCGFETHADEQAALNIARSWLFLRSQEYKKYQTNKTTGNTDKRAFVETWQSFYRKKLKEVWKPAV

SEQ ID NO: 43181 - protein, 978 aa, synthetic construct
  REGION 1..978: note = engineered CasX variant
QEIKRINKIRRRLVKDSNTKKAGKTGPMKTLLVRVMTPDLRERLENLRKKPENIPQPISNTSRANLNKLLTDYTEMKKAILHVYWEEFQKDPVGLMSRVAQPASKKIDQNKLKPEMDEKGNLTTAGFACSQCGQPLFVYKLEQVSEKGKAYTNYFGRCNVAEHEKLILLSQLKPEKDSDEAVTYSLGKFGQRALDFYSIHVTKESTHPVKPLAQIAGNRYASPVGKALSDACMGTIASFLSKYQDIIIEHQKVVKGNQKRLESLRELAGKENLEYPSVTLPPQPHTKEGVDAYNEVIARVRMWVNLNLWQKLKLSRDDAKPLLRLKGFPSFPLVERQANEVDWWDMVCNVKKLINEKKEDGKVFWQNLAGYKRQEALRPYLSSEEDRKKGKKFARYQLGDLLLHLEKKHGEYDWGKVYDEAWERIDKKVEGLSKHIKLEEERRSEDAQSKAALTDWLRAKASFVIEGLKEADKDEFCRCELKLQKWYGDLRGKPFAIEAENSILDISGFSKQYNCAFIWQKDGVKKLNLYLIINYFKGGKLRFKKIKPEAFEANRFYTVINKKSGEIVPMEVNFNFDDPNLIILPLAFGKRQGREFIWNDLLSLETGSLKLANGRVIEKTLYNRRTRQDEPALFVALTFERREVLDSSNIKPMNLIGVDRGENIPAVIALTDPEGCPLSRFKDSLGNPTHILRIGESYKEKQRTIQAKKEVEQRRAGGYSRKYASKAKNLADDMVRNTARDLLYYAVTQDAMLIFENLSRGFGRQGKRTFMAERQYTRMEDWLTAKLAYEGLPSKTYLSKTLAQYTSKTCSNCGFTITSADYDRVLEKLKKTATGWMTTINGKELKVEGQITYYNRYKRQNVVKDLSVELDRLSEESVNNDISSWTKGRSGEALSLLKKRFSHRPVQEKFVCLNCGFETHADEQAALNIARSWLFLRSQEYKKYQTNKTTGNTDKRAFVETWQSFYRKKLKEVWKPAV

SEQ ID NO: 43182 - protein, 978 aa, synthetic construct
  REGION 1..978: note = engineered CasX variant
QEIKRINKIRRRLVKDSNTKKAGKTGPMKTLLVRVMTPDLRERLENLRKKPENIPQPISNTSRANLNKLLTDYTEMKKAILHVYWEEFQKDPVGLMSRVAQPASKKIDQNKLKPEMDEKGNLTTAGFACSQCGQPLFVYKLEQVSEKGKAYTNYFGRCNVAEHEKLILLSQLKPEKDSDEAVTYSLGKFGQRALDFYSIHVTKESTHPVKPLAQIAGNRYASYPVGKALSDACMGTIASFLSKYQDIIIEHQKVVKGNQKRLESLRELAGKENLEYPSVTLPPQPHTKEGVDAYNEVIARVRMWVNLNLWQKLKLSRDDAKPLLRLKGFPSFPLVERQANEVDWWDMVCNVKKLINEKKEDGKVFWQNLAGYKRQEALRPYLSSEEDRKKGKKFARYQLGDLLLHLEKKHGEDWGDVYDEAWERIDKKVEGLSKHIKLEEERRSEDAQSKAALTDWLRAKASFVIEGLKEADKDEFCRCELKLQKWYGDLRGKPFAIEAENSILDISGFSKQYNCAFIWQKDGVKKLNLYLIINYFKGGKLRFKKIKPEAFEANRFYTVINKKSGEIVPMEVNFNFDDPNLIILPLAFGKRQGREFIWNDLLSLETGSLKLANGRVIEKTLYNRRTRQDEPALFVALTFERREVLDSSNIKPMNLIGVDRGENIPAVIALTDPEGCPLSRFKDSLGNPTHILRIGESYKEKQRTIQAKKEVEQRRAGGYSRKYASKAKNLADDMVRNTARDLLYYAVTQDAMLIFENLSRGFGRQGKRTFMAERQYTRMEDWLTAKLAYEGLPSKTYLSKTLAQYTSKTCSNCGFTITSADYDRVLEKLKKTATGWMTTINGKELKVEGQITYYNRYKRQNVVKDLSVELDRLSEESVNNDISSWTKGRSGEALSLLKKRFSHRPVQEKFVCLNCGFETHADEQAALNIARSWLFLRSQEYKKYQTNKTTGNTDKRAFVETWQSFYRKKLKEVWKPAV

SEQ ID NO: 43183 - protein, 978 aa, synthetic construct
  REGION 1..978: note = engineered CasX variant
QEIKRINKIRRRLVKDSNTKKAGKTGPMKTLLVRVMTPDLRERLENLRKKPENIPQPISNTSRANLNKLLTDYTEMKKAILHVYWEEFQKDPVGLMSRVAQPASKKIDQNKLKPEMDEKGNLTTAGFACSQCGQPLFVYKLEQVSEKGKAYTNYFGRCNVAEHEKLILLSQLKPEKDSDEAVTYSLGKFGQRALDFYSIHVTKESTHPVKPLAQIAGNRYASHPVGKALSDACMGTIASFLSKYQDIIIEHQKVVKGNQKRLESLRELAGKENLEYPSVTLPPQPHTKEGVDAYNEVIARVRMWVNLNLWQKLKLSRDDAKPLLRLKGFPSFPLVERQANEVDWWDMVCNVKKLINEKKEDGKVFWQNLAGYKRQEALRPYLSSEEDRKKGKKFARYQLGDLLLHLEKKHGEDWGDVYDEAWERIDKKVEGLSKHIKLEEERRSEDAQSKAALTDWLRAKASFVIEGLKEADKDEFCRCELKLQKWYGDLRGKPFAIEAENSILDISGFSKQYNCAFIWQKDGVKKLNLYLIINYFKGGKLRFKKIKPEAFEANRFYTVINKKSGEIVPMEVNFNFDDPNLIILPLAFGKRQGREFIWNDLLSLETGSLKLANGRVIEKTLYNRRTRQDEPALFVALTFERREVLDSSNIKPMNLIGVDRGENIPAVIALTDPEGCPLSRFKDSLGNPTHILRIGESYKEKQRTIQAKKEVEQRRAGGYSRKYASKAKNLADDMVRNTARDLLYYAVTQDAMLIFENLSRGFGRQGKRTFMAERQYTRMEDWLTAKLAYEGLPSKTYLSKTLAQYTSKTCSNCGFTITSADYDRVLEKLKKTATGWMTTINGKELKVEGQITYYNRYKRQNVVKDLSVELDRLSEESVNNDISSWTKGRSGEALSLLKKRFSHRPVQEKFVCLNCGFETHADEQAALNIARSWLFLRSQEYKKYQTNKTTGNTDKRAFVETWQSFYRKKLKEVWKPAV

SEQ ID NO: 43184 - protein, 978 aa, synthetic construct
  REGION 1..978: note = engineered CasX variant
QEIKRINKIRRRLVKDSNTKKAGKTGPMKTLLVRVMTPDLRERLENLRKKPENIPQPISNTSRANLNKLLTDYTEMKKAILHVYWEEFQKDPVGLMSRVAQPASKKIDQNKLKPEMDEKGNLTTAGFACSQCGQPLFVYKLEQVSEKGKAYTNYFGRCNVAEHEKLILLSQLKPEKDSDEAVTYSLGKFGQRALDFYSIHVTKESTHPVKPLAQIAGNRYASSPVGKALSDACMGTIASFLSKYQDIIIEHQKVVKGNQKRLESLRELAGKENLEYPSVTLPPQPHTKEGVDAYNEVIARVRMWVNLNLWQKLKLSRDDAKPLLRLKGFPSFPLVERQANEVDWWDMVCNVKKLINEKKEDGKVFWQNLAGYKRQEALRPYLSSEEDRKKGKKFARYQLGDLLLHLEKKHGEDWGDVYDEAWERIDKKVEGLSKHIKLEEERRSEDAQSKAALTDWLRAKASFVIEGLKEADKDEFCRCELKLQKWYGDLRGKPFAIEAENSILDISGFSKQYNCAFIWQKDGVKKLNLYLIINYFKGGKLRFKKIKPEAFEANRFYTVINKKSGEIVPMEVNFNFDDPNLIILPLAFGKRQGREFIWNDLLSLETGSLKLANGRVIEKTLYNRRTRQDEPALFVALTFERREVLDSSNIKPMNLIGVDRGENIPAVIALTDPEGCPLSRFKDSLGNPTHILRIGESYKEKQRTIQAKKEVEQRRAGGYSRKYASKAKNLADDMVRNTARDLLYYAVTQDAMLIFENLSRGFGRQGKRTFMAERQYTRMEDWLTAKLAYEGLPSKTYLSKTLAQYTSKTCSNCGFTITSADYDRVLEKLKKTATGWMTTINGKELKVEGQITYYNRYKRQNVVKDLSVELDRLSEESVNNDISSWTKGRSGEALSLLKKRFSHRPVQEKFVCLNCGFETHADEQAALNIARSWLFLRSQEYKKYQTNKTTGNTDKRAFVETWQSFYRKKLKEVWKPAV

SEQ ID NO: 43185 - protein, 978 aa, synthetic construct
  REGION 1..978: note = engineered CasX variant
QEIKRINKIRRRLVKDSNTKKAGKTGPMKTLLVRVMTPDLRERLENLRKKPENIPQPISNTSRANLNKLLTDYTEMKKAILHVYWEEFQKDPVGLMSRVAQPASKKIDQNKLKPEMDEKGNLTTAGFACSQCGQPLFVYKLEQVSEKGKAYTNYFGRCNVAEHEKLILLSQLKPEKDSDEAVTYSLGKFGQRALDFYSIHVTKESTHPVKPLAQIAGNRYASTPVGKALSDACMGTIASFLSKYQDIIIEHQKVVKGNQKRLESLRELAGKENLEYPSVTLPPQPHTKEGVDAYNEVIARVRMWVNLNLWQKLKLSRDDAKPLLRLKGFPSFPLVERQANEVDWWDMVCNVKKLINEKKEDGKVFWQNLAGYKRQEALRPYLSSEEDRKKGKKFARYQLGDLLLHLEKKHGEDWGDVYDEAWERIDKKVEGLSKHIKLEEERRSEDAQSKAALTDWLRAKASFVIEGLKEADKDEFCRCELKLQKWYGDLRGKPFAIEAENSILDISGFSKQYNCAFIWQKDGVKKLNLYLIINYFKGGKLRFKKIKPEAFEANRFYTVINKKSGEIVPMEVNFNFDDPNLIILPLAFGKRQGREFIWNDLLSLETGSLKLANGRVIEKTLYNRRTRQDEPALFVALTFERREVLDSSNIKPMNLIGVDRGENIPAVIALTDPEGCPLSRFKDSLGNPTHILRIGESYKEKQRTIQAKKEVEQRRAGGYSRKYASKAKNLADDMVRNTARDLLYYAVTQDAMLIFENLSRGFGRQGKRTFMAERQYTRMEDWLTAKLAYEGLPSKTYLSKTLAQYTSKTCSNCGFTITSADYDRVLEKLKKTATGWMTTINGKELKVEGQITYYNRYKRQNVVKDLSVELDRLSEESVNNDISSWTKGRSGEALSLLKKRFSHRPVQEKFVCLNCGFETHADEQAALNIARSWLFLRSQEYKKYQTNKTTGNTDKRAFVETWQSFYRKKLKEVWKPAV

SEQ ID NO: 43186 - protein, 978 aa, synthetic construct
  REGION 1..978: note = engineered CasX variant
QEIKRINKIRRRLVKDSNTKKAGKTGPMKTLLVRVMTPDLRERLENLRKKPENIPQPISNTSRANLNKLLTDYTEMKKAILHVYWEEFQKDPVGLMSRVAQPASKKIDQNKLKPEMDEKGNLTTAGFACSQCGQPLFVYKLEQVSEKGKAYTNYFGRCNVAEHEKLILLSQLKPEKDSDEAVTYSLGKFGQRALDFYSIHVTKESTHPVKPLAQIAGNRYASAPVGKALSDACMGTIASFLSKYQDIIIEHQKVVKGNQKRLESLRELAGKENLEYPSVTLPPQPHTKEGVDAYNEVIARVRMWVNLNLWQKLKLSRDDAKPLLRLKGFPSFPLVERQANEVDWWDMVCNVKKLINEKKEDGKVFWQNLAGYKRQEALRPYLSSEEDRKKGKKFARYQLGDLLLHLEKKHGEDWGDVYDEAWERIDKKVEGLSKHIKLEEERRSEDAQSKAALTDWLRAKASFVIEGLKEADKDEFCRCELKLQKWYGDLRGKPFAIEAENSILDISGFSKQYNCAFIWQKDGVKKLNLYLIINYFKGGKLRFKKIKPEAFEANRFYTVINKKSGEIVPMEVNFNFDDPNLIILPLAFGKRQGREFIWNDLLSLETGSLKLANGRVIEKTLYNRRTRQDEPALFVALTFERREVLDSSNIKPMNLIGVDRGENIPAVIALTDPEGCPLSRFKDSLGNPTHILRIGESYKEKQRTIQAKKEVEQRRAGGYSRKYASKAKNLADDMVRNTARDLLYYAVTQDAMLIFENLSRGFGRQGKRTFMAERQYTRMEDWLTAKLAYEGLPSKTYLSKTLAQYTSKTCSNCGFTITSADYDRVLEKLKKTATGWMTTINGKELKVEGQITYYNRYKRQNVVKDLSVELDRLSEESVNNDISSWTKGRSGEALSLLKKRFSHRPVQEKFVCLNCGFETHADEQAALNIARSWLFLRSQEYKKYQTNKTTGNTDKRAFVETWQSFYRKKLKEVWKPAV

SEQ ID NO: 43187 - protein, 978 aa, synthetic construct
  REGION 1..978: note = engineered CasX variant
QEIKRINKIRRRLVKDSNTKKAGKTGPMKTLLVRVMTPDLRERLENLRKKPENIPQPISNTSRANLNKLLTDYTEMKKAILHVYWEEFQKDPVGLMSRVAQPASKKIDQNKLKPEMDEKGNLTTAGFACSQCGQPLFVYKLEQVSEKGKAYTNYFGRCNVAEHEKLILLSQLKPEKDSDEAVTYSLGKFGQRALDFYSIHVTKESTHPVKPLAQIAGNRYASVPVGKALSDACMGTIASFLSKYQDIIIEHQKVVKGNQKRLESLRELAGKENLEYPSVTLPPQPHTKEGVDAYNEVIARVRMWVNLNLWQKLKLSRDDAKPLLRLKGFPSFPLVERQANEVDWWDMVCNVKKLINEKKEDGKVFWQNLAGYKRQEALRPYLSSEEDRKKGKKFARYQLGDLLLHLEKKHGEDWGDVYDEAWERIDKKVEGLSKHIKLEEERRSEDAQSKAALTDWLRAKASFVIEGLKEADKDEFCRCELKLQKWYGDLRGKPFAIEAENSILDISGFSKQYNCAFIWQKDGVKKLNLYLIINYFKGGKLRFKKIKPEAFEANRFYTVINKKSGEIVPMEVNFNFDDPNLIILPLAFGKRQGREFIWNDLLSLETGSLKLANGRVIEKTLYNRRTRQDEPALFVALTFERREVLDSSNIKPMNLIGVDRGENIPAVIALTDPEGCPLSRFKDSLGNPTHILRIGESYKEKQRTIQAKKEVEQRRAGGYSRKYASKAKNLADDMVRNTARDLLYYAVTQDAMLIFENLSRGFGRQGKRTFMAERQYTRMEDWLTAKLAYEGLPSKTYLSKTLAQYTSKTCSNCGFTITSADYDRVLEKLKKTATGWMTTINGKELKVEGQITYYNRYKRQNVVKDLSVELDRLSEESVNNDISSWTKGRSGEALSLLKKRFSHRPVQEKFVCLNCGFETHADEQAALNIARSWLFLRSQEYKKYQTNKTTGNTDKRAFVETWQSFYRKKLKEVWKPAV

SEQ ID NO: 43188 - protein, 978 aa, synthetic construct
  REGION 1..978: note = engineered CasX variant
QEIKRINKIRRRLVKDSNTKKAGKTGPMKTLLVRVMTPDLRERLENLRKKPENIPQPISNTSRANLNKLLTDYTEMKKAILHVYWEEFQKDPVGLMSRVAQPASKKIDQNKLKPEMDEKGNLTTAGFACSQCGQPLFVYKLEQVSEKGKAYTNYFGRCNVAEHEKLIKLSQLKPEKDSDEAVTYSLGKFGQRALDFYSIHVTKESTHPVKPLAQIAGNRYASGPVGKALSDACMGTIASFLSKYQDIIIEHQKVVKGNQKRLESLRELAGKENLEYPSVTLPPQPHTKEGVDAYNEVIARVRMWVNLNLWQKLKLSRDDAKPLLRLKGFPSFPLVERQANEVDWWDMVCNVKKLINEKKEDGKVFWQNLAGYKRQEALRPYLSSEEDRKKGKKFARYQLGDLLLHLEKKHGEDWGDVYDEAWERIDKKVEGLSKHIKLEEERRSEDAQSKAALTDWLRAKASFVIEGLKEADKDEFCRCELKLQKWYGDLRGKPFAIEAENSILDISGFSKQYNCAFIWQKDGVKKLNLYLIINYFKGGKLRFKKIKPEAFEANRFYTVINKKSGEIVPMEVNFNFDDPNLIILPLAFGKRQGREFIWNDLLSLETGSLKLANGRVIEKTLYNRRTRQDEPALFVALTFERREVLDSSNIKPMNLIGVDRGENIPAVIALTDPEGCPLSRFKDSLGNPTHILRIGESYKEKQRTIQAKKEVEQRRAGGYSRKYASKAKNLADDMVRNTARDLLYYAVTQDAMLIFENLSRGFGRQGKRTFMAERQYTRMEDWLTAKLAYEGLPSKTYLSKTLAQYTSKTCSNCGFTITSADYDRVLEKLKKTATGWMTTINGKELKVEGQITYYNRYKRQNVVKDLSVELDRLSEESVNNDISSWTKGRSGEALSLLKKRFSHRPVQEKFVCLNCGFETHADEQAALNIARSWLFLRSQEYKKYQTNKTTGNTDKRAFVETWQSFYRKKLKEVWKPAV

SEQ ID NO: 43189 - protein, 977 aa, synthetic construct
  REGION 1..977: note = engineered CasX variant
QEIKRINKIRRRLVKDSNTKKAGKTGPMKTLLVRVMTPDLRERLENLRKKPENIPQPISNTSRANLNKLLTDYTEMKKAILHVYWEEFQKDPVGLMSRVAQPASKKIDQNKLKPEMDEKGNLTTAGFACSQCGQPLFVYKLEQVSEKGKAYTNYFGRCNVAEHEKLILLSQLKPEKDSDEAVTYSLGKFGQRALDFYSIHVTKESTHPVKPLAQIAGNRYASPVGKALSDACMGTIASFLSKYQDIIIEHQKVVKGNQKRLESLRELAGKENLEYPSVTLPPQPHTKEGVDAYNEVIARVRMWVNLNLWQKLKLSRDDAKPLLRLKGFPSFPLVERQANEVDWWDMVCNVKKLINEKKEDGKVFWQNLAGYKRQEALRPYLSSEEDRKKGKKFARYQLGDLLLHLEKKHGEDWGDVYDEAWERIDKKVEGLSKHIKLEEERRSEDAQSKAALTDWLRAKASFVIEGLKEADKDEFCRCELKLQKWYGDLRGKPFAIEAENSILDISGFSKQYNCAFIWQKDGVKKLNLYLIINYFKGGKLRFKKIKPEAFEANRFYTVINKKSGEIVPMEVNFNFDDPNLIILPLAFGKRQGREFIWNDLLSLETGSLKLANGRVIEKTLYNRRTRQDEPALFVALTFERREVLDSSNIKPMNLIGVDRGENIPAVIALTDPEGCPLSRFKDSLGNPTHILRIGESYKEKQRTIQAKKEVEQRRAGGYSRKYASKAKNLADDMVRNTARDLLYYAVTQDAMLIFENLSRGFGRQGKRTFMAERQYTRMEDWLTAKLAYEGLPSKTYLSKTLAQYTSKTCSNCGFTITSADYDRVLEKLKKTATGWMTTINGKELKVEGQITYYNRYKRQNVVKDLSVELDRLSEESVNNDISSWTKGRSGEALSLLKKRFSHRPVQEKFVCLNCGFETHADEQAALNIARSWLFLRSQEYKKYQTNKTTGNTDKRAFVETWQSFYRKKLKEVWKPAV

SEQ ID NO: 43190 - protein, 978 aa, synthetic construct
  REGION 1..978: note = engineered CasX variant
QEIKRINKIRRRLVKDSNTKKAGKTGPMKTLLVRVMTPDLRERLENLRKKPENIPQPISNTSRANLNKLLTDYTEMKKAILHVYWEEFQKDPVGLMSRVAQPASKKIDQNKLKPEMDEKGNLTTAGFACSQCGQPLFVYKLEQVSEKGKAYTNYFGRCNVAEHEKLILLSQLKPEKDSDEAVTYSLGKFGQRALDFYSIHVTKESTHPVKPLAQIAGNRYASYPVGKALSDACMGTIASFLSKYQDIIIEHQKVVKGNQKRLESLRELAGKENLEYPSVTLPPQPHTKEGVDAYNEVIARVRMWVNLNLWQKLKLSRDDAKPLLRLKGFPSFPLVERQANEVDWWDMVCNVKKLINEKKEDGKVFWQNLAGYKRQEALRPYLSSEEDRKKGKKFARYQLGDLLLHLEKKHGEDWGKVYGEAWERIDKKVEGLSKHIKLEEERRSEDAQSKAALTDWLRAKASFVIEGLKEADKDEFCRCELKLQKWYGDLRGKPFAIEAENSILDISGFSKQYNCAFIWQKDGVKKLNLYLIINYFKGGKLRFKKIKPEAFEANRFYTVINKKSGEIVPMEVNFNFDDPNLIILPLAFGKRQGREFIWNDLLSLETGSLKLANGRVIEKTLYNRRTRQDEPALFVALTFERREVLDSSNIKPMNLIGVDRGENIPAVIALTDPEGCPLSRFKDSLGNPTHILRIGESYKEKQRTIQAKKEVEQRRAGGYSRKYASKAKNLADDMVRNTARDLLYYAVTQDAMLIFENLSRGFGRQGKRTFMAERQYTRMEDWLTAKLAYEGLPSKTYLSKTLAQYTSKTCSNCGFTITSADYDRVLEKLKKTATGWMTTINGKELKVEGQITYYNRYKRQNVVKDLSVELDRLSEESVNNDISSWTKGRSGEALSLLKKRFSHRPVQEKFVCLNCGFETHADEQAALNIARSWLFLRSQEYKKYQTNKTTGNTDKRAFVETWQSFYRKKLKEVWKPAV

SEQ ID NO: 43191 - protein, 978 aa, synthetic construct
  REGION 1..978: note = engineered CasX variant
QEIKRINKIRRRLVKDSNTKKAGKTGPMKTLLVRVMTPDLRERLENLRKKPENIPQPISNTSRANLNKLLTDYTEMKKAILHVYWEEFQKDPVGLMSRVAQPASKKIDQNKLKPEMDEKGNLTTAGFACSQCGQPLFVYKLEQVSEKGKAYTNYFGRCNVAEHEKLILLSQLKPEKDSDEAVTYSLGKFGQRALDFYSIHVTKESTHPVKPLAQIAGNRYASHPVGKALSDACMGTIASFLSKYQDIIIEHQKVVKGNQKRLESLRELAGKENLEYPSVTLPPQPHTKEGVDAYNEVIARVRMWVNLNLWQKLKLSRDDAKPLLRLKGFPSFPLVERQANEVDWWDMVCNVKKLINEKKEDGKVFWQNLAGYKRQEALRPYLSSEEDRKKGKKFARYQLGDLLLHLEKKHGEDWGKVYGEAWERIDKKVEGLSKHIKLEEERRSEDAQSKAALTDWLRAKASFVIEGLKEADKDEFCRCELKLQKWYGDLRGKPFAIEAENSILDISGFSKQYNCAFIWQKDGVKKLNLYLIINYFKGGKLRFKKIKPEAFEANRFYTVINKKSGEIVPMEVNFNFDDPNLIILPLAFGKRQGREFIWNDLLSLETGSLKLANGRVIEKTLYNRRTRQDEPALFVALTFERREVLDSSNIKPMNLIGVDRGENIPAVIALTDPEGCPLSRFKDSLGNPTHILRIGESYKEKQRTIQAKKEVEQRRAGGYSRKYASKAKNLADDMVRNTARDLLYYAVTQDAMLIFENLSRGFGRQGKRTFMAERQYTRMEDWLTAKLAYEGLPSKTYLSKTLAQYTSKTCSNCGFTITSADYDRVLEKLKKTATGWMTTINGKELKVEGQITYYNRYKRQNVVKDLSVELDRLSEESVNNDISSWTKGRSGEALSLLKKRFSHRPVQEKFVCLNCGFETHADEQAALNIARSWLFLRSQEYKKYQTNKTTGNTDKRAFVETWQSFYRKKLKEVWKPAV

SEQ ID NO: 43192 - protein, 978 aa, synthetic construct
  REGION 1..978: note = engineered CasX variant
QEIKRINKIRRRLVKDSNTKKAGKTGPMKTLLVRVMTPDLRERLENLRKKPENIPQPISNTSRANLNKLLTDYTEMKKAILHVYWEEFQKDPVGLMSRVAQPASKKIDQNKLKPEMDEKGNLTTAGFACSQCGQPLFVYKLEQVSEKGKAYTNYFGRCNVAEHEKLILLSQLKPEKDSDEAVTYSLGKFGQRALDFYSIHVTKESTHPVKPLAQIAGNRYASSPVGKALSDACMGTIASFLSKYQDIIIEHQKVVKGNQKRLESLRELAGKENLEYPSVTLPPQPHTKEGVDAYNEVIARVRMWVNLNLWQKLKLSRDDAKPLLRLKGFPSFPLVERQANEVDWWDMVCNVKKLINEKKEDGKVFWQNLAGYKRQEALRPYLSSEEDRKKGKKFARYQLGDLLLHLEKKHGEDWGKVYGEAWERIDKKVEGLSKHIKLEEERRSEDAQSKAALTDWLRAKASFVIEGLKEADKDEFCRCELKLQKWYGDLRGKPFAIEAENSILDISGFSKQYNCAFIWQKDGVKKLNLYLIINYFKGGKLRFKKIKPEAFEANRFYTVINKKSGEIVPMEVNFNFDDPNLIILPLAFGKRQGREFIWNDLLSLETGSLKLANGRVIEKTLYNRRTRQDEPALFVALTFERREVLDSSNIKPMNLIGVDRGENIPAVIALTDPEGCPLSRFKDSLGNPTHILRIGESYKEKQRTIQAKKEVEQRRAGGYSRKYASKAKNLADDMVRNTARDLLYYAVTQDAMLIFENLSRGFGRQGKRTFMAERQYTRMEDWLTAKLAYEGLPSKTYLSKTLAQYTSKTCSNCGFTITSADYDRVLEKLKKTATGWMTTINGKELKVEGQITYYNRYKRQNVVKDLSVELDRLSEESVNNDISSWTKGRSGEALSLLKKRFSHRPVQEKFVCLNCGFETHADEQAALNIARSWLFLRSQEYKKYQTNKTTGNTDKRAFVETWQSFYRKKLKEVWKPAV

SEQ ID NO: 43193 - protein, 978 aa, synthetic construct
  REGION 1..978: note = engineered CasX variant
QEIKRINKIRRRLVKDSNTKKAGKTGPMKTLLVRVMTPDLRERLENLRKKPENIPQPISNTSRANLNKLLTDYTEMKKAILHVYWEEFQKDPVGLMSRVAQPASKKIDQNKLKPEMDEKGNLTTAGFACSQCGQPLFVYKLEQVSEKGKAYTNYFGRCNVAEHEKLILLSQLKPEKDSDEAVTYSLGKFGQRALDFYSIHVTKESTHPVKPLAQIAGNRYASTPVGKALSDACMGTIASFLSKYQDIIIEHQKVVKGNQKRLESLRELAGKENLEYPSVTLPPQPHTKEGVDAYNEVIARVRMWVNLNLWQKLKLSRDDAKPLLRLKGFPSFPLVERQANEVDWWDMVCNVKKLINEKKEDGKVFWQNLAGYKRQEALRPYLSSEEDRKKGKKFARYQLGDLLLHLEKKHGEDWGKVYGEAWERIDKKVEGLSKHIKLEEERRSEDAQSKAALTDWLRAKASFVIEGLKEADKDEFCRCELKLQKWYGDLRGKPFAIEAENSILDISGFSKQYNCAFIWQKDGVKKLNLYLIINYFKGGKLRFKKIKPEAFEANRFYTVINKKSGEIVPMEVNFNFDDPNLIILPLAFGKRQGREFIWNDLLSLETGSLKLANGRVIEKTLYNRRTRQDEPALFVALTFERREVLDSSNIKPMNLIGVDRGENIPAVIALTDPEGCPLSRFKDSLGNPTHILRIGESYKEKQRTIQAKKEVEQRRAGGYSRKYASKAKNLADDMVRNTARDLLYYAVTQDAMLIFENLSRGFGRQGKRTFMAERQYTRMEDWLTAKLAYEGLPSKTYLSKTLAQYTSKTCSNCGFTITSADYDRVLEKLKKTATGWMTTINGKELKVEGQITYYNRYKRQNVVKDLSVELDRLSEESVNNDISSWTKGRSGEALSLLKKRFSHRPVQEKFVCLNCGFETHADEQAALNIARSWLFLRSQEYKKYQTNKTTGNTDKRAFVETWQSFYRKKLKEVWKPAV

SEQ ID NO: 43194 - protein, 978 aa, synthetic construct
  REGION 1..978: note = engineered CasX variant
QEIKRINKIRRRLVKDSNTKKAGKTGPMKTLLVRVMTPDLRERLENLRKKPENIPQPISNTSRANLNKLLTDYTEMKKAILHVYWEEFQKDPVGLMSRVAQPASKKIDQNKLKPEMDEKGNLTTAGFACSQCGQPLFVYKLEQVSEKGKAYTNYFGRCNVAEHEKLILLSQLKPEKDSDEAVTYSLGKFGQRALDFYSIHVTKESTHPVKPLAQIAGNRYASAPVGKALSDACMGTIASFLSKYQDIIIEHQKVVKGNQKRLESLRELAGKENLEYPSVTLPPQPHTKEGVDAYNEVIARVRMWVNLNLWQKLKLSRDDAKPLLRLKGFPSFPLVERQANEVDWWDMVCNVKKLINEKKEDGKVFWQNLAGYKRQEALRPYLSSEEDRKKGKKFARYQLGDLLLHLEKKHGEDWGKVYGEAWERIDKKVEGLSKHIKLEEERRSEDAQSKAALTDWLRAKASFVIEGLKEADKDEFCRCELKLQKWYGDLRGKPFAIEAENSILDISGFSKQYNCAFIWQKDGVKKLNLYLIINYFKGGKLRFKKIKPEAFEANRFYTVINKKSGEIVPMEVNFNFDDPNLIILPLAFGKRQGREFIWNDLLSLETGSLKLANGRVIEKTLYNRRTRQDEPALFVALTFERREVLDSSNIKPMNLIGVDRGENIPAVIALTDPEGCPLSRFKDSLGNPTHILRIGESYKEKQRTIQAKKEVEQRRAGGYSRKYASKAKNLADDMVRNTARDLLYYAVTQDAMLIFENLSRGFGRQGKRTFMAERQYTRMEDWLTAKLAYEGLPSKTYLSKTLAQYTSKTCSNCGFTITSADYDRVLEKLKKTATGWMTTINGKELKVEGQITYYNRYKRQNVVKDLSVELDRLSEESVNNDISSWTKGRSGEALSLLKKRFSHRPVQEKFVCLNCGFETHADEQAALNIARSWLFLRSQEYKKYQTNKTTGNTDKRAFVETWQSFYRKKLKEVWKPAV

SEQ ID NO: 43195 - protein, 978 aa, synthetic construct
  REGION 1..978: note = engineered CasX variant
QEIKRINKIRRRLVKDSNTKKAGKTGPMKTLLVRVMTPDLRERLENLRKKPENIPQPISNTSRANLNKLLTDYTEMKKAILHVYWEEFQKDPVGLMSRVAQPASKKIDQNKLKPEMDEKGNLTTAGFACSQCGQPLFVYKLEQVSEKGKAYTNYFGRCNVAEHEKLILLSQLKPEKDSDEAVTYSLGKFGQRALDFYSIHVTKESTHPVKPLAQIAGNRYASVPVGKALSDACMGTIASFLSKYQDIIIEHQKVVKGNQKRLESLRELAGKENLEYPSVTLPPQPHTKEGVDAYNEVIARVRMWVNLNLWQKLKLSRDDAKPLLRLKGFPSFPLVERQANEVDWWDMVCNVKKLINEKKEDGKVFWQNLAGYKRQEALRPYLSSEEDRKKGKKFARYQLGDLLLHLEKKHGEDWGKVYGEAWERIDKKVEGLSKHIKLEEERRSEDAQSKAALTDWLRAKASFVIEGLKEADKDEFCRCELKLQKWYGDLRGKPFAIEAENSILDISGFSKQYNCAFIWQKDGVKKLNLYLIINYFKGGKLRFKKIKPEAFEANRFYTVINKKSGEIVPMEVNFNFDDPNLIILPLAFGKRQGREFIWNDLLSLETGSLKLANGRVIEKTLYNRRTRQDEPALFVALTFERREVLDSSNIKPMNLIGVDRGENIPAVIALTDPEGCPLSRFKDSLGNPTHILRIGESYKEKQRTIQAKKEVEQRRAGGYSRKYASKAKNLADDMVRNTARDLLYYAVTQDAMLIFENLSRGFGRQGKRTFMAERQYTRMEDWLTAKLAYEGLPSKTYLSKTLAQYTSKTCSNCGFTITSADYDRVLEKLKKTATGWMTTINGKELKVEGQITYYNRYKRQNVVKDLSVELDRLSEESVNNDISSWTKGRSGEALSLLKKRFSHRPVQEKFVCLNCGFETHADEQAALNIARSWLFLRSQEYKKYQTNKTTGNTDKRAFVETWQSFYRKKLKEVWKPAV

SEQ ID NO: 43196 - protein, 978 aa, synthetic construct
  REGION 1..978: note = engineered CasX variant
QEIKRINKIRRRLVKDSNTKKAGKTGPMKTLLVRVMTPDLRERLENLRKKPENIPQPISNTSRANLNKLLTDYTEMKKAILHVYWEEFQKDPVGLMSRVAQPASKKIDQNKLKPEMDEKGNLTTAGFACSQCGQPLFVYKLEQVSEKGKAYTNYFGRCNVAEHEKLIKLSQLKPEKDSDEAVTYSLGKFGQRALDFYSIHVTKESTHPVKPLAQIAGNRYASGPVGKALSDACMGTIASFLSKYQDIIIEHQKVVKGNQKRLESLRELAGKENLEYPSVTLPPQPHTKEGVDAYNEVIARVRMWVNLNLWQKLKLSRDDAKPLLRLKGFPSFPLVERQANEVDWWDMVCNVKKLINEKKEDGKVFWQNLAGYKRQEALRPYLSSEEDRKKGKKFARYQLGDLLLHLEKKHGEDWGKVYGEAWERIDKKVEGLSKHIKLEEERRSEDAQSKAALTDWLRAKASFVIEGLKEADKDEFCRCELKLQKWYGDLRGKPFAIEAENSILDISGFSKQYNCAFIWQKDGVKKLNLYLIINYFKGGKLRFKKIKPEAFEANRFYTVINKKSGEIVPMEVNFNFDDPNLIILPLAFGKRQGREFIWNDLLSLETGSLKLANGRVIEKTLYNRRTRQDEPALFVALTFERREVLDSSNIKPMNLIGVDRGENIPAVIALTDPEGCPLSRFKDSLGNPTHILRIGESYKEKQRTIQAKKEVEQRRAGGYSRKYASKAKNLADDMVRNTARDLLYYAVTQDAMLIFENLSRGFGRQGKRTFMAERQYTRMEDWLTAKLAYEGLPSKTYLSKTLAQYTSKTCSNCGFTITSADYDRVLEKLKKTATGWMTTINGKELKVEGQITYYNRYKRQNVVKDLSVELDRLSEESVNNDISSWTKGRSGEALSLLKKRFSHRPVQEKFVCLNCGFETHADEQAALNIARSWLFLRSQEYKKYQTNKTTGNTDKRAFVETWQSFYRKKLKEVWKPAV

SEQ ID NO: 43197 - protein, 977 aa, synthetic construct
  REGION 1..977: note = engineered CasX variant
QEIKRINKIRRRLVKDSNTKKAGKTGPMKTLLVRVMTPDLRERLENLRKKPENIPQPISNTSRANLNKLLTDYTEMKKAILHVYWEEFQKDPVGLMSRVAQPASKKIDQNKLKPEMDEKGNLTTAGFACSQCGQPLFVYKLEQVSEKGKAYTNYFGRCNVAEHEKLILLSQLKPEKDSDEAVTYSLGKFGQRALDFYSIHVTKESTHPVKPLAQIAGNRYASPVGKALSDACMGTIASFLSKYQDIIIEHQKVVKGNQKRLESLRELAGKENLEYPSVTLPPQPHTKEGVDAYNEVIARVRMWVNLNLWQKLKLSRDDAKPLLRLKGFPSFPLVERQANEVDWWDMVCNVKKLINEKKEDGKVFWQNLAGYKRQEALRPYLSSEEDRKKGKKFARYQLGDLLLHLEKKHGEDWGKVYGEAWERIDKKVEGLSKHIKLEEERRSEDAQSKAALTDWLRAKASFVIEGLKEADKDEFCRCELKLQKWYGDLRGKPFAIEAENSILDISGFSKQYNCAFIWQKDGVKKLNLYLIINYFKGGKLRFKKIKPEAFEANRFYTVINKKSGEIVPMEVNFNFDDPNLIILPLAFGKRQGREFIWNDLLSLETGSLKLANGRVIEKTLYNRRTRQDEPALFVALTFERREVLDSSNIKPMNLIGVDRGENIPAVIALTDPEGCPLSRFKDSLGNPTHILRIGESYKEKQRTIQAKKEVEQRRAGGYSRKYASKAKNLADDMVRNTARDLLYYAVTQDAMLIFENLSRGFGRQGKRTFMAERQYTRMEDWLTAKLAYEGLPSKTYLSKTLAQYTSKTCSNCGFTITSADYDRVLEKLKKTATGWMTTINGKELKVEGQITYYNRYKRQNVVKDLSVELDRLSEESVNNDISSWTKGRSGEALSLLKKRFSHRPVQEKFVCLNCGFETHADEQAALNIARSWLFLRSQEYKKYQTNKTTGNTDKRAFVETWQSFYRKKLKEVWKPAV

SEQ ID NO: 43198 - protein, 978 aa, synthetic construct
  REGION 1..978: note = engineered CasX variant
QEIKRINKIRRRLVKDSNTKKAGKTGPMKTLLVRVMTPDLRERLENLRKKPENIPQPISNTSRANLNKLLTDYTEMKKAILHVYWEEFQKDPVGLMSRVAQPASKKIDQNKLKPEMDEKGNLTTAGFACSQCGQPLFVYKLEQVSEKGKAYTNYFGRCNVAEHEKLILLSQLKPEKDSDEAVTYSLGKFGQRALDFYSIHVTKESTHPVKPLAQIAGNRYASYPVGKALSDACMGTIASFLSKYQDIIIEHQKVVKGNQKRLESLRELAGKENLEYPSVTLPPQPHTKEGVDAYNEVIARVRMWVNLNLWQKLKLSRDDAKPLLRLKGFPSFPLVERQANEVDWWDMVCNVKKLINEKKEDGKVFWQNLAGYKRQEALRPYLSSEEDRKKGKKFARYQLGDLLLHLEKKHGEDWGKVYDEAWERIDKKVEGLSKHIKLEEERRSEDAQSKAALTDWLRAKASFVIEGKKEADKDEFCRCELKLQKWYGDLRGKPFAIEAENSILDISGFSKQYNCAFIWQKDGVKKLNLYLIINYFKGGKLRFKKIKPEAFEANRFYTVINKKSGEIVPMEVNFNFDDPNLIILPLAFGKRQGREFIWNDLLSLETGSLKLANGRVIEKTLYNRRTRQDEPALFVALTFERREVLDSSNIKPMNLIGVDRGENIPAVIALTDPEGCPLSRFKDSLGNPTHILRIGESYKEKQRTIQAKKEVEQRRAGGYSRKYASKAKNLADDMVRNTARDLLYYAVTQDAMLIFENLSRGFGRQGKRTFMAERQYTRMEDWLTAKLAYEGLPSKTYLSKTLAQYTSKTCSNCGFTITSADYDRVLEKLKKTATGWMTTINGKELKVEGQITYYNRYKRQNVVKDLSVELDRLSEESVNNDISSWTKGRSGEALSLLKKRFSHRPVQEKFVCLNCGFETHADEQAALNIARSWLFLRSQEYKKYQTNKTTGNTDKRAFVETWQSFYRKKLKEVWKPAV

SEQ ID NO: 43199 - protein, 978 aa, synthetic construct
  REGION 1..978: note = engineered CasX variant
QEIKRINKIRRRLVKDSNTKKAGKTGPMKTLLVRVMTPDLRERLENLRKKPENIPQPISNTSRANLNKLLTDYTEMKKAILHVYWEEFQKDPVGLMSRVAQPASKKIDQNKLKPEMDEKGNLTTAGFACSQCGQPLFVYKLEQVSEKGKAYTNYFGRCNVAEHEKLILLSQLKPEKDSDEAVTYSLGKFGQRALDFYSIHVTKESTHPVKPLAQIAGNRYASHPVGKALSDACMGTIASFLSKYQDIIIEHQKVVKGNQKRLESLRELAGKENLEYPSVTLPPQPHTKEGVDAYNEVIARVRMWVNLNLWQKLKLSRDDAKPLLRLKGFPSFPLVERQANEVDWWDMVCNVKKLINEKKEDGKVFWQNLAGYKRQEALRPYLSSEEDRKKGKKFARYQLGDLLLHLEKKHGEDWGKVYDEAWERIDKKVEGLSKHIKLEEERRSEDAQSKAALTDWLRAKASFVIEGKKEADKDEFCRCELKLQKWYGDLRGKPFAIEAENSILDISGFSKQYNCAFIWQKDGVKKLNLYLIINYFKGGKLRFKKIKPEAFEANRFYTVINKKSGEIVPMEVNFNFDDPNLIILPLAFGKRQGREFIWNDLLSLETGSLKLANGRVIEKTLYNRRTRQDEPALFVALTFERREVLDSSNIKPMNLIGVDRGENIPAVIALTDPEGCPLSRFKDSLGNPTHILRIGESYKEKQRTIQAKKEVEQRRAGGYSRKYASKAKNLADDMVRNTARDLLYYAVTQDAMLIFENLSRGFGRQGKRTFMAERQYTRMEDWLTAKLAYEGLPSKTYLSKTLAQYTSKTCSNCGFTITSADYDRVLEKLKKTATGWMTTINGKELKVEGQITYYNRYKRQNVVKDLSVELDRLSEESVNNDISSWTKGRSGEALSLLKKRFSHRPVQEKFVCLNCGFETHADEQAALNIARSWLFLRSQEYKKYQTNKTTGNTDKRAFVETWQSFYRKKLKEVWKPAV

SEQ ID NO: 43200 - protein, 978 aa, synthetic construct
  REGION 1..978: note = engineered CasX variant
QEIKRINKIRRRLVKDSNTKKAGKTGPMKTLLVRVMTPDLRERLENLRKKPENIPQPISNTSRANLNKLLTDYTEMKKAILHVYWEEFQKDPVGLMSRVAQPASKKIDQNKLKPEMDEKGNLTTAGFACSQCGQPLFVYKLEQVSEKGKAYTNYFGRCNVAEHEKLILLSQLKPEKDSDEAVTYSLGKFGQRALDFYSIHVTKESTHPVKPLAQIAGNRYASSPVGKALSDACMGTIASFLSKYQDIIIEHQKVVKGNQKRLESLRELAGKENLEYPSVTLPPQPHTKEGVDAYNEVIARVRMWVNLNLWQKLKLSRDDAKPLLRLKGFPSFPLVERQANEVDWWDMVCNVKKLINEKKEDGKVFWQNLAGYKRQEALRPYLSSEEDRKKGKKFARYQLGDLLLHLEKKHGEDWGKVYDEAWERIDKKVEGLSKHIKLEEERRSEDAQSKAALTDWLRAKASFVIEGKKEADKDEFCRCELKLQKWYGDLRGKPFAIEAENSILDISGFSKQYNCAFIWQKDGVKKLNLYLIINYFKGGKLRFKKIKPEAFEANRFYTVINKKSGEIVPMEVNFNFDDPNLIILPLAFGKRQGREFIWNDLLSLETGSLKLANGRVIEKTLYNRRTRQDEPALFVALTFERREVLDSSNIKPMNLIGVDRGENIPAVIALTDPEGCPLSRFKDSLGNPTHILRIGESYKEKQRTIQAKKEVEQRRAGGYSRKYASKAKNLADDMVRNTARDLLYYAVTQDAMLIFENLSRGFGRQGKRTFMAERQYTRMEDWLTAKLAYEGLPSKTYLSKTLAQYTSKTCSNCGFTITSADYDRVLEKLKKTATGWMTTINGKELKVEGQITYYNRYKRQNVVKDLSVELDRLSEESVNNDISSWTKGRSGEALSLLKKRFSHRPVQEKFVCLNCGFETHADEQAALNIARSWLFLRSQEYKKYQTNKTTGNTDKRAFVETWQSFYRKKLKEVWKPAV

SEQ ID NO: 43201 - protein, 978 aa, synthetic construct
  REGION 1..978: note = engineered CasX variant
QEIKRINKIRRRLVKDSNTKKAGKTGPMKTLLVRVMTPDLRERLENLRKKPENIPQPISNTSRANLNKLLTDYTEMKKAILHVYWEEFQKDPVGLMSRVAQPASKKIDQNKLKPEMDEKGNLTTAGFACSQCGQPLFVYKLEQVSEKGKAYTNYFGRCNVAEHEKLILLSQLKPEKDSDEAVTYSLGKFGQRALDFYSIHVTKESTHPVKPLAQIAGNRYASTPVGKALSDACMGTIASFLSKYQDIIIEHQKVVKGNQKRLESLRELAGKENLEYPSVTLPPQPHTKEGVDAYNEVIARVRMWVNLNLWQKLKLSRDDAKPLLRLKGFPSFPLVERQANEVDWWDMVCNVKKLINEKKEDGKVFWQNLAGYKRQEALRPYLSSEEDRKKGKKFARYQLGDLLLHLEKKHGEDWGKVYDEAWERIDKKVEGLSKHIKLEEERRSEDAQSKAALTDWLRAKASFVIEGKKEADKDEFCRCELKLQKWYGDLRGKPFAIEAENSILDISGFSKQYNCAFIWQKDGVKKLNLYLIINYFKGGKLRFKKIKPEAFEANRFYTVINKKSGEIVPMEVNFNFDDPNLIILPLAFGKRQGREFIWNDLLSLETGSLKLANGRVIEKTLYNRRTRQDEPALFVALTFERREVLDSSNIKPMNLIGVDRGENIPAVIALTDPEGCPLSRFKDSLGNPTHILRIGESYKEKQRTIQAKKEVEQRRAGGYSRKYASKAKNLADDMVRNTARDLLYYAVTQDAMLIFENLSRGFGRQGKRTFMAERQYTRMEDWLTAKLAYEGLPSKTYLSKTLAQYTSKTCSNCGFTITSADYDRVLEKLKKTATGWMTTINGKELKVEGQITYYNRYKRQNVVKDLSVELDRLSEESVNNDISSWTKGRSGEALSLLKKRFSHRPVQEKFVCLNCGFETHADEQAALNIARSWLFLRSQEYKKYQTNKTTGNTDKRAFVETWQSFYRKKLKEVWKPAV

SEQ ID NO: 43202 - protein, 978 aa, synthetic construct
  REGION 1..978: note = engineered CasX variant
QEIKRINKIRRRLVKDSNTKKAGKTGPMKTLLVRVMTPDLRERLENLRKKPENIPQPISNTSRANLNKLLTDYTEMKKAILHVYWEEFQKDPVGLMSRVAQPASKKIDQNKLKPEMDEKGNLTTAGFACSQCGQPLFVYKLEQVSEKGKAYTNYFGRCNVAEHEKLILLSQLKPEKDSDEAVTYSLGKFGQRALDFYSIHVTKESTHPVKPLAQIAGNRYASAPVGKALSDACMGTIASFLSKYQDIIIEHQKVVKGNQKRLESLRELAGKENLEYPSVTLPPQPHTKEGVDAYNEVIARVRMWVNLNLWQKLKLSRDDAKPLLRLKGFPSFPLVERQANEVDWWDMVCNVKKLINEKKEDGKVFWQNLAGYKRQEALRPYLSSEEDRKKGKKFARYQLGDLLLHLEKKHGEDWGKVYDEAWERIDKKVEGLSKHIKLEEERRSEDAQSKAALTDWLRAKASFVIEGKKEADKDEFCRCELKLQKWYGDLRGKPFAIEAENSILDISGFSKQYNCAFIWQKDGVKKLNLYLIINYFKGGKLRFKKIKPEAFEANRFYTVINKKSGEIVPMEVNFNFDDPNLIILPLAFGKRQGREFIWNDLLSLETGSLKLANGRVIEKTLYNRRTRQDEPALFVALTFERREVLDSSNIKPMNLIGVDRGENIPAVIALTDPEGCPLSRFKDSLGNPTHILRIGESYKEKQRTIQAKKEVEQRRAGGYSRKYASKAKNLADDMVRNTARDLLYYAVTQDAMLIFENLSRGFGRQGKRTFMAERQYTRMEDWLTAKLAYEGLPSKTYLSKTLAQYTSKTCSNCGFTITSADYDRVLEKLKKTATGWMTTINGKELKVEGQITYYNRYKRQNVVKDLSVELDRLSEESVNNDISSWTKGRSGEALSLLKKRFSHRPVQEKFVCLNCGFETHADEQAALNIARSWLFLRSQEYKKYQTNKTTGNTDKRAFVETWQSFYRKKLKEVWKPAV

SEQ ID NO: 43203 - protein, 978 aa, synthetic construct
  REGION 1..978: note = engineered CasX variant
QEIKRINKIRRRLVKDSNTKKAGKTGPMKTLLVRVMTPDLRERLENLRKKPENIPQPISNTSRANLNKLLTDYTEMKKAILHVYWEEFQKDPVGLMSRVAQPASKKIDQNKLKPEMDEKGNLTTAGFACSQCGQPLFVYKLEQVSEKGKAYTNYFGRCNVAEHEKLILLSQLKPEKDSDEAVTYSLGKFGQRALDFYSIHVTKESTHPVKPLAQIAGNRYASVPVGKALSDACMGTIASFLSKYQDIIIEHQKVVKGNQKRLESLRELAGKENLEYPSVTLPPQPHTKEGVDAYNEVIARVRMWVNLNLWQKLKLSRDDAKPLLRLKGFPSFPLVERQANEVDWWDMVCNVKKLINEKKEDGKVFWQNLAGYKRQEALRPYLSSEEDRKKGKKFARYQLGDLLLHLEKKHGEDWGKVYDEAWERIDKKVEGLSKHIKLEEERRSEDAQSKAALTDWLRAKASFVIEGKKEADKDEFCRCELKLQKWYGDLRGKPFAIEAENSILDISGFSKQYNCAFIWQKDGVKKLNLYLIINYFKGGKLRFKKIKPEAFEANRFYTVINKKSGEIVPMEVNFNFDDPNLIILPLAFGKRQGREFIWNDLLSLETGSLKLANGRVIEKTLYNRRTRQDEPALFVALTFERREVLDSSNIKPMNLIGVDRGENIPAVIALTDPEGCPLSRFKDSLGNPTHILRIGESYKEKQRTIQAKKEVEQRRAGGYSRKYASKAKNLADDMVRNTARDLLYYAVTQDAMLIFENLSRGFGRQGKRTFMAERQYTRMEDWLTAKLAYEGLPSKTYLSKTLAQYTSKTCSNCGFTITSADYDRVLEKLKKTATGWMTTINGKELKVEGQITYYNRYKRQNVVKDLSVELDRLSEESVNNDISSWTKGRSGEALSLLKKRFSHRPVQEKFVCLNCGFETHADEQAALNIARSWLFLRSQEYKKYQTNKTTGNTDKRAFVETWQSFYRKKLKEVWKPAV

SEQ ID NO: 43204 - protein, 978 aa, synthetic construct
  REGION 1..978: note = engineered CasX variant
QEIKRINKIRRRLVKDSNTKKAGKTGPMKTLLVRVMTPDLRERLENLRKKPENIPQPISNTSRANLNKLLTDYTEMKKAILHVYWEEFQKDPVGLMSRVAQPASKKIDQNKLKPEMDEKGNLTTAGFACSQCGQPLFVYKLEQVSEKGKAYTNYFGRCNVAEHEKLIKLSQLKPEKDSDEAVTYSLGKFGQRALDFYSIHVTKESTHPVKPLAQIAGNRYASGPVGKALSDACMGTIASFLSKYQDIIIEHQKVVKGNQKRLESLRELAGKENLEYPSVTLPPQPHTKEGVDAYNEVIARVRMWVNLNLWQKLKLSRDDAKPLLRLKGFPSFPLVERQANEVDWWDMVCNVKKLINEKKEDGKVFWQNLAGYKRQEALRPYLSSEEDRKKGKKFARYQLGDLLLHLEKKHGEDWGKVYDEAWERIDKKVEGLSKHIKLEEERRSEDAQSKAALTDWLRAKASFVIEGKKEADKDEFCRCELKLQKWYGDLRGKPFAIEAENSILDISGFSKQYNCAFIWQKDGVKKLNLYLIINYFKGGKLRFKKIKPEAFEANRFYTVINKKSGEIVPMEVNFNFDDPNLIILPLAFGKRQGREFIWNDLLSLETGSLKLANGRVIEKTLYNRRTRQDEPALFVALTFERREVLDSSNIKPMNLIGVDRGENIPAVIALTDPEGCPLSRFKDSLGNPTHILRIGESYKEKQRTIQAKKEVEQRRAGGYSRKYASKAKNLADDMVRNTARDLLYYAVTQDAMLIFENLSRGFGRQGKRTFMAERQYTRMEDWLTAKLAYEGLPSKTYLSKTLAQYTSKTCSNCGFTITSADYDRVLEKLKKTATGWMTTINGKELKVEGQITYYNRYKRQNVVKDLSVELDRLSEESVNNDISSWTKGRSGEALSLLKKRFSHRPVQEKFVCLNCGFETHADEQAALNIARSWLFLRSQEYKKYQTNKTTGNTDKRAFVETWQSFYRKKLKEVWKPAV

SEQ ID NO: 43205 - protein, 977 aa, synthetic construct
  REGION 1..977: note = engineered CasX variant
QEIKRINKIRRRLVKDSNTKKAGKTGPMKTLLVRVMTPDLRERLENLRKKPENIPQPISNTSRANLNKLLTDYTEMKKAILHVYWEEFQKDPVGLMSRVAQPASKKIDQNKLKPEMDEKGNLTTAGFACSQCGQPLFVYKLEQVSEKGKAYTNYFGRCNVAEHEKLILLSQLKPEKDSDEAVTYSLGKFGQRALDFYSIHVTKESTHPVKPLAQIAGNRYASPVGKALSDACMGTIASFLSKYQDIIIEHQKVVKGNQKRLESLRELAGKENLEYPSVTLPPQPHTKEGVDAYNEVIARVRMWVNLNLWQKLKLSRDDAKPLLRLKGFPSFPLVERQANEVDWWDMVCNVKKLINEKKEDGKVFWQNLAGYKRQEALRPYLSSEEDRKKGKKFARYQLGDLLLHLEKKHGEDWGKVYDEAWERIDKKVEGLSKHIKLEEERRSEDAQSKAALTDWLRAKASFVIEGKKEADKDEFCRCELKLQKWYGDLRGKPFAIEAENSILDISGFSKQYNCAFIWQKDGVKKLNLYLIINYFKGGKLRFKKIKPEAFEANRFYTVINKKSGEIVPMEVNFNFDDPNLIILPLAFGKRQGREFIWNDLLSLETGSLKLANGRVIEKTLYNRRTRQDEPALFVALTFERREVLDSSNIKPMNLIGVDRGENIPAVIALTDPEGCPLSRFKDSLGNPTHILRIGESYKEKQRTIQAKKEVEQRRAGGYSRKYASKAKNLADDMVRNTARDLLYYAVTQDAMLIFENLSRGFGRQGKRTFMAERQYTRMEDWLTAKLAYEGLPSKTYLSKTLAQYTSKTCSNCGFTITSADYDRVLEKLKKTATGWMTTINGKELKVEGQITYYNRYKRQNVVKDLSVELDRLSEESVNNDISSWTKGRSGEALSLLKKRFSHRPVQEKFVCLNCGFETHADEQAALNIARSWLFLRSQEYKKYQTNKTTGNTDKRAFVETWQSFYRKKLKEVWKPAV

SEQ ID NO: 43206 - protein, 978 aa, synthetic construct
  REGION 1..978: note = engineered CasX variant
QEIKRINKIRRRLVKDSNTKKAGKTGPMKTLLVRVMTPDLRERLENLRKKPENIPQPISNTSRANLNKLLTDYTEMKKAILHVYWEEFQKDPVGLMSRVAQPASKKIDQNKLKPEMDEKGNLTTAGFACSQCGQPLFVYKLEQVSEKGKAYTNYFGRCNVAEHEKLILLSQLKPEKDSDEAVTYSLGKFGQRALDFYSIHVTKESTHPVKPLAQIAGNRYASYPVGKALSDACMGTIASFLSKYQDIIIEHQKVVKGNQKRLESLRELAGKENLEYPSVTLPPQPHTKEGVDAYNEVIARVRMWVNLNLWQKLKLSRDDAKPLLRLKGFPSFPLVERQANEVDWWDMVCNVKKLINEKKEDGKVFWQNLAGYKRQEALRPYLSSEEDRKKGKKFARYQLGDLLLHLEKKHGEDWGKVYDEAWERIDKKVEGLSKHIKLEEERRSEDAQSKAALTDWLRAKASFVIEGSKEADKDEFCRCELKLQKWYGDLRGKPFAIEAENSILDISGFSKQYNCAFIWQKDGVKKLNLYLIINYFKGGKLRFKKIKPEAFEANRFYTVINKKSGEIVPMEVNFNFDDPNLIILPLAFGKRQGREFIWNDLLSLETGSLKLANGRVIEKTLYNRRTRQDEPALFVALTFERREVLDSSNIKPMNLIGVDRGENIPAVIALTDPEGCPLSRFKDSLGNPTHILRIGESYKEKQRTIQAKKEVEQRRAGGYSRKYASKAKNLADDMVRNTARDLLYYAVTQDAMLIFENLSRGFGRQGKRTFMAERQYTRMEDWLTAKLAYEGLPSKTYLSKTLAQYTSKTCSNCGFTITSADYDRVLEKLKKTATGWMTTINGKELKVEGQITYYNRYKRQNVVKDLSVELDRLSEESVNNDISSWTKGRSGEALSLLKKRFSHRPVQEKFVCLNCGFETHADEQAALNIARSWLFLRSQEYKKYQTNKTTGNTDKRAFVETWQSFYRKKLKEVWKPAV

SEQ ID NO: 43207 - protein, 978 aa, synthetic construct
  REGION 1..978: note = engineered CasX variant
QEIKRINKIRRRLVKDSNTKKAGKTGPMKTLLVRVMTPDLRERLENLRKKPENIPQPISNTSRANLNKLLTDYTEMKKAILHVYWEEFQKDPVGLMSRVAQPASKKIDQNKLKPEMDEKGNLTTAGFACSQCGQPLFVYKLEQVSEKGKAYTNYFGRCNVAEHEKLILLSQLKPEKDSDEAVTYSLGKFGQRALDFYSIHVTKESTHPVKPLAQIAGNRYASHPVGKALSDACMGTIASFLSKYQDIIIEHQKVVKGNQKRLESLRELAGKENLEYPSVTLPPQPHTKEGVDAYNEVIARVRMWVNLNLWQKLKLSRDDAKPLLRLKGFPSFPLVERQANEVDWWDMVCNVKKLINEKKEDGKVFWQNLAGYKRQEALRPYLSSEEDRKKGKKFARYQLGDLLLHLEKKHGEDWGKVYDEAWERIDKKVEGLSKHIKLEEERRSEDAQSKAALTDWLRAKASFVIEGSKEADKDEFCRCELKLQKWYGDLRGKPFAIEAENSILDISGFSKQYNCAFIWQKDGVKKLNLYLIINYFKGGKLRFKKIKPEAFEANRFYTVINKKSGEIVPMEVNFNFDDPNLIILPLAFGKRQGREFIWNDLLSLETGSLKLANGRVIEKTLYNRRTRQDEPALFVALTFERREVLDSSNIKPMNLIGVDRGENIPAVIALTDPEGCPLSRFKDSLGNPTHILRIGESYKEKQRTIQAKKEVEQRRAGGYSRKYASKAKNLADDMVRNTARDLLYYAVTQDAMLIFENLSRGFGRQGKRTFMAERQYTRMEDWLTAKLAYEGLPSKTYLSKTLAQYTSKTCSNCGFTITSADYDRVLEKLKKTATGWMTTINGKELKVEGQITYYNRYKRQNVVKDLSVELDRLSEESVNNDISSWTKGRSGEALSLLKKRFSHRPVQEKFVCLNCGFETHADEQAALNIARSWLFLRSQEYKKYQTNKTTGNTDKRAFVETWQSFYRKKLKEVWKPAV

SEQ ID NO: 43208 - protein, 978 aa, synthetic construct
  REGION 1..978: note = engineered CasX variant
QEIKRINKIRRRLVKDSNTKKAGKTGPMKTLLVRVMTPDLRERLENLRKKPENIPQPISNTSRANLNKLLTDYTEMKKAILHVYWEEFQKDPVGLMSRVAQPASKKIDQNKLKPEMDEKGNLTTAGFACSQCGQPLFVYKLEQVSEKGKAYTNYFGRCNVAEHEKLILLSQLKPEKDSDEAVTYSLGKFGQRALDFYSIHVTKESTHPVKPLAQIAGNRYASSPVGKALSDACMGTIASFLSKYQDIIIEHQKVVKGNQKRLESLRELAGKENLEYPSVTLPPQPHTKEGVDAYNEVIARVRMWVNLNLWQKLKLSRDDAKPLLRLKGFPSFPLVERQANEVDWWDMVCNVKKLINEKKEDGKVFWQNLAGYKRQEALRPYLSSEEDRKKGKKFARYQLGDLLLHLEKKHGEDWGKVYDEAWERIDKKVEGLSKHIKLEEERRSEDAQSKAALTDWLRAKASFVIEGSKEADKDEFCRCELKLQKWYGDLRGKPFAIEAENSILDISGFSKQYNCAFIWQKDGVKKLNLYLIINYFKGGKLRFKKIKPEAFEANRFYTVINKKSGEIVPMEVNFNFDDPNLIILPLAFGKRQGREFIWNDLLSLETGSLKLANGRVIEKTLYNRRTRQDEPALFVALTFERREVLDSSNIKPMNLIGVDRGENIPAVIALTDPEGCPLSRFKDSLGNPTHILRIGESYKEKQRTIQAKKEVEQRRAGGYSRKYASKAKNLADDMVRNTARDLLYYAVTQDAMLIFENLSRGFGRQGKRTFMAERQYTRMEDWLTAKLAYEGLPSKTYLSKTLAQYTSKTCSNCGFTITSADYDRVLEKLKKTATGWMTTINGKELKVEGQITYYNRYKRQNVVKDLSVELDRLSEESVNNDISSWTKGRSGEALSLLKKRFSHRPVQEKFVCLNCGFETHADEQAALNIARSWLFLRSQEYKKYQTNKTTGNTDKRAFVETWQSFYRKKLKEVWKPAV

SEQ ID NO: 43209 - protein, 978 aa, synthetic construct
  REGION 1..978: note = engineered CasX variant
QEIKRINKIRRRLVKDSNTKKAGKTGPMKTLLVRVMTPDLRERLENLRKKPENIPQPISNTSRANLNKLLTDYTEMKKAILHVYWEEFQKDPVGLMSRVAQPASKKIDQNKLKPEMDEKGNLTTAGFACSQCGQPLFVYKLEQVSEKGKAYTNYFGRCNVAEHEKLILLSQLKPEKDSDEAVTYSLGKFGQRALDFYSIHVTKESTHPVKPLAQIAGNRYASTPVGKALSDACMGTIASFLSKYQDIIIEHQKVVKGNQKRLESLRELAGKENLEYPSVTLPPQPHTKEGVDAYNEVIARVRMWVNLNLWQKLKLSRDDAKPLLRLKGFPSFPLVERQANEVDWWDMVCNVKKLINEKKEDGKVFWQNLAGYKRQEALRPYLSSEEDRKKGKKFARYQLGDLLLHLEKKHGEDWGKVYDEAWERIDKKVEGLSKHIKLEEERRSEDAQSKAALTDWLRAKASFVIEGSKEADKDEFCRCELKLQKWYGDLRGKPFAIEAENSILDISGFSKQYNCAFIWQKDGVKKLNLYLIINYFKGGKLRFKKIKPEAFEANRFYTVINKKSGEIVPMEVNFNFDDPNLIILPLAFGKRQGREFIWNDLLSLETGSLKLANGRVIEKTLYNRRTRQDEPALFVALTFERREVLDSSNIKPMNLIGVDRGENIPAVIALTDPEGCPLSRFKDSLGNPTHILRIGESYKEKQRTIQAKKEVEQRRAGGYSRKYASKAKNLADDMVRNTARDLLYYAVTQDAMLIFENLSRGFGRQGKRTFMAERQYTRMEDWLTAKLAYEGLPSKTYLSKTLAQYTSKTCSNCGFTITSADYDRVLEKLKKTATGWMTTINGKELKVEGQITYYNRYKRQNVVKDLSVELDRLSEESVNNDISSWTKGRSGEALSLLKKRFSHRPVQEKFVCLNCGFETHADEQAALNIARSWLFLRSQEYKKYQTNKTTGNTDKRAFVETWQSFYRKKLKEVWKPAV

SEQ ID NO: 43210 - protein, 978 aa, synthetic construct
  REGION 1..978: note = engineered CasX variant
QEIKRINKIRRRLVKDSNTKKAGKTGPMKTLLVRVMTPDLRERLENLRKKPENIPQPISNTSRANLNKLLTDYTEMKKAILHVYWEEFQKDPVGLMSRVAQPASKKIDQNKLKPEMDEKGNLTTAGFACSQCGQPLFVYKLEQVSEKGKAYTNYFGRCNVAEHEKLILLSQLKPEKDSDEAVTYSLGKFGQRALDFYSIHVTKESTHPVKPLAQIAGNRYASAPVGKALSDACMGTIASFLSKYQDIIIEHQKVVKGNQKRLESLRELAGKENLEYPSVTLPPQPHTKEGVDAYNEVIARVRMWVNLNLWQKLKLSRDDAKPLLRLKGFPSFPLVERQANEVDWWDMVCNVKKLINEKKEDGKVFWQNLAGYKRQEALRPYLSSEEDRKKGKKFARYQLGDLLLHLEKKHGEDWGKVYDEAWERIDKKVEGLSKHIKLEEERRSEDAQSKAALTDWLRAKASFVIEGSKEADKDEFCRCELKLQKWYGDLRGKPFAIEAENSILDISGFSKQYNCAFIWQKDGVKKLNLYLIINYFKGGKLRFKKIKPEAFEANRFYTVINKKSGEIVPMEVNFNFDDPNLIILPLAFGKRQGREFIWNDLLSLETGSLKLANGRVIEKTLYNRRTRQDEPALFVALTFERREVLDSSNIKPMNLIGVDRGENIPAVIALTDPEGCPLSRFKDSLGNPTHILRIGESYKEKQRTIQAKKEVEQRRAGGYSRKYASKAKNLADDMVRNTARDLLYYAVTQDAMLIFENLSRGFGRQGKRTFMAERQYTRMEDWLTAKLAYEGLPSKTYLSKTLAQYTSKTCSNCGFTITSADYDRVLEKLKKTATGWMTTINGKELKVEGQITYYNRYKRQNVVKDLSVELDRLSEESVNNDISSWTKGRSGEALSLLKKRFSHRPVQEKFVCLNCGFETHADEQAALNIARSWLFLRSQEYKKYQTNKTTGNTDKRAFVETWQSFYRKKLKEVWKPAV

SEQ ID NO: 43211 - protein, 978 aa, synthetic construct
  REGION 1..978: note = engineered CasX variant
QEIKRINKIRRRLVKDSNTKKAGKTGPMKTLLVRVMTPDLRERLENLRKKPENIPQPISNTSRANLNKLLTDYTEMKKAILHVYWEEFQKDPVGLMSRVAQPASKKIDQNKLKPEMDEKGNLTTAGFACSQCGQPLFVYKLEQVSEKGKAYTNYFGRCNVAEHEKLILLSQLKPEKDSDEAVTYSLGKFGQRALDFYSIHVTKESTHPVKPLAQIAGNRYASVPVGKALSDACMGTIASFLSKYQDIIIEHQKVVKGNQKRLESLRELAGKENLEYPSVTLPPQPHTKEGVDAYNEVIARVRMWVNLNLWQKLKLSRDDAKPLLRLKGFPSFPLVERQANEVDWWDMVCNVKKLINEKKEDGKVFWQNLAGYKRQEALRPYLSSEEDRKKGKKFARYQLGDLLLHLEKKHGEDWGKVYDEAWERIDKKVEGLSKHIKLEEERRSEDAQSKAALTDWLRAKASFVIEGSKEADKDEFCRCELKLQKWYGDLRGKPFAIEAENSILDISGFSKQYNCAFIWQKDGVKKLNLYLIINYFKGGKLRFKKIKPEAFEANRFYTVINKKSGEIVPMEVNFNFDDPNLIILPLAFGKRQGREFIWNDLLSLETGSLKLANGRVIEKTLYNRRTRQDEPALFVALTFERREVLDSSNIKPMNLIGVDRGENIPAVIALTDPEGCPLSRFKDSLGNPTHILRIGESYKEKQRTIQAKKEVEQRRAGGYSRKYASKAKNLADDMVRNTARDLLYYAVTQDAMLIFENLSRGFGRQGKRTFMAERQYTRMEDWLTAKLAYEGLPSKTYLSKTLAQYTSKTCSNCGFTITSADYDRVLEKLKKTATGWMTTINGKELKVEGQITYYNRYKRQNVVKDLSVELDRLSEESVNNDISSWTKGRSGEALSLLKKRFSHRPVQEKFVCLNCGFETHADEQAALNIARSWLFLRSQEYKKYQTNKTTGNTDKRAFVETWQSFYRKKLKEVWKPAV

SEQ ID NO: 43212 - protein, 978 aa, synthetic construct
  REGION 1..978: note = engineered CasX variant
QEIKRINKIRRRLVKDSNTKKAGKTGPMKTLLVRVMTPDLRERLENLRKKPENIPQPISNTSRANLNKLLTDYTEMKKAILHVYWEEFQKDPVGLMSRVAQPASKKIDQNKLKPEMDEKGNLTTAGFACSQCGQPLFVYKLEQVSEKGKAYTNYFGRCNVAEHEKLIKLSQLKPEKDSDEAVTYSLGKFGQRALDFYSIHVTKESTHPVKPLAQIAGNRYASGPVGKALSDACMGTIASFLSKYQDIIIEHQKVVKGNQKRLESLRELAGKENLEYPSVTLPPQPHTKEGVDAYNEVIARVRMWVNLNLWQKLKLSRDDAKPLLRLKGFPSFPLVERQANEVDWWDMVCNVKKLINEKKEDGKVFWQNLAGYKRQEALRPYLSSEEDRKKGKKFARYQLGDLLLHLEKKHGEDWGKVYDEAWERIDKKVEGLSKHIKLEEERRSEDAQSKAALTDWLRAKASFVIEGSKEADKDEFCRCELKLQKWYGDLRGKPFAIEAENSILDISGFSKQYNCAFIWQKDGVKKLNLYLIINYFKGGKLRFKKIKPEAFEANRFYTVINKKSGEIVPMEVNFNFDDPNLIILPLAFGKRQGREFIWNDLLSLETGSLKLANGRVIEKTLYNRRTRQDEPALFVALTFERREVLDSSNIKPMNLIGVDRGENIPAVIALTDPEGCPLSRFKDSLGNPTHILRIGESYKEKQRTIQAKKEVEQRRAGGYSRKYASKAKNLADDMVRNTARDLLYYAVTQDAMLIFENLSRGFGRQGKRTFMAERQYTRMEDWLTAKLAYEGLPSKTYLSKTLAQYTSKTCSNCGFTITSADYDRVLEKLKKTATGWMTTINGKELKVEGQITYYNRYKRQNVVKDLSVELDRLSEESVNNDISSWTKGRSGEALSLLKKRFSHRPVQEKFVCLNCGFETHADEQAALNIARSWLFLRSQEYKKYQTNKTTGNTDKRAFVETWQSFYRKKLKEVWKPAV

SEQ ID NO: 43213 - protein, 977 aa, synthetic construct
  REGION 1..977: note = engineered CasX variant
QEIKRINKIRRRLVKDSNTKKAGKTGPMKTLLVRVMTPDLRERLENLRKKPENIPQPISNTSRANLNKLLTDYTEMKKAILHVYWEEFQKDPVGLMSRVAQPASKKIDQNKLKPEMDEKGNLTTAGFACSQCGQPLFVYKLEQVSEKGKAYTNYFGRCNVAEHEKLILLSQLKPEKDSDEAVTYSLGKFGQRALDFYSIHVTKESTHPVKPLAQIAGNRYASPVGKALSDACMGTIASFLSKYQDIIIEHQKVVKGNQKRLESLRELAGKENLEYPSVTLPPQPHTKEGVDAYNEVIARVRMWVNLNLWQKLKLSRDDAKPLLRLKGFPSFPLVERQANEVDWWDMVCNVKKLINEKKEDGKVFWQNLAGYKRQEALRPYLSSEEDRKKGKKFARYQLGDLLLHLEKKHGEDWGKVYDEAWERIDKKVEGLSKHIKLEEERRSEDAQSKAALTDWLRAKASFVIEGSKEADKDEFCRCELKLQKWYGDLRGKPFAIEAENSILDISGFSKQYNCAFIWQKDGVKKLNLYLIINYFKGGKLRFKKIKPEAFEANRFYTVINKKSGEIVPMEVNFNFDDPNLIILPLAFGKRQGREFIWNDLLSLETGSLKLANGRVIEKTLYNRRTRQDEPALFVALTFERREVLDSSNIKPMNLIGVDRGENIPAVIALTDPEGCPLSRFKDSLGNPTHILRIGESYKEKQRTIQAKKEVEQRRAGGYSRKYASKAKNLADDMVRNTARDLLYYAVTQDAMLIFENLSRGFGRQGKRTFMAERQYTRMEDWLTAKLAYEGLPSKTYLSKTLAQYTSKTCSNCGFTITSADYDRVLEKLKKTATGWMTTINGKELKVEGQITYYNRYKRQNVVKDLSVELDRLSEESVNNDISSWTKGRSGEALSLLKKRFSHRPVQEKFVCLNCGFETHADEQAALNIARSWLFLRSQEYKKYQTNKTTGNTDKRAFVETWQSFYRKKLKEVWKPAV

SEQ ID NO: 43214 - protein, 979 aa, synthetic construct
  REGION 1..979: note = engineered CasX variant
QEIKRINKIRRRLVKDSNTKKAGKTGPMKTLLVRVMTPDLRERLENLRKKPENIPQPISNTSRANLNKLLTDYTEMKKAILHVYWEEFQKDPVGLMSRVAQPASKKIDQNKLKPEMDEKGNLTTAGFACSQCGQPLFVYKLEQVSEKGKAYTNYFGRCNVAEHEKLILLSQLKPEKDSDEAVTYSLGKFGQRALDFYSIHVTKESTHPVKPLAQIAGNRYASYPVGKALSDACMGTIASFLSKYQDIIIEHQKVVKGNQKRLESLRELAGKENLEYPSVTLPPQPHTKEGVDAYNEVIARVRMWVNLNLWQKLKLSRDDAKPLLRLKGFPSFPLVERQANEVDWWDMVCNVKKLINEKKEDGKVFWQNLAGYKRQEALRPYLSSEEDRKKGKKFARYQLGDLLLHLEKKHGEDWGKVYDEAWERIDKKVEGLSKHIKLEEERRSEDAQSKAALTDWLRAKASFVIEGLKEADDKDEFCRCELKLQKWYGDLRGKPFAIEAENSILDISGFSKQYNCAFIWQKDGVKKLNLYLIINYFKGGKLRFKKIKPEAFEANRFYTVINKKSGEIVPMEVNFNFDDPNLIILPLAFGKRQGREFIWNDLLSLETGSLKLANGRVIEKTLYNRRTRQDEPALFVALTFERREVLDSSNIKPMNLIGVDRGENIPAVIALTDPEGCPLSRFKDSLGNPTHILRIGESYKEKQRTIQAKKEVEQRRAGGYSRKYASKAKNLADDMVRNTARDLLYYAVTQDAMLIFENLSRGFGRQGKRTFMAERQYTRMEDWLTAKLAYEGLPSKTYLSKTLAQYTSKTCSNCGFTITSADYDRVLEKLKKTATGWMTTINGKELKVEGQITYYNRYKRQNVVKDLSVELDRLSEESVNNDISSWTKGRSGEALSLLKKRFSHRPVQEKFVCLNCGFETHADEQAALNIARSWLFLRSQEYKKYQTNKTTGNTDKRAFVETWQSFYRKKLKEVWKPAV

SEQ ID NO: 43215 - protein, 979 aa, synthetic construct
  REGION 1..979: note = engineered CasX variant
QEIKRINKIRRRLVKDSNTKKAGKTGPMKTLLVRVMTPDLRERLENLRKKPENIPQPISNTSRANLNKLLTDYTEMKKAILHVYWEEFQKDPVGLMSRVAQPASKKIDQNKLKPEMDEKGNLTTAGFACSQCGQPLFVYKLEQVSEKGKAYTNYFGRCNVAEHEKLILLSQLKPEKDSDEAVTYSLGKFGQRALDFYSIHVTKESTHPVKPLAQIAGNRYASHPVGKALSDACMGTIASFLSKYQDIIIEHQKVVKGNQKRLESLRELAGKENLEYPSVTLPPQPHTKEGVDAYNEVIARVRMWVNLNLWQKLKLSRDDAKPLLRLKGFPSFPLVERQANEVDWWDMVCNVKKLINEKKEDGKVFWQNLAGYKRQEALRPYLSSEEDRKKGKKFARYQLGDLLLHLEKKHGEDWGKVYDEAWERIDKKVEGLSKHIKLEEERRSEDAQSKAALTDWLRAKASFVIEGLKEADDKDEFCRCELKLQKWYGDLRGKPFAIEAENSILDISGFSKQYNCAFIWQKDGVKKLNLYLIINYFKGGKLRFKKIKPEAFEANRFYTVINKKSGEIVPMEVNFNFDDPNLIILPLAFGKRQGREFIWNDLLSLETGSLKLANGRVIEKTLYNRRTRQDEPALFVALTFERREVLDSSNIKPMNLIGVDRGENIPAVIALTDPEGCPLSRFKDSLGNPTHILRIGESYKEKQRTIQAKKEVEQRRAGGYSRKYASKAKNLADDMVRNTARDLLYYAVTQDAMLIFENLSRGFGRQGKRTFMAERQYTRMEDWLTAKLAYEGLPSKTYLSKTLAQYTSKTCSNCGFTITSADYDRVLEKLKKTATGWMTTINGKELKVEGQITYYNRYKRQNVVKDLSVELDRLSEESVNNDISSWTKGRSGEALSLLKKRFSHRPVQEKFVCLNCGFETHADEQAALNIARSWLFLRSQEYKKYQTNKTTGNTDKRAFVETWQSFYRKKLKEVWKPAV

SEQ ID NO: 43216 - protein, 979 aa, synthetic construct
  REGION 1..979: note = engineered CasX variant
QEIKRINKIRRRLVKDSNTKKAGKTGPMKTLLVRVMTPDLRERLENLRKKPENIPQPISNTSRANLNKLLTDYTEMKKAILHVYWEEFQKDPVGLMSRVAQPASKKIDQNKLKPEMDEKGNLTTAGFACSQCGQPLFVYKLEQVSEKGKAYTNYFGRCNVAEHEKLILLSQLKPEKDSDEAVTYSLGKFGQRALDFYSIHVTKESTHPVKPLAQIAGNRYASSPVGKALSDACMGTIASFLSKYQDIIIEHQKVVKGNQKRLESLRELAGKENLEYPSVTLPPQPHTKEGVDAYNEVIARVRMWVNLNLWQKLKLSRDDAKPLLRLKGFPSFPLVERQANEVDWWDMVCNVKKLINEKKEDGKVFWQNLAGYKRQEALRPYLSSEEDRKKGKKFARYQLGDLLLHLEKKHGEDWGKVYDEAWERIDKKVEGLSKHIKLEEERRSEDAQSKAALTDWLRAKASFVIEGLKEADDKDEFCRCELKLQKWYGDLRGKPFAIEAENSILDISGFSKQYNCAFIWQKDGVKKLNLYLIINYFKGGKLRFKKIKPEAFEANRFYTVINKKSGEIVPMEVNFNFDDPNLIILPLAFGKRQGREFIWNDLLSLETGSLKLANGRVIEKTLYNRRTRQDEPALFVALTFERREVLDSSNIKPMNLIGVDRGENIPAVIALTDPEGCPLSRFKDSLGNPTHILRIGESYKEKQRTIQAKKEVEQRRAGGYSRKYASKAKNLADDMVRNTARDLLYYAVTQDAMLIFENLSRGFGRQGKRTFMAERQYTRMEDWLTAKLAYEGLPSKTYLSKTLAQYTSKTCSNCGFTITSADYDRVLEKLKKTATGWMTTINGKELKVEGQITYYNRYKRQNVVKDLSVELDRLSEESVNNDISSWTKGRSGEALSLLKKRFSHRPVQEKFVCLNCGFETHADEQAALNIARSWLFLRSQEYKKYQTNKTTGNTDKRAFVETWQSFYRKKLKEVWKPAV

SEQ ID NO: 43217 - protein, 979 aa, synthetic construct
  REGION 1..979: note = engineered CasX variant
QEIKRINKIRRRLVKDSNTKKAGKTGPMKTLLVRVMTPDLRERLENLRKKPENIPQPISNTSRANLNKLLTDYTEMKKAILHVYWEEFQKDPVGLMSRVAQPASKKIDQNKLKPEMDEKGNLTTAGFACSQCGQPLFVYKLEQVSEKGKAYTNYFGRCNVAEHEKLILLSQLKPEKDSDEAVTYSLGKFGQRALDFYSIHVTKESTHPVKPLAQIAGNRYASTPVGKALSDACMGTIASFLSKYQDIIIEHQKVVKGNQKRLESLRELAGKENLEYPSVTLPPQPHTKEGVDAYNEVIARVRMWVNLNLWQKLKLSRDDAKPLLRLKGFPSFPLVERQANEVDWWDMVCNVKKLINEKKEDGKVFWQNLAGYKRQEALRPYLSSEEDRKKGKKFARYQLGDLLLHLEKKHGEDWGKVYDEAWERIDKKVEGLSKHIKLEEERRSEDAQSKAALTDWLRAKASFVIEGLKEADDKDEFCRCELKLQKWYGDLRGKPFAIEAENSILDISGFSKQYNCAFIWQKDGVKKLNLYLIINYFKGGKLRFKKIKPEAFEANRFYTVINKKSGEIVPMEVNFNFDDPNLIILPLAFGKRQGREFIWNDLLSLETGSLKLANGRVIEKTLYNRRTRQDEPALFVALTFERREVLDSSNIKPMNLIGVDRGENIPAVIALTDPEGCPLSRFKDSLGNPTHILRIGESYKEKQRTIQAKKEVEQRRAGGYSRKYASKAKNLADDMVRNTARDLLYYAVTQDAMLIFENLSRGFGRQGKRTFMAERQYTRMEDWLTAKLAYEGLPSKTYLSKTLAQYTSKTCSNCGFTITSADYDRVLEKLKKTATGWMTTINGKELKVEGQITYYNRYKRQNVVKDLSVELDRLSEESVNNDISSWTKGRSGEALSLLKKRFSHRPVQEKFVCLNCGFETHADEQAALNIARSWLFLRSQEYKKYQTNKTTGNTDKRAFVETWQSFYRKKLKEVWKPAV

SEQ ID NO: 43218 - protein, 979 aa, synthetic construct
  REGION 1..979: note = engineered CasX variant
QEIKRINKIRRRLVKDSNTKKAGKTGPMKTLLVRVMTPDLRERLENLRKKPENIPQPISNTSRANLNKLLTDYTEMKKAILHVYWEEFQKDPVGLMSRVAQPASKKIDQNKLKPEMDEKGNLTTAGFACSQCGQPLFVYKLEQVSEKGKAYTNYFGRCNVAEHEKLILLSQLKPEKDSDEAVTYSLGKFGQRALDFYSIHVTKESTHPVKPLAQIAGNRYASAPVGKALSDACMGTIASFLSKYQDIIIEHQKVVKGNQKRLESLRELAGKENLEYPSVTLPPQPHTKEGVDAYNEVIARVRMWVNLNLWQKLKLSRDDAKPLLRLKGFPSFPLVERQANEVDWWDMVCNVKKLINEKKEDGKVFWQNLAGYKRQEALRPYLSSEEDRKKGKKFARYQLGDLLLHLEKKHGEDWGKVYDEAWERIDKKVEGLSKHIKLEEERRSEDAQSKAALTDWLRAKASFVIEGLKEADDKDEFCRCELKLQKWYGDLRGKPFAIEAENSILDISGFSKQYNCAFIWQKDGVKKLNLYLIINYFKGGKLRFKKIKPEAFEANRFYTVINKKSGEIVPMEVNFNFDDPNLIILPLAFGKRQGREFIWNDLLSLETGSLKLANGRVIEKTLYNRRTRQDEPALFVALTFERREVLDSSNIKPMNLIGVDRGENIPAVIALTDPEGCPLSRFKDSLGNPTHILRIGESYKEKQRTIQAKKEVEQRRAGGYSRKYASKAKNLADDMVRNTARDLLYYAVTQDAMLIFENLSRGFGRQGKRTFMAERQYTRMEDWLTAKLAYEGLPSKTYLSKTLAQYTSKTCSNCGFTITSADYDRVLEKLKKTATGWMTTINGKELKVEGQITYYNRYKRQNVVKDLSVELDRLSEESVNNDISSWTKGRSGEALSLLKKRFSHRPVQEKFVCLNCGFETHADEQAALNIARSWLFLRSQEYKKYQTNKTTGNTDKRAFVETWQSFYRKKLKEVWKPAV

SEQ ID NO: 43219 - protein, 979 aa, synthetic construct
  REGION 1..979: note = engineered CasX variant
QEIKRINKIRRRLVKDSNTKKAGKTGPMKTLLVRVMTPDLRERLENLRKKPENIPQPISNTSRANLNKLLTDYTEMKKAILHVYWEEFQKDPVGLMSRVAQPASKKIDQNKLKPEMDEKGNLTTAGFACSQCGQPLFVYKLEQVSEKGKAYTNYFGRCNVAEHEKLILLSQLKPEKDSDEAVTYSLGKFGQRALDFYSIHVTKESTHPVKPLAQIAGNRYASVPVGKALSDACMGTIASFLSKYQDIIIEHQKVVKGNQKRLESLRELAGKENLEYPSVTLPPQPHTKEGVDAYNEVIARVRMWVNLNLWQKLKLSRDDAKPLLRLKGFPSFPLVERQANEVDWWDMVCNVKKLINEKKEDGKVFWQNLAGYKRQEALRPYLSSEEDRKKGKKFARYQLGDLLLHLEKKHGEDWGKVYDEAWERIDKKVEGLSKHIKLEEERRSEDAQSKAALTDWLRAKASFVIEGLKEADDKDEFCRCELKLQKWYGDLRGKPFAIEAENSILDISGFSKQYNCAFIWQKDGVKKLNLYLIINYFKGGKLRFKKIKPEAFEANRFYTVINKKSGEIVPMEVNFNFDDPNLIILPLAFGKRQGREFIWNDLLSLETGSLKLANGRVIEKTLYNRRTRQDEPALFVALTFERREVLDSSNIKPMNLIGVDRGENIPAVIALTDPEGCPLSRFKDSLGNPTHILRIGESYKEKQRTIQAKKEVEQRRAGGYSRKYASKAKNLADDMVRNTARDLLYYAVTQDAMLIFENLSRGFGRQGKRTFMAERQYTRMEDWLTAKLAYEGLPSKTYLSKTLAQYTSKTCSNCGFTITSADYDRVLEKLKKTATGWMTTINGKELKVEGQITYYNRYKRQNVVKDLSVELDRLSEESVNNDISSWTKGRSGEALSLLKKRFSHRPVQEKFVCLNCGFETHADEQAALNIARSWLFLRSQEYKKYQTNKTTGNTDKRAFVETWQSFYRKKLKEVWKPAV

SEQ ID NO: 43220 - protein, 979 aa, synthetic construct
  REGION 1..979: note = engineered CasX variant
QEIKRINKIRRRLVKDSNTKKAGKTGPMKTLLVRVMTPDLRERLENLRKKPENIPQPISNTSRANLNKLLTDYTEMKKAILHVYWEEFQKDPVGLMSRVAQPASKKIDQNKLKPEMDEKGNLTTAGFACSQCGQPLFVYKLEQVSEKGKAYTNYFGRCNVAEHEKLIKLSQLKPEKDSDEAVTYSLGKFGQRALDFYSIHVTKESTHPVKPLAQIAGNRYASGPVGKALSDACMGTIASFLSKYQDIIIEHQKVVKGNQKRLESLRELAGKENLEYPSVTLPPQPHTKEGVDAYNEVIARVRMWVNLNLWQKLKLSRDDAKPLLRLKGFPSFPLVERQANEVDWWDMVCNVKKLINEKKEDGKVFWQNLAGYKRQEALRPYLSSEEDRKKGKKFARYQLGDLLLHLEKKHGEDWGKVYDEAWERIDKKVEGLSKHIKLEEERRSEDAQSKAALTDWLRAKASFVIEGLKEADDKDEFCRCELKLQKWYGDLRGKPFAIEAENSILDISGFSKQYNCAFIWQKDGVKKLNLYLIINYFKGGKLRFKKIKPEAFEANRFYTVINKKSGEIVPMEVNFNFDDPNLIILPLAFGKRQGREFIWNDLLSLETGSLKLANGRVIEKTLYNRRTRQDEPALFVALTFERREVLDSSNIKPMNLIGVDRGENIPAVIALTDPEGCPLSRFKDSLGNPTHILRIGESYKEKQRTIQAKKEVEQRRAGGYSRKYASKAKNLADDMVRNTARDLLYYAVTQDAMLIFENLSRGFGRQGKRTFMAERQYTRMEDWLTAKLAYEGLPSKTYLSKTLAQYTSKTCSNCGFTITSADYDRVLEKLKKTATGWMTTINGKELKVEGQITYYNRYKRQNVVKDLSVELDRLSEESVNNDISSWTKGRSGEALSLLKKRFSHRPVQEKFVCLNCGFETHADEQAALNIARSWLFLRSQEYKKYQTNKTTGNTDKRAFVETWQSFYRKKLKEVWKPAV

SEQ ID NO: 43221 - protein, 978 aa, synthetic construct
  REGION 1..978: note = engineered CasX variant
QEIKRINKIRRRLVKDSNTKKAGKTGPMKTLLVRVMTPDLRERLENLRKKPENIPQPISNTSRANLNKLLTDYTEMKKAILHVYWEEFQKDPVGLMSRVAQPASKKIDQNKLKPEMDEKGNLTTAGFACSQCGQPLFVYKLEQVSEKGKAYTNYFGRCNVAEHEKLILLSQLKPEKDSDEAVTYSLGKFGQRALDFYSIHVTKESTHPVKPLAQIAGNRYASPVGKALSDACMGTIASFLSKYQDIIIEHQKVVKGNQKRLESLRELAGKENLEYPSVTLPPQPHTKEGVDAYNEVIARVRMWVNLNLWQKLKLSRDDAKPLLRLKGFPSFPLVERQANEVDWWDMVCNVKKLINEKKEDGKVFWQNLAGYKRQEALRPYLSSEEDRKKGKKFARYQLGDLLLHLEKKHGEDWGKVYDEAWERIDKKVEGLSKHIKLEEERRSEDAQSKAALTDWLRAKASFVIEGLKEADDKDEFCRCELKLQKWYGDLRGKPFAIEAENSILDISGFSKQYNCAFIWQKDGVKKLNLYLIINYFKGGKLRFKKIKPEAFEANRFYTVINKKSGEIVPMEVNFNFDDPNLIILPLAFGKRQGREFIWNDLLSLETGSLKLANGRVIEKTLYNRRTRQDEPALFVALTFERREVLDSSNIKPMNLIGVDRGENIPAVIALTDPEGCPLSRFKDSLGNPTHILRIGESYKEKQRTIQAKKEVEQRRAGGYSRKYASKAKNLADDMVRNTARDLLYYAVTQDAMLIFENLSRGFGRQGKRTFMAERQYTRMEDWLTAKLAYEGLPSKTYLSKTLAQYTSKTCSNCGFTITSADYDRVLEKLKKTATGWMTTINGKELKVEGQITYYNRYKRQNVVKDLSVELDRLSEESVNNDISSWTKGRSGEALSLLKKRFSHRPVQEKFVCLNCGFETHADEQAALNIARSWLFLRSQEYKKYQTNKTTGNTDKRAFVETWQSFYRKKLKEVWKPAV

SEQ ID NO: 43222 - protein, 979 aa, synthetic construct
  REGION 1..979: note = engineered CasX variant
QEIKRINKIRRRLVKDSNTKKAGKTGPMKTLLVRVMTPDLRERLENLRKKPENIPQPISNTSRANLNKLLTDYTEMKKAILHVYWEEFQKDPVGLMSRVAQPASKKIDQNKLKPEMDEKGNLTTAGFACSQCGQPLFVYKLEQVSEKGKAYTNYFGRCNVAEHEKLILLSQLKPEKDSDEAVTYSLGKFGQRALDFYSIHVTKESTHPVKPLAQIAGNRYASYPVGKALSDACMGTIASFLSKYQDIIIEHQKVVKGNQKRLESLRELAGKENLEYPSVTLPPQPHTKEGVDAYNEVIARVRMWVNLNLWQKLKLSRDDAKPLLRLKGFPSFPLVERQANEVDWWDMVCNVKKLINEKKEDGKVFWQNLAGYKRQEALRPYLSSEEDRKKGKKFARYQLGDLLLHLEKKHGEDWGKVYDEAWERIDKKVEGLSKHIKLEEERRSEDAQSKAALTDWLRAKASFVIEGLKEADKDEFCRCELKLQKWYGDLRGKPFAIEAENSILDISGFSKQYNCAFIWQKDGVKKLNLYLIINYFKGGKLRFKKIKPEAFEANRFYTVINKKSGEIVPMEVNFNFDDPNLIILPLAFGKRQGREFIWNDLLSLETGSLKLANGRVIEKTLYNRRTRQDEPALFVALTFERREVLDSSNIKPMNLIGVDRGENIPAVIALTDPEGCPLSRFKDSLGNPTHILRIGESYKEKQRTIQAKKEVEQRRAGGYSRKYASKAKNLADDMVRNTARDLLYYAVTQDAMLIFENLSRGFGRQGKRTFMAERQYTRMEDWLTAKLAYEGLPSKTYLSKTLAQYTSKTCSNCGFTITSADYDRVLEKLKKTATGWMTTINGKELKVEGQITYYNRYKRQNVVKDLSVELDRLSEESVNNDISSWTKGRSGNEALSLLKKRFSHRPVQEKFVCLNCGFETHADEQAALNIARSWLFLRSQEYKKYQTNKTTGNTDKRAFVETWQSFYRKKLKEVWKPAV

SEQ ID NO: 43223 - protein, 979 aa, synthetic construct
  REGION 1..979: note = engineered CasX variant
QEIKRINKIRRRLVKDSNTKKAGKTGPMKTLLVRVMTPDLRERLENLRKKPENIPQPISNTSRANLNKLLTDYTEMKKAILHVYWEEFQKDPVGLMSRVAQPASKKIDQNKLKPEMDEKGNLTTAGFACSQCGQPLFVYKLEQVSEKGKAYTNYFGRCNVAEHEKLILLSQLKPEKDSDEAVTYSLGKFGQRALDFYSIHVTKESTHPVKPLAQIAGNRYASHPVGKALSDACMGTIASFLSKYQDIIIEHQKVVKGNQKRLESLRELAGKENLEYPSVTLPPQPHTKEGVDAYNEVIARVRMWVNLNLWQKLKLSRDDAKPLLRLKGFPSFPLVERQANEVDWWDMVCNVKKLINEKKEDGKVFWQNLAGYKRQEALRPYLSSEEDRKKGKKFARYQLGDLLLHLEKKHGEDWGKVYDEAWERIDKKVEGLSKHIKLEEERRSEDAQSKAALTDWLRAKASFVIEGLKEADKDEFCRCELKLQKWYGDLRGKPFAIEAENSILDISGFSKQYNCAFIWQKDGVKKLNLYLIINYFKGGKLRFKKIKPEAFEANRFYTVINKKSGEIVPMEVNFNFDDPNLIILPLAFGKRQGREFIWNDLLSLETGSLKLANGRVIEKTLYNRRTRQDEPALFVALTFERREVLDSSNIKPMNLIGVDRGENIPAVIALTDPEGCPLSRFKDSLGNPTHILRIGESYKEKQRTIQAKKEVEQRRAGGYSRKYASKAKNLADDMVRNTARDLLYYAVTQDAMLIFENLSRGFGRQGKRTFMAERQYTRMEDWLTAKLAYEGLPSKTYLSKTLAQYTSKTCSNCGFTITSADYDRVLEKLKKTATGWMTTINGKELKVEGQITYYNRYKRQNVVKDLSVELDRLSEESVNNDISSWTKGRSGNEALSLLKKRFSHRPVQEKFVCLNCGFETHADEQAALNIARSWLFLRSQEYKKYQTNKTTGNTDKRAFVETWQSFYRKKLKEVWKPAV

SEQ ID NO: 43224 - protein, 979 aa, synthetic construct
  REGION 1..979: note = engineered CasX variant
QEIKRINKIRRRLVKDSNTKKAGKTGPMKTLLVRVMTPDLRERLENLRKKPENIPQPISNTSRANLNKLLTDYTEMKKAILHVYWEEFQKDPVGLMSRVAQPASKKIDQNKLKPEMDEKGNLTTAGFACSQCGQPLFVYKLEQVSEKGKAYTNYFGRCNVAEHEKLILLSQLKPEKDSDEAVTYSLGKFGQRALDFYSIHVTKESTHPVKPLAQIAGNRYASSPVGKALSDACMGTIASFLSKYQDIIIEHQKVVKGNQKRLESLRELAGKENLEYPSVTLPPQPHTKEGVDAYNEVIARVRMWVNLNLWQKLKLSRDDAKPLLRLKGFPSFPLVERQANEVDWWDMVCNVKKLINEKKEDGKVFWQNLAGYKRQEALRPYLSSEEDRKKGKKFARYQLGDLLLHLEKKHGEDWGKVYDEAWERIDKKVEGLSKHIKLEEERRSEDAQSKAALTDWLRAKASFVIEGLKEADKDEFCRCELKLQKWYGDLRGKPFAIEAENSILDISGFSKQYNCAFIWQKDGVKKLNLYLIINYFKGGKLRFKKIKPEAFEANRFYTVINKKSGEIVPMEVNFNFDDPNLIILPLAFGKRQGREFIWNDLLSLETGSLKLANGRVIEKTLYNRRTRQDEPALFVALTFERREVLDSSNIKPMNLIGVDRGENIPAVIALTDPEGCPLSRFKDSLGNPTHILRIGESYKEKQRTIQAKKEVEQRRAGGYSRKYASKAKNLADDMVRNTARDLLYYAVTQDAMLIFENLSRGFGRQGKRTFMAERQYTRMEDWLTAKLAYEGLPSKTYLSKTLAQYTSKTCSNCGFTITSADYDRVLEKLKKTATGWMTTINGKELKVEGQITYYNRYKRQNVVKDLSVELDRLSEESVNNDISSWTKGRSGNEALSLLKKRFSHRPVQEKFVCLNCGFETHADEQAALNIARSWLFLRSQEYKKYQTNKTTGNTDKRAFVETWQSFYRKKLKEVWKPAV

SEQ ID NO: 43225 - protein, 979 aa, synthetic construct
  REGION 1..979: note = engineered CasX variant
QEIKRINKIRRRLVKDSNTKKAGKTGPMKTLLVRVMTPDLRERLENLRKKPENIPQPISNTSRANLNKLLTDYTEMKKAILHVYWEEFQKDPVGLMSRVAQPASKKIDQNKLKPEMDEKGNLTTAGFACSQCGQPLFVYKLEQVSEKGKAYTNYFGRCNVAEHEKLILLSQLKPEKDSDEAVTYSLGKFGQRALDFYSIHVTKESTHPVKPLAQIAGNRYASTPVGKALSDACMGTIASFLSKYQDIIIEHQKVVKGNQKRLESLRELAGKENLEYPSVTLPPQPHTKEGVDAYNEVIARVRMWVNLNLWQKLKLSRDDAKPLLRLKGFPSFPLVERQANEVDWWDMVCNVKKLINEKKEDGKVFWQNLAGYKRQEALRPYLSSEEDRKKGKKFARYQLGDLLLHLEKKHGEDWGKVYDEAWERIDKKVEGLSKHIKLEEERRSEDAQSKAALTDWLRAKASFVIEGLKEADKDEFCRCELKLQKWYGDLRGKPFAIEAENSILDISGFSKQYNCAFIWQKDGVKKLNLYLIINYFKGGKLRFKKIKPEAFEANRFYTVINKKSGEIVPMEVNFNFDDPNLIILPLAFGKRQGREFIWNDLLSLETGSLKLANGRVIEKTLYNRRTRQDEPALFVALTFERREVLDSSNIKPMNLIGVDRGENIPAVIALTDPEGCPLSRFKDSLGNPTHILRIGESYKEKQRTIQAKKEVEQRRAGGYSRKYASKAKNLADDMVRNTARDLLYYAVTQDAMLIFENLSRGFGRQGKRTFMAERQYTRMEDWLTAKLAYEGLPSKTYLSKTLAQYTSKTCSNCGFTITSADYDRVLEKLKKTATGWMTTINGKELKVEGQITYYNRYKRQNVVKDLSVELDRLSEESVNNDISSWTKGRSGNEALSLLKKRFSHRPVQEKFVCLNCGFETHADEQAALNIARSWLFLRSQEYKKYQTNKTTGNTDKRAFVETWQSFYRKKLKEVWKPAV

SEQ ID NO: 43226 - protein, 979 aa, synthetic construct
  REGION 1..979: note = engineered CasX variant
QEIKRINKIRRRLVKDSNTKKAGKTGPMKTLLVRVMTPDLRERLENLRKKPENIPQPISNTSRANLNKLLTDYTEMKKAILHVYWEEFQKDPVGLMSRVAQPASKKIDQNKLKPEMDEKGNLTTAGFACSQCGQPLFVYKLEQVSEKGKAYTNYFGRCNVAEHEKLILLSQLKPEKDSDEAVTYSLGKFGQRALDFYSIHVTKESTHPVKPLAQIAGNRYASAPVGKALSDACMGTIASFLSKYQDIIIEHQKVVKGNQKRLESLRELAGKENLEYPSVTLPPQPHTKEGVDAYNEVIARVRMWVNLNLWQKLKLSRDDAKPLLRLKGFPSFPLVERQANEVDWWDMVCNVKKLINEKKEDGKVFWQNLAGYKRQEALRPYLSSEEDRKKGKKFARYQLGDLLLHLEKKHGEDWGKVYDEAWERIDKKVEGLSKHIKLEEERRSEDAQSKAALTDWLRAKASFVIEGLKEADKDEFCRCELKLQKWYGDLRGKPFAIEAENSILDISGFSKQYNCAFIWQKDGVKKLNLYLIINYFKGGKLRFKKIKPEAFEANRFYTVINKKSGEIVPMEVNFNFDDPNLIILPLAFGKRQGREFIWNDLLSLETGSLKLANGRVIEKTLYNRRTRQDEPALFVALTFERREVLDSSNIKPMNLIGVDRGENIPAVIALTDPEGCPLSRFKDSLGNPTHILRIGESYKEKQRTIQAKKEVEQRRAGGYSRKYASKAKNLADDMVRNTARDLLYYAVTQDAMLIFENLSRGFGRQGKRTFMAERQYTRMEDWLTAKLAYEGLPSKTYLSKTLAQYTSKTCSNCGFTITSADYDRVLEKLKKTATGWMTTINGKELKVEGQITYYNRYKRQNVVKDLSVELDRLSEESVNNDISSWTKGRSGNEALSLLKKRFSHRPVQEKFVCLNCGFETHADEQAALNIARSWLFLRSQEYKKYQTNKTTGNTDKRAFVETWQSFYRKKLKEVWKPAV

SEQ ID NO: 43227 - protein, 979 aa, synthetic construct
  REGION 1..979: note = engineered CasX variant
QEIKRINKIRRRLVKDSNTKKAGKTGPMKTLLVRVMTPDLRERLENLRKKPENIPQPISNTSRANLNKLLTDYTEMKKAILHVYWEEFQKDPVGLMSRVAQPASKKIDQNKLKPEMDEKGNLTTAGFACSQCGQPLFVYKLEQVSEKGKAYTNYFGRCNVAEHEKLILLSQLKPEKDSDEAVTYSLGKFGQRALDFYSIHVTKESTHPVKPLAQIAGNRYASVPVGKALSDACMGTIASFLSKYQDIIIEHQKVVKGNQKRLESLRELAGKENLEYPSVTLPPQPHTKEGVDAYNEVIARVRMWVNLNLWQKLKLSRDDAKPLLRLKGFPSFPLVERQANEVDWWDMVCNVKKLINEKKEDGKVFWQNLAGYKRQEALRPYLSSEEDRKKGKKFARYQLGDLLLHLEKKHGEDWGKVYDEAWERIDKKVEGLSKHIKLEEERRSEDAQSKAALTDWLRAKASFVIEGLKEADKDEFCRCELKLQKWYGDLRGKPFAIEAENSILDISGFSKQYNCAFIWQKDGVKKLNLYLIINYFKGGKLRFKKIKPEAFEANRFYTVINKKSGEIVPMEVNFNFDDPNLIILPLAFGKRQGREFIWNDLLSLETGSLKLANGRVIEKTLYNRRTRQDEPALFVALTFERREVLDSSNIKPMNLIGVDRGENIPAVIALTDPEGCPLSRFKDSLGNPTHILRIGESYKEKQRTIQAKKEVEQRRAGGYSRKYASKAKNLADDMVRNTARDLLYYAVTQDAMLIFENLSRGFGRQGKRTFMAERQYTRMEDWLTAKLAYEGLPSKTYLSKTLAQYTSKTCSNCGFTITSADYDRVLEKLKKTATGWMTTINGKELKVEGQITYYNRYKRQNVVKDLSVELDRLSEESVNNDISSWTKGRSGNEALSLLKKRFSHRPVQEKFVCLNCGFETHADEQAALNIARSWLFLRSQEYKKYQTNKTTGNTDKRAFVETWQSFYRKKLKEVWKPAV

SEQ ID NO: 43228 - protein, 979 aa, synthetic construct
  REGION 1..979: note = engineered CasX variant
QEIKRINKIRRRLVKDSNTKKAGKTGPMKTLLVRVMTPDLRERLENLRKKPENIPQPISNTSRANLNKLLTDYTEMKKAILHVYWEEFQKDPVGLMSRVAQPASKKIDQNKLKPEMDEKGNLTTAGFACSQCGQPLFVYKLEQVSEKGKAYTNYFGRCNVAEHEKLIKLSQLKPEKDSDEAVTYSLGKFGQRALDFYSIHVTKESTHPVKPLAQIAGNRYASGPVGKALSDACMGTIASFLSKYQDIIIEHQKVVKGNQKRLESLRELAGKENLEYPSVTLPPQPHTKEGVDAYNEVIARVRMWVNLNLWQKLKLSRDDAKPLLRLKGFPSFPLVERQANEVDWWDMVCNVKKLINEKKEDGKVFWQNLAGYKRQEALRPYLSSEEDRKKGKKFARYQLGDLLLHLEKKHGEDWGKVYDEAWERIDKKVEGLSKHIKLEEERRSEDAQSKAALTDWLRAKASFVIEGLKEADKDEFCRCELKLQKWYGDLRGKPFAIEAENSILDISGFSKQYNCAFIWQKDGVKKLNLYLIINYFKGGKLRFKKIKPEAFEANRFYTVINKKSGEIVPMEVNFNFDDPNLIILPLAFGKRQGREFIWNDLLSLETGSLKLANGRVIEKTLYNRRTRQDEPALFVALTFERREVLDSSNIKPMNLIGVDRGENIPAVIALTDPEGCPLSRFKDSLGNPTHILRIGESYKEKQRTIQAKKEVEQRRAGGYSRKYASKAKNLADDMVRNTARDLLYYAVTQDAMLIFENLSRGFGRQGKRTFMAERQYTRMEDWLTAKLAYEGLPSKTYLSKTLAQYTSKTCSNCGFTITSADYDRVLEKLKKTATGWMTTINGKELKVEGQITYYNRYKRQNVVKDLSVELDRLSEESVNNDISSWTKGRSGNEALSLLKKRFSHRPVQEKFVCLNCGFETHADEQAALNIARSWLFLRSQEYKKYQTNKTTGNTDKRAFVETWQSFYRKKLKEVWKPAV

SEQ ID NO: 43229 - protein, 978 aa, synthetic construct
  REGION 1..978: note = engineered CasX variant
QEIKRINKIRRRLVKDSNTKKAGKTGPMKTLLVRVMTPDLRERLENLRKKPENIPQPISNTSRANLNKLLTDYTEMKKAILHVYWEEFQKDPVGLMSRVAQPASKKIDQNKLKPEMDEKGNLTTAGFACSQCGQPLFVYKLEQVSEKGKAYTNYFGRCNVAEHEKLILLSQLKPEKDSDEAVTYSLGKFGQRALDFYSIHVTKESTHPVKPLAQIAGNRYASPVGKALSDACMGTIASFLSKYQDIIIEHQKVVKGNQKRLESLRELAGKENLEYPSVTLPPQPHTKEGVDAYNEVIARVRMWVNLNLWQKLKLSRDDAKPLLRLKGFPSFPLVERQANEVDWWDMVCNVKKLINEKKEDGKVFWQNLAGYKRQEALRPYLSSEEDRKKGKKFARYQLGDLLLHLEKKHGEDWGKVYDEAWERIDKKVEGLSKHIKLEEERRSEDAQSKAALTDWLRAKASFVIEGLKEADKDEFCRCELKLQKWYGDLRGKPFAIEAENSILDISGFSKQYNCAFIWQKDGVKKLNLYLIINYFKGGKLRFKKIKPEAFEANRFYTVINKKSGEIVPMEVNFNFDDPNLIILPLAFGKRQGREFIWNDLLSLETGSLKLANGRVIEKTLYNRRTRQDEPALFVALTFERREVLDSSNIKPMNLIGVDRGENIPAVIALTDPEGCPLSRFKDSLGNPTHILRIGESYKEKQRTIQAKKEVEQRRAGGYSRKYASKAKNLADDMVRNTARDLLYYAVTQDAMLIFENLSRGFGRQGKRTFMAERQYTRMEDWLTAKLAYEGLPSKTYLSKTLAQYTSKTCSNCGFTITSADYDRVLEKLKKTATGWMTTINGKELKVEGQITYYNRYKRQNVVKDLSVELDRLSEESVNNDISSWTKGRSGNEALSLLKKRFSHRPVQEKFVCLNCGFETHADEQAALNIARSWLFLRSQEYKKYQTNKTTGNTDKRAFVETWQSFYRKKLKEVWKPAV

SEQ ID NO: 43230 - protein, 978 aa, synthetic construct
  REGION 1..978: note = engineered CasX variant
QEIKRINKIRRRLVKDSNTKKAGKTGPMKTLLVRVMTPDLRERLENLRKKPENIPQPISNTSRANLNKLLTDYTEMKKAILHVYWEEFQKDPVGLMSRVAQPASKKIDQNKLKPEMDEKGNLTTAGFACSQCGQPLFVYKLEQVSEKGKAYTNYFGRCNVAEHEKLILLSQLKPEKDSDEAVTYSLGKFGQRALDFYSIHVTKESTHPVKPLAQIAGNRYASYPVGKALSDACMGTIASFLSKYQDIIIEHQKVVKGNQKRLESLRELAGKENLEYPSVTLPPQPHTKEGVDAYNEVIARVRMWVNLNLWQKLKLSRDDAKPLLRLKGFPSFPLVERQANEVDWWDMVCNVKKLINEKKEDGKVFWQNLAGYKRQEALRPYLSSEEDRQKGKKFARYQLGDLLLHLEKKHGEDWGKVYDEAWERIDKKVEGLSKHIKLEEERRSEDAQSKAALTDWLRAKASFVIEGLKEADKDEFCRCELKLQKWYGDLRGKPFAIEAENSILDISGFSKQYNCAFIWQKDGVKKLNLYLIINYFKGGKLRFKKIKPEAFEANRFYTVINKKSGEIVPMEVNFNFDDPNLIILPLAFGKRQGREFIWNDLLSLETGSLKLANGRVIEKTLYNRRTRQDEPALFVALTFERREVLDSSNIKPMNLIGVDRGENIPAVIALTDPEGCPLSRFKDSLGNPTHILRIGESYKEKQRTIQAKKEVEQRRAGGYSRKYASKAKNLADDMVRNTARDLLYYAVTQDAMLIFENLSRGFGRQGKRTFMAERQYTRMEDWLTAKLAYEGLPSKTYLSKTLAQYTSKTCSNCGFTITSADYDRVLEKLKKTATGWMTTINGKELKVEGQITYYNRYKRQNVVKDLSVELDRLSEESVNNDISSWTKGRSGEALSLLKKRFSHRPVQEKFVCLNCGFETHADEQAALNIARSWLFLRSQEYKKYQTNKTTGNTDKRAFVETWQSFYRKKLKEVWKPAV

SEQ ID NO: 43231 - protein, 978 aa, synthetic construct
  REGION 1..978: note = engineered CasX variant
QEIKRINKIRRRLVKDSNTKKAGKTGPMKTLLVRVMTPDLRERLENLRKKPENIPQPISNTSRANLNKLLTDYTEMKKAILHVYWEEFQKDPVGLMSRVAQPASKKIDQNKLKPEMDEKGNLTTAGFACSQCGQPLFVYKLEQVSEKGKAYTNYFGRCNVAEHEKLILLSQLKPEKDSDEAVTYSLGKFGQRALDFYSIHVTKESTHPVKPLAQIAGNRYASHPVGKALSDACMGTIASFLSKYQDIIIEHQKVVKGNQKRLESLRELAGKENLEYPSVTLPPQPHTKEGVDAYNEVIARVRMWVNLNLWQKLKLSRDDAKPLLRLKGFPSFPLVERQANEVDWWDMVCNVKKLINEKKEDGKVFWQNLAGYKRQEALRPYLSSEEDRQKGKKFARYQLGDLLLHLEKKHGEDWGKVYDEAWERIDKKVEGLSKHIKLEEERRSEDAQSKAALTDWLRAKASFVIEGLKEADKDEFCRCELKLQKWYGDLRGKPFAIEAENSILDISGFSKQYNCAFIWQKDGVKKLNLYLIINYFKGGKLRFKKIKPEAFEANRFYTVINKKSGEIVPMEVNFNFDDPNLIILPLAFGKRQGREFIWNDLLSLETGSLKLANGRVIEKTLYNRRTRQDEPALFVALTFERREVLDSSNIKPMNLIGVDRGENIPAVIALTDPEGCPLSRFKDSLGNPTHILRIGESYKEKQRTIQAKKEVEQRRAGGYSRKYASKAKNLADDMVRNTARDLLYYAVTQDAMLIFENLSRGFGRQGKRTFMAERQYTRMEDWLTAKLAYEGLPSKTYLSKTLAQYTSKTCSNCGFTITSADYDRVLEKLKKTATGWMTTINGKELKVEGQITYYNRYKRQNVVKDLSVELDRLSEESVNNDISSWTKGRSGEALSLLKKRFSHRPVQEKFVCLNCGFETHADEQAALNIARSWLFLRSQEYKKYQTNKTTGNTDKRAFVETWQSFYRKKLKEVWKPAV

SEQ ID NO: 43232 - protein, 978 aa, synthetic construct
  REGION 1..978: note = engineered CasX variant
QEIKRINKIRRRLVKDSNTKKAGKTGPMKTLLVRVMTPDLRERLENLRKKPENIPQPISNTSRANLNKLLTDYTEMKKAILHVYWEEFQKDPVGLMSRVAQPASKKIDQNKLKPEMDEKGNLTTAGFACSQCGQPLFVYKLEQVSEKGKAYTNYFGRCNVAEHEKLILLSQLKPEKDSDEAVTYSLGKFGQRALDFYSIHVTKESTHPVKPLAQIAGNRYASSPVGKALSDACMGTIASFLSKYQDIIIEHQKVVKGNQKRLESLRELAGKENLEYPSVTLPPQPHTKEGVDAYNEVIARVRMWVNLNLWQKLKLSRDDAKPLLRLKGFPSFPLVERQANEVDWWDMVCNVKKLINEKKEDGKVFWQNLAGYKRQEALRPYLSSEEDRQKGKKFARYQLGDLLLHLEKKHGEDWGKVYDEAWERIDKKVEGLSKHIKLEEERRSEDAQSKAALTDWLRAKASFVIEGLKEADKDEFCRCELKLQKWYGDLRGKPFAIEAENSILDISGFSKQYNCAFIWQKDGVKKLNLYLIINYFKGGKLRFKKIKPEAFEANRFYTVINKKSGEIVPMEVNFNFDDPNLIILPLAFGKRQGREFIWNDLLSLETGSLKLANGRVIEKTLYNRRTRQDEPALFVALTFERREVLDSSNIKPMNLIGVDRGENIPAVIALTDPEGCPLSRFKDSLGNPTHILRIGESYKEKQRTIQAKKEVEQRRAGGYSRKYASKAKNLADDMVRNTARDLLYYAVTQDAMLIFENLSRGFGRQGKRTFMAERQYTRMEDWLTAKLAYEGLPSKTYLSKTLAQYTSKTCSNCGFTITSADYDRVLEKLKKTATGWMTTINGKELKVEGQITYYNRYKRQNVVKDLSVELDRLSEESVNNDISSWTKGRSGEALSLLKKRFSHRPVQEKFVCLNCGFETHADEQAALNIARSWLFLRSQEYKKYQTNKTTGNTDKRAFVETWQSFYRKKLKEVWKPAV

SEQ ID NO: 43233 - protein, 978 aa, synthetic construct
  REGION 1..978: note = engineered CasX variant
QEIKRINKIRRRLVKDSNTKKAGKTGPMKTLLVRVMTPDLRERLENLRKKPENIPQPISNTSRANLNKLLTDYTEMKKAILHVYWEEFQKDPVGLMSRVAQPASKKIDQNKLKPEMDEKGNLTTAGFACSQCGQPLFVYKLEQVSEKGKAYTNYFGRCNVAEHEKLILLSQLKPEKDSDEAVTYSLGKFGQRALDFYSIHVTKESTHPVKPLAQIAGNRYASTPVGKALSDACMGTIASFLSKYQDIIIEHQKVVKGNQKRLESLRELAGKENLEYPSVTLPPQPHTKEGVDAYNEVIARVRMWVNLNLWQKLKLSRDDAKPLLRLKGFPSFPLVERQANEVDWWDMVCNVKKLINEKKEDGKVFWQNLAGYKRQEALRPYLSSEEDRQKGKKFARYQLGDLLLHLEKKHGEDWGKVYDEAWERIDKKVEGLSKHIKLEEERRSEDAQSKAALTDWLRAKASFVIEGLKEADKDEFCRCELKLQKWYGDLRGKPFAIEAENSILDISGFSKQYNCAFIWQKDGVKKLNLYLIINYFKGGKLRFKKIKPEAFEANRFYTVINKKSGEIVPMEVNFNFDDPNLIILPLAFGKRQGREFIWNDLLSLETGSLKLANGRVIEKTLYNRRTRQDEPALFVALTFERREVLDSSNIKPMNLIGVDRGENIPAVIALTDPEGCPLSRFKDSLGNPTHILRIGESYKEKQRTIQAKKEVEQRRAGGYSRKYASKAKNLADDMVRNTARDLLYYAVTQDAMLIFENLSRGFGRQGKRTFMAERQYTRMEDWLTAKLAYEGLPSKTYLSKTLAQYTSKTCSNCGFTITSADYDRVLEKLKKTATGWMTTINGKELKVEGQITYYNRYKRQNVVKDLSVELDRLSEESVNNDISSWTKGRSGEALSLLKKRFSHRPVQEKFVCLNCGFETHADEQAALNIARSWLFLRSQEYKKYQTNKTTGNTDKRAFVETWQSFYRKKLKEVWKPAV

SEQ ID NO: 43234 - protein, 978 aa, synthetic construct
  REGION 1..978: note = engineered CasX variant
QEIKRINKIRRRLVKDSNTKKAGKTGPMKTLLVRVMTPDLRERLENLRKKPENIPQPISNTSRANLNKLLTDYTEMKKAILHVYWEEFQKDPVGLMSRVAQPASKKIDQNKLKPEMDEKGNLTTAGFACSQCGQPLFVYKLEQVSEKGKAYTNYFGRCNVAEHEKLILLSQLKPEKDSDEAVTYSLGKFGQRALDFYSIHVTKESTHPVKPLAQIAGNRYASAPVGKALSDACMGTIASFLSKYQDIIIEHQKVVKGNQKRLESLRELAGKENLEYPSVTLPPQPHTKEGVDAYNEVIARVRMWVNLNLWQKLKLSRDDAKPLLRLKGFPSFPLVERQANEVDWWDMVCNVKKLINEKKEDGKVFWQNLAGYKRQEALRPYLSSEEDRQKGKKFARYQLGDLLLHLEKKHGEDWGKVYDEAWERIDKKVEGLSKHIKLEEERRSEDAQSKAALTDWLRAKASFVIEGLKEADKDEFCRCELKLQKWYGDLRGKPFAIEAENSILDISGFSKQYNCAFIWQKDGVKKLNLYLIINYFKGGKLRFKKIKPEAFEANRFYTVINKKSGEIVPMEVNFNFDDPNLIILPLAFGKRQGREFIWNDLLSLETGSLKLANGRVIEKTLYNRRTRQDEPALFVALTFERREVLDSSNIKPMNLIGVDRGENIPAVIALTDPEGCPLSRFKDSLGNPTHILRIGESYKEKQRTIQAKKEVEQRRAGGYSRKYASKAKNLADDMVRNTARDLLYYAVTQDAMLIFENLSRGFGRQGKRTFMAERQYTRMEDWLTAKLAYEGLPSKTYLSKTLAQYTSKTCSNCGFTITSADYDRVLEKLKKTATGWMTTINGKELKVEGQITYYNRYKRQNVVKDLSVELDRLSEESVNNDISSWTKGRSGEALSLLKKRFSHRPVQEKFVCLNCGFETHADEQAALNIARSWLFLRSQEYKKYQTNKTTGNTDKRAFVETWQSFYRKKLKEVWKPAV

SEQ ID NO: 43235 - protein, 978 aa, synthetic construct
  REGION 1..978: note = engineered CasX variant
QEIKRINKIRRRLVKDSNTKKAGKTGPMKTLLVRVMTPDLRERLENLRKKPENIPQPISNTSRANLNKLLTDYTEMKKAILHVYWEEFQKDPVGLMSRVAQPASKKIDQNKLKPEMDEKGNLTTAGFACSQCGQPLFVYKLEQVSEKGKAYTNYFGRCNVAEHEKLILLSQLKPEKDSDEAVTYSLGKFGQRALDFYSIHVTKESTHPVKPLAQIAGNRYASVPVGKALSDACMGTIASFLSKYQDIIIEHQKVVKGNQKRLESLRELAGKENLEYPSVTLPPQPHTKEGVDAYNEVIARVRMWVNLNLWQKLKLSRDDAKPLLRLKGFPSFPLVERQANEVDWWDMVCNVKKLINEKKEDGKVFWQNLAGYKRQEALRPYLSSEEDRQKGKKFARYQLGDLLLHLEKKHGEDWGKVYDEAWERIDKKVEGLSKHIKLEEERRSEDAQSKAALTDWLRAKASFVIEGLKEADKDEFCRCELKLQKWYGDLRGKPFAIEAENSILDISGFSKQYNCAFIWQKDGVKKLNLYLIINYFKGGKLRFKKIKPEAFEANRFYTVINKKSGEIVPMEVNFNFDDPNLIILPLAFGKRQGREFIWNDLLSLETGSLKLANGRVIEKTLYNRRTRQDEPALFVALTFERREVLDSSNIKPMNLIGVDRGENIPAVIALTDPEGCPLSRFKDSLGNPTHILRIGESYKEKQRTIQAKKEVEQRRAGGYSRKYASKAKNLADDMVRNTARDLLYYAVTQDAMLIFENLSRGFGRQGKRTFMAERQYTRMEDWLTAKLAYEGLPSKTYLSKTLAQYTSKTCSNCGFTITSADYDRVLEKLKKTATGWMTTINGKELKVEGQITYYNRYKRQNVVKDLSVELDRLSEESVNNDISSWTKGRSGEALSLLKKRFSHRPVQEKFVCLNCGFETHADEQAALNIARSWLFLRSQEYKKYQTNKTTGNTDKRAFVETWQSFYRKKLKEVWKPAV

SEQ ID NO: 43236 - protein, 978 aa, synthetic construct
  REGION 1..978: note = engineered CasX variant
QEIKRINKIRRRLVKDSNTKKAGKTGPMKTLLVRVMTPDLRERLENLRKKPENIPQPISNTSRANLNKLLTDYTEMKKAILHVYWEEFQKDPVGLMSRVAQPASKKIDQNKLKPEMDEKGNLTTAGFACSQCGQPLFVYKLEQVSEKGKAYTNYFGRCNVAEHEKLIKLSQLKPEKDSDEAVTYSLGKFGQRALDFYSIHVTKESTHPVKPLAQIAGNRYASGPVGKALSDACMGTIASFLSKYQDIIIEHQKVVKGNQKRLESLRELAGKENLEYPSVTLPPQPHTKEGVDAYNEVIARVRMWVNLNLWQKLKLSRDDAKPLLRLKGFPSFPLVERQANEVDWWDMVCNVKKLINEKKEDGKVFWQNLAGYKRQEALRPYLSSEEDRQKGKKFARYQLGDLLLHLEKKHGEDWGKVYDEAWERIDKKVEGLSKHIKLEEERRSEDAQSKAALTDWLRAKASFVIEGLKEADKDEFCRCELKLQKWYGDLRGKPFAIEAENSILDISGFSKQYNCAFIWQKDGVKKLNLYLIINYFKGGKLRFKKIKPEAFEANRFYTVINKKSGEIVPMEVNFNFDDPNLIILPLAFGKRQGREFIWNDLLSLETGSLKLANGRVIEKTLYNRRTRQDEPALFVALTFERREVLDSSNIKPMNLIGVDRGENIPAVIALTDPEGCPLSRFKDSLGNPTHILRIGESYKEKQRTIQAKKEVEQRRAGGYSRKYASKAKNLADDMVRNTARDLLYYAVTQDAMLIFENLSRGFGRQGKRTFMAERQYTRMEDWLTAKLAYEGLPSKTYLSKTLAQYTSKTCSNCGFTITSADYDRVLEKLKKTATGWMTTINGKELKVEGQITYYNRYKRQNVVKDLSVELDRLSEESVNNDISSWTKGRSGEALSLLKKRFSHRPVQEKFVCLNCGFETHADEQAALNIARSWLFLRSQEYKKYQTNKTTGNTDKRAFVETWQSFYRKKLKEVWKPAV

SEQ ID NO: 43237 - protein, 977 aa, synthetic construct
  REGION 1..977: note = engineered CasX variant
QEIKRINKIRRRLVKDSNTKKAGKTGPMKTLLVRVMTPDLRERLENLRKKPENIPQPISNTSRANLNKLLTDYTEMKKAILHVYWEEFQKDPVGLMSRVAQPASKKIDQNKLKPEMDEKGNLTTAGFACSQCGQPLFVYKLEQVSEKGKAYTNYFGRCNVAEHEKLILLSQLKPEKDSDEAVTYSLGKFGQRALDFYSIHVTKESTHPVKPLAQIAGNRYASPVGKALSDACMGTIASFLSKYQDIIIEHQKVVKGNQKRLESLRELAGKENLEYPSVTLPPQPHTKEGVDAYNEVIARVRMWVNLNLWQKLKLSRDDAKPLLRLKGFPSFPLVERQANEVDWWDMVCNVKKLINEKKEDGKVFWQNLAGYKRQEALRPYLSSEEDRQKGKKFARYQLGDLLLHLEKKHGEDWGKVYDEAWERIDKKVEGLSKHIKLEEERRSEDAQSKAALTDWLRAKASFVIEGLKEADKDEFCRCELKLQKWYGDLRGKPFAIEAENSILDISGFSKQYNCAFIWQKDGVKKLNLYLIINYFKGGKLRFKKIKPEAFEANRFYTVINKKSGEIVPMEVNFNFDDPNLIILPLAFGKRQGREFIWNDLLSLETGSLKLANGRVIEKTLYNRRTRQDEPALFVALTFERREVLDSSNIKPMNLIGVDRGENIPAVIALTDPEGCPLSRFKDSLGNPTHILRIGESYKEKQRTIQAKKEVEQRRAGGYSRKYASKAKNLADDMVRNTARDLLYYAVTQDAMLIFENLSRGFGRQGKRTFMAERQYTRMEDWLTAKLAYEGLPSKTYLSKTLAQYTSKTCSNCGFTITSADYDRVLEKLKKTATGWMTTINGKELKVEGQITYYNRYKRQNVVKDLSVELDRLSEESVNNDISSWTKGRSGEALSLLKKRFSHRPVQEKFVCLNCGFETHADEQAALNIARSWLFLRSQEYKKYQTNKTTGNTDKRAFVETWQSFYRKKLKEVWKPAV

SEQ ID NO: 43238 - protein, 978 aa, synthetic construct
  REGION 1..978: note = engineered CasX variant
QEIKRINKIRRRLVKDSNTKKAGKTGPMKTLLVRVMTPDLRERLENLRKKPENIPQPISNTSRANLNKLLTDYTEMKKAILHVYWEEFQKDPVGLMSRVAQPASKKIDQNKLKPEMDEKGNLTTAGFACSQCGQPLFVYKLEQVSEKGKAYTNYFGRCNVAEHEKLILLSQLKPEKDSDEAVTYSLGKFGQRALDFYSIHVTKESTHPVKPLAQIAGNRYASYPVGKALSDACMGTIASFLSKYQDIIIEHQKVVKGNQKRLESLRELAGKENLEYPSVTLPPQPHTKEGVDAYNEVIARVRMWVNLNLWQKLKLSRDDAKPLLRLKGFPSFPLVERQANEVDWWDMVCNVKKLINEKKEDGKVFWQNLAGYKRQEALRPYLSSEEDRKKGKKFARYQLGDLLLHLEKKHGEDWGKVYDEAWERIDKKVEGLSKHIKLEEERRSEDAQSKAALTDWLRAKASFVIEGLKEADKDEFCRCELKLQKWYGDLRGKPFAIEAENSILDISGFSKQYNCAFIWQKDGVKKLNLYLIINYFKGGKLRFKKIKPEAFEANRFYTVINKKSGEIVPMEVNFNFDDPNLIILPLAFGKRQGREFIWNDLLSLETGSLKLANGRVIEKTLYNRRTRQDEPALFVALTFERREVLDSSNIKPMNLIGVDRGENIPAVIALTDPEGCPLSRFKDSLGNPTHILRIGESYKEKQRTIQAKKEVEQRRAGGYSRKYASKAKNLADDMVRNTARDLLYYAVTQDAMLIFENLSRGFGRQGKRTFMAERQYTRMEDWLTAKLAYEGLPSQTYLSKTLAQYTSKTCSNCGFTITSADYDRVLEKLKKTATGWMTTINGKELKVEGQITYYNRYKRQNVVKDLSVELDRLSEESVNNDISSWTKGRSGEALSLLKKRFSHRPVQEKFVCLNCGFETHADEQAALNIARSWLFLRSQEYKKYQTNKTTGNTDKRAFVETWQSFYRKKLKEVWKPAV

SEQ ID NO: 43239 - protein, 978 aa, synthetic construct
  REGION 1..978: note = engineered CasX variant
QEIKRINKIRRRLVKDSNTKKAGKTGPMKTLLVRVMTPDLRERLENLRKKPENIPQPISNTSRANLNKLLTDYTEMKKAILHVYWEEFQKDPVGLMSRVAQPASKKIDQNKLKPEMDEKGNLTTAGFACSQCGQPLFVYKLEQVSEKGKAYTNYFGRCNVAEHEKLILLSQLKPEKDSDEAVTYSLGKFGQRALDFYSIHVTKESTHPVKPLAQIAGNRYASHPVGKALSDACMGTIASFLSKYQDIIIEHQKVVKGNQKRLESLRELAGKENLEYPSVTLPPQPHTKEGVDAYNEVIARVRMWVNLNLWQKLKLSRDDAKPLLRLKGFPSFPLVERQANEVDWWDMVCNVKKLINEKKEDGKVFWQNLAGYKRQEALRPYLSSEEDRKKGKKFARYQLGDLLLHLEKKHGEDWGKVYDEAWERIDKKVEGLSKHIKLEEERRSEDAQSKAALTDWLRAKASFVIEGLKEADKDEFCRCELKLQKWYGDLRGKPFAIEAENSILDISGFSKQYNCAFIWQKDGVKKLNLYLIINYFKGGKLRFKKIKPEAFEANRFYTVINKKSGEIVPMEVNFNFDDPNLIILPLAFGKRQGREFIWNDLLSLETGSLKLANGRVIEKTLYNRRTRQDEPALFVALTFERREVLDSSNIKPMNLIGVDRGENIPAVIALTDPEGCPLSRFKDSLGNPTHILRIGESYKEKQRTIQAKKEVEQRRAGGYSRKYASKAKNLADDMVRNTARDLLYYAVTQDAMLIFENLSRGFGRQGKRTFMAERQYTRMEDWLTAKLAYEGLPSQTYLSKTLAQYTSKTCSNCGFTITSADYDRVLEKLKKTATGWMTTINGKELKVEGQITYYNRYKRQNVVKDLSVELDRLSEESVNNDISSWTKGRSGEALSLLKKRFSHRPVQEKFVCLNCGFETHADEQAALNIARSWLFLRSQEYKKYQTNKTTGNTDKRAFVETWQSFYRKKLKEVWKPAV

SEQ ID NO: 43240 - protein, 978 aa, synthetic construct
  REGION 1..978: note = engineered CasX variant
QEIKRINKIRRRLVKDSNTKKAGKTGPMKTLLVRVMTPDLRERLENLRKKPENIPQPISNTSRANLNKLLTDYTEMKKAILHVYWEEFQKDPVGLMSRVAQPASKKIDQNKLKPEMDEKGNLTTAGFACSQCGQPLFVYKLEQVSEKGKAYTNYFGRCNVAEHEKLILLSQLKPEKDSDEAVTYSLGKFGQRALDFYSIHVTKESTHPVKPLAQIAGNRYASSPVGKALSDACMGTIASFLSKYQDIIIEHQKVVKGNQKRLESLRELAGKENLEYPSVTLPPQPHTKEGVDAYNEVIARVRMWVNLNLWQKLKLSRDDAKPLLRLKGFPSFPLVERQANEVDWWDMVCNVKKLINEKKEDGKVFWQNLAGYKRQEALRPYLSSEEDRKKGKKFARYQLGDLLLHLEKKHGEDWGKVYDEAWERIDKKVEGLSKHIKLEEERRSEDAQSKAALTDWLRAKASFVIEGLKEADKDEFCRCELKLQKWYGDLRGKPFAIEAENSILDISGFSKQYNCAFIWQKDGVKKLNLYLIINYFKGGKLRFKKIKPEAFEANRFYTVINKKSGEIVPMEVNFNFDDPNLIILPLAFGKRQGREFIWNDLLSLETGSLKLANGRVIEKTLYNRRTRQDEPALFVALTFERREVLDSSNIKPMNLIGVDRGENIPAVIALTDPEGCPLSRFKDSLGNPTHILRIGESYKEKQRTIQAKKEVEQRRAGGYSRKYASKAKNLADDMVRNTARDLLYYAVTQDAMLIFENLSRGFGRQGKRTFMAERQYTRMEDWLTAKLAYEGLPSQTYLSKTLAQYTSKTCSNCGFTITSADYDRVLEKLKKTATGWMTTINGKELKVEGQITYYNRYKRQNVVKDLSVELDRLSEESVNNDISSWTKGRSGEALSLLKKRFSHRPVQEKFVCLNCGFETHADEQAALNIARSWLFLRSQEYKKYQTNKTTGNTDKRAFVETWQSFYRKKLKEVWKPAV

SEQ ID NO: 43241 - protein, 978 aa, synthetic construct
  REGION 1..978: note = engineered CasX variant
QEIKRINKIRRRLVKDSNTKKAGKTGPMKTLLVRVMTPDLRERLENLRKKPENIPQPISNTSRANLNKLLTDYTEMKKAILHVYWEEFQKDPVGLMSRVAQPASKKIDQNKLKPEMDEKGNLTTAGFACSQCGQPLFVYKLEQVSEKGKAYTNYFGRCNVAEHEKLILLSQLKPEKDSDEAVTYSLGKFGQRALDFYSIHVTKESTHPVKPLAQIAGNRYASTPVGKALSDACMGTIASFLSKYQDIIIEHQKVVKGNQKRLESLRELAGKENLEYPSVTLPPQPHTKEGVDAYNEVIARVRMWVNLNLWQKLKLSRDDAKPLLRLKGFPSFPLVERQANEVDWWDMVCNVKKLINEKKEDGKVFWQNLAGYKRQEALRPYLSSEEDRKKGKKFARYQLGDLLLHLEKKHGEDWGKVYDEAWERIDKKVEGLSKHIKLEEERRSEDAQSKAALTDWLRAKASFVIEGLKEADKDEFCRCELKLQKWYGDLRGKPFAIEAENSILDISGFSKQYNCAFIWQKDGVKKLNLYLIINYFKGGKLRFKKIKPEAFEANRFYTVINKKSGEIVPMEVNFNFDDPNLIILPLAFGKRQGREFIWNDLLSLETGSLKLANGRVIEKTLYNRRTRQDEPALFVALTFERREVLDSSNIKPMNLIGVDRGENIPAVIALTDPEGCPLSRFKDSLGNPTHILRIGESYKEKQRTIQAKKEVEQRRAGGYSRKYASKAKNLADDMVRNTARDLLYYAVTQDAMLIFENLSRGFGRQGKRTFMAERQYTRMEDWLTAKLAYEGLPSQTYLSKTLAQYTSKTCSNCGFTITSADYDRVLEKLKKTATGWMTTINGKELKVEGQITYYNRYKRQNVVKDLSVELDRLSEESVNNDISSWTKGRSGEALSLLKKRFSHRPVQEKFVCLNCGFETHADEQAALNIARSWLFLRSQEYKKYQTNKTTGNTDKRAFVETWQSFYRKKLKEVWKPAV

SEQ ID NO: 43242 - protein, 978 aa, synthetic construct
  REGION 1..978: note = engineered CasX variant
QEIKRINKIRRRLVKDSNTKKAGKTGPMKTLLVRVMTPDLRERLENLRKKPENIPQPISNTSRANLNKLLTDYTEMKKAILHVYWEEFQKDPVGLMSRVAQPASKKIDQNKLKPEMDEKGNLTTAGFACSQCGQPLFVYKLEQVSEKGKAYTNYFGRCNVAEHEKLILLSQLKPEKDSDEAVTYSLGKFGQRALDFYSIHVTKESTHPVKPLAQIAGNRYASAPVGKALSDACMGTIASFLSKYQDIIIEHQKVVKGNQKRLESLRELAGKENLEYPSVTLPPQPHTKEGVDAYNEVIARVRMWVNLNLWQKLKLSRDDAKPLLRLKGFPSFPLVERQANEVDWWDMVCNVKKLINEKKEDGKVFWQNLAGYKRQEALRPYLSSEEDRKKGKKFARYQLGDLLLHLEKKHGEDWGKVYDEAWERIDKKVEGLSKHIKLEEERRSEDAQSKAALTDWLRAKASFVIEGLKEADKDEFCRCELKLQKWYGDLRGKPFAIEAENSILDISGFSKQYNCAFIWQKDGVKKLNLYLIINYFKGGKLRFKKIKPEAFEANRFYTVINKKSGEIVPMEVNFNFDDPNLIILPLAFGKRQGREFIWNDLLSLETGSLKLANGRVIEKTLYNRRTRQDEPALFVALTFERREVLDSSNIKPMNLIGVDRGENIPAVIALTDPEGCPLSRFKDSLGNPTHILRIGESYKEKQRTIQAKKEVEQRRAGGYSRKYASKAKNLADDMVRNTARDLLYYAVTQDAMLIFENLSRGFGRQGKRTFMAERQYTRMEDWLTAKLAYEGLPSQTYLSKTLAQYTSKTCSNCGFTITSADYDRVLEKLKKTATGWMTTINGKELKVEGQITYYNRYKRQNVVKDLSVELDRLSEESVNNDISSWTKGRSGEALSLLKKRFSHRPVQEKFVCLNCGFETHADEQAALNIARSWLFLRSQEYKKYQTNKTTGNTDKRAFVETWQSFYRKKLKEVWKPAV

SEQ ID NO: 43243 - protein, 978 aa, synthetic construct
  REGION 1..978: note = engineered CasX variant
QEIKRINKIRRRLVKDSNTKKAGKTGPMKTLLVRVMTPDLRERLENLRKKPENIPQPISNTSRANLNKLLTDYTEMKKAILHVYWEEFQKDPVGLMSRVAQPASKKIDQNKLKPEMDEKGNLTTAGFACSQCGQPLFVYKLEQVSEKGKAYTNYFGRCNVAEHEKLILLSQLKPEKDSDEAVTYSLGKFGQRALDFYSIHVTKESTHPVKPLAQIAGNRYASVPVGKALSDACMGTIASFLSKYQDIIIEHQKVVKGNQKRLESLRELAGKENLEYPSVTLPPQPHTKEGVDAYNEVIARVRMWVNLNLWQKLKLSRDDAKPLLRLKGFPSFPLVERQANEVDWWDMVCNVKKLINEKKEDGKVFWQNLAGYKRQEALRPYLSSEEDRKKGKKFARYQLGDLLLHLEKKHGEDWGKVYDEAWERIDKKVEGLSKHIKLEEERRSEDAQSKAALTDWLRAKASFVIEGLKEADKDEFCRCELKLQKWYGDLRGKPFAIEAENSILDISGFSKQYNCAFIWQKDGVKKLNLYLIINYFKGGKLRFKKIKPEAFEANRFYTVINKKSGEIVPMEVNFNFDDPNLIILPLAFGKRQGREFIWNDLLSLETGSLKLANGRVIEKTLYNRRTRQDEPALFVALTFERREVLDSSNIKPMNLIGVDRGENIPAVIALTDPEGCPLSRFKDSLGNPTHILRIGESYKEKQRTIQAKKEVEQRRAGGYSRKYASKAKNLADDMVRNTARDLLYYAVTQDAMLIFENLSRGFGRQGKRTFMAERQYTRMEDWLTAKLAYEGLPSQTYLSKTLAQYTSKTCSNCGFTITSADYDRVLEKLKKTATGWMTTINGKELKVEGQITYYNRYKRQNVVKDLSVELDRLSEESVNNDISSWTKGRSGEALSLLKKRFSHRPVQEKFVCLNCGFETHADEQAALNIARSWLFLRSQEYKKYQTNKTTGNTDKRAFVETWQSFYRKKLKEVWKPAV

SEQ ID NO: 43244 - protein, 978 aa, synthetic construct
  REGION 1..978: note = engineered CasX variant
QEIKRINKIRRRLVKDSNTKKAGKTGPMKTLLVRVMTPDLRERLENLRKKPENIPQPISNTSRANLNKLLTDYTEMKKAILHVYWEEFQKDPVGLMSRVAQPASKKIDQNKLKPEMDEKGNLTTAGFACSQCGQPLFVYKLEQVSEKGKAYTNYFGRCNVAEHEKLIKLSQLKPEKDSDEAVTYSLGKFGQRALDFYSIHVTKESTHPVKPLAQIAGNRYASGPVGKALSDACMGTIASFLSKYQDIIIEHQKVVKGNQKRLESLRELAGKENLEYPSVTLPPQPHTKEGVDAYNEVIARVRMWVNLNLWQKLKLSRDDAKPLLRLKGFPSFPLVERQANEVDWWDMVCNVKKLINEKKEDGKVFWQNLAGYKRQEALRPYLSSEEDRKKGKKFARYQLGDLLLHLEKKHGEDWGKVYDEAWERIDKKVEGLSKHIKLEEERRSEDAQSKAALTDWLRAKASFVIEGLKEADKDEFCRCELKLQKWYGDLRGKPFAIEAENSILDISGFSKQYNCAFIWQKDGVKKLNLYLIINYFKGGKLRFKKIKPEAFEANRFYTVINKKSGEIVPMEVNFNFDDPNLIILPLAFGKRQGREFIWNDLLSLETGSLKLANGRVIEKTLYNRRTRQDEPALFVALTFERREVLDSSNIKPMNLIGVDRGENIPAVIALTDPEGCPLSRFKDSLGNPTHILRIGESYKEKQRTIQAKKEVEQRRAGGYSRKYASKAKNLADDMVRNTARDLLYYAVTQDAMLIFENLSRGFGRQGKRTFMAERQYTRMEDWLTAKLAYEGLPSQTYLSKTLAQYTSKTCSNCGFTITSADYDRVLEKLKKTATGWMTTINGKELKVEGQITYYNRYKRQNVVKDLSVELDRLSEESVNNDISSWTKGRSGEALSLLKKRFSHRPVQEKFVCLNCGFETHADEQAALNIARSWLFLRSQEYKKYQTNKTTGNTDKRAFVETWQSFYRKKLKEVWKPAV

SEQ ID NO: 43245 - protein, 977 aa, synthetic construct
  REGION 1..977: note = engineered CasX variant
QEIKRINKIRRRLVKDSNTKKAGKTGPMKTLLVRVMTPDLRERLENLRKKPENIPQPISNTSRANLNKLLTDYTEMKKAILHVYWEEFQKDPVGLMSRVAQPASKKIDQNKLKPEMDEKGNLTTAGFACSQCGQPLFVYKLEQVSEKGKAYTNYFGRCNVAEHEKLILLSQLKPEKDSDEAVTYSLGKFGQRALDFYSIHVTKESTHPVKPLAQIAGNRYASPVGKALSDACMGTIASFLSKYQDIIIEHQKVVKGNQKRLESLRELAGKENLEYPSVTLPPQPHTKEGVDAYNEVIARVRMWVNLNLWQKLKLSRDDAKPLLRLKGFPSFPLVERQANEVDWWDMVCNVKKLINEKKEDGKVFWQNLAGYKRQEALRPYLSSEEDRKKGKKFARYQLGDLLLHLEKKHGEDWGKVYDEAWERIDKKVEGLSKHIKLEEERRSEDAQSKAALTDWLRAKASFVIEGLKEADKDEFCRCELKLQKWYGDLRGKPFAIEAENSILDISGFSKQYNCAFIWQKDGVKKLNLYLIINYFKGGKLRFKKIKPEAFEANRFYTVINKKSGEIVPMEVNFNFDDPNLIILPLAFGKRQGREFIWNDLLSLETGSLKLANGRVIEKTLYNRRTRQDEPALFVALTFERREVLDSSNIKPMNLIGVDRGENIPAVIALTDPEGCPLSRFKDSLGNPTHILRIGESYKEKQRTIQAKKEVEQRRAGGYSRKYASKAKNLADDMVRNTARDLLYYAVTQDAMLIFENLSRGFGRQGKRTFMAERQYTRMEDWLTAKLAYEGLPSQTYLSKTLAQYTSKTCSNCGFTITSADYDRVLEKLKKTATGWMTTINGKELKVEGQITYYNRYKRQNVVKDLSVELDRLSEESVNNDISSWTKGRSGEALSLLKKRFSHRPVQEKFVCLNCGFETHADEQAALNIARSWLFLRSQEYKKYQTNKTTGNTDKRAFVETWQSFYRKKLKEVWKPAV

SEQ ID NO: 43246 - protein, 978 aa, synthetic construct
  REGION 1..978: note = engineered CasX variant
QEIKRINKIRRRLVKDSNTKKAGKTGPMKTLLVRVMTPDLRERLENLRKKPENIPQPISNTSRANLNKLLTDYTEMKKAILHVYWEEFQKDPVGLMSRVAQPASKKIDQNKLKPEMDEKGNLTTAGFACSQCGQPLFVYKLEQVSEKGKAYTNYFGRCNVAEHEKLILLSQLKPEKDSDEAVTYSLGKFGQRALDFYSIHVTKESTHPVKPLAQIAGNRYASYPVGKALSDACMGTIASFLSKYQDIIIEHQKVVKGNQKRLESLRELAGKENLEYPSVTLPPQPHTKEGVDAYNEVIARVRMWVNLNLWQKLKLSRDDAKPLLRLKGFPSFPLVERQANEVDWWDMVCNVKKLINEKKEDGKVFWQNLAGYKRQEALRPYLSSEEDRKKGKKFARYQLGDLLLHLEKKHGEDWGKVYDEAWERIDKKVEGLSKHIKLEEERRSEDAQSKAALTDWLRAKASFVIEGLKEADKDEFCRCELKLQKWYGDLRGKPFAIEAENSILDISGFSKQYNCAFIWQKDGVKKLNLYLIINYFKGGKLRFKKIKPEAFEANRFYTVINKKSGEIVPMEVNFNFDDPNLIILPLAFGKRQGREFIWNDLLSLETGSLKLANGRVIEKTLYNRRTRQDEPALFVALTFERREVLDSSNIKPMNLIGVDRGENIPAVIALTDPEGCPLSRFKDSLGNPTHILRIGESYKEKQRTIQAKKEVEQRRAGGYSRKYASKAKNLADDMVRNTARDLLYYAVTQDAMLIFENLSRGFGRQGKRTFMAERQYTRMEDWLTAKLAYNGLPSKTYLSKTLAQYTSKTCSNCGFTITSADYDRVLEKLKKTATGWMTTINGKELKVEGQITYYNRYKRQNVVKDLSVELDRLSEESVNNDISSWTKGRSGEALSLLKKRFSHRPVQEKFVCLNCGFETHADEQAALNIARSWLFLRSQEYKKYQTNKTTGNTDKRAFVETWQSFYRKKLKEVWKPAV

SEQ ID NO: 43247 - protein, 978 aa, synthetic construct
  REGION 1..978: note = engineered CasX variant
QEIKRINKIRRRLVKDSNTKKAGKTGPMKTLLVRVMTPDLRERLENLRKKPENIPQPISNTSRANLNKLLTDYTEMKKAILHVYWEEFQKDPVGLMSRVAQPASKKIDQNKLKPEMDEKGNLTTAGFACSQCGQPLFVYKLEQVSEKGKAYTNYFGRCNVAEHEKLILLSQLKPEKDSDEAVTYSLGKFGQRALDFYSIHVTKESTHPVKPLAQIAGNRYASHPVGKALSDACMGTIASFLSKYQDIIIEHQKVVKGNQKRLESLRELAGKENLEYPSVTLPPQPHTKEGVDAYNEVIARVRMWVNLNLWQKLKLSRDDAKPLLRLKGFPSFPLVERQANEVDWWDMVCNVKKLINEKKEDGKVFWQNLAGYKRQEALRPYLSSEEDRKKGKKFARYQLGDLLLHLEKKHGEDWGKVYDEAWERIDKKVEGLSKHIKLEEERRSEDAQSKAALTDWLRAKASFVIEGLKEADKDEFCRCELKLQKWYGDLRGKPFAIEAENSILDISGFSKQYNCAFIWQKDGVKKLNLYLIINYFKGGKLRFKKIKPEAFEANRFYTVINKKSGEIVPMEVNFNFDDPNLIILPLAFGKRQGREFIWNDLLSLETGSLKLANGRVIEKTLYNRRTRQDEPALFVALTFERREVLDSSNIKPMNLIGVDRGENIPAVIALTDPEGCPLSRFKDSLGNPTHILRIGESYKEKQRTIQAKKEVEQRRAGGYSRKYASKAKNLADDMVRNTARDLLYYAVTQDAMLIFENLSRGFGRQGKRTFMAERQYTRMEDWLTAKLAYNGLPSKTYLSKTLAQYTSKTCSNCGFTITSADYDRVLEKLKKTATGWMTTINGKELKVEGQITYYNRYKRQNVVKDLSVELDRLSEESVNNDISSWTKGRSGEALSLLKKRFSHRPVQEKFVCLNCGFETHADEQAALNIARSWLFLRSQEYKKYQTNKTTGNTDKRAFVETWQSFYRKKLKEVWKPAV

SEQ ID NO: 43248 - protein, 978 aa, synthetic construct
  REGION 1..978: note = engineered CasX variant
QEIKRINKIRRRLVKDSNTKKAGKTGPMKTLLVRVMTPDLRERLENLRKKPENIPQPISNTSRANLNKLLTDYTEMKKAILHVYWEEFQKDPVGLMSRVAQPASKKIDQNKLKPEMDEKGNLTTAGFACSQCGQPLFVYKLEQVSEKGKAYTNYFGRCNVAEHEKLILLSQLKPEKDSDEAVTYSLGKFGQRALDFYSIHVTKESTHPVKPLAQIAGNRYASSPVGKALSDACMGTIASFLSKYQDIIIEHQKVVKGNQKRLESLRELAGKENLEYPSVTLPPQPHTKEGVDAYNEVIARVRMWVNLNLWQKLKLSRDDAKPLLRLKGFPSFPLVERQANEVDWWDMVCNVKKLINEKKEDGKVFWQNLAGYKRQEALRPYLSSEEDRKKGKKFARYQLGDLLLHLEKKHGEDWGKVYDEAWERIDKKVEGLSKHIKLEEERRSEDAQSKAALTDWLRAKASFVIEGLKEADKDEFCRCELKLQKWYGDLRGKPFAIEAENSILDISGFSKQYNCAFIWQKDGVKKLNLYLIINYFKGGKLRFKKIKPEAFEANRFYTVINKKSGEIVPMEVNFNFDDPNLIILPLAFGKRQGREFIWNDLLSLETGSLKLANGRVIEKTLYNRRTRQDEPALFVALTFERREVLDSSNIKPMNLIGVDRGENIPAVIALTDPEGCPLSRFKDSLGNPTHILRIGESYKEKQRTIQAKKEVEQRRAGGYSRKYASKAKNLADDMVRNTARDLLYYAVTQDAMLIFENLSRGFGRQGKRTFMAERQYTRMEDWLTAKLAYNGLPSKTYLSKTLAQYTSKTCSNCGFTITSADYDRVLEKLKKTATGWMTTINGKELKVEGQITYYNRYKRQNVVKDLSVELDRLSEESVNNDISSWTKGRSGEALSLLKKRFSHRPVQEKFVCLNCGFETHADEQAALNIARSWLFLRSQEYKKYQTNKTTGNTDKRAFVETWQSFYRKKLKEVWKPAV

SEQ ID NO: 43249 - protein, 978 aa, synthetic construct
  REGION 1..978: note = engineered CasX variant
QEIKRINKIRRRLVKDSNTKKAGKTGPMKTLLVRVMTPDLRERLENLRKKPENIPQPISNTSRANLNKLLTDYTEMKKAILHVYWEEFQKDPVGLMSRVAQPASKKIDQNKLKPEMDEKGNLTTAGFACSQCGQPLFVYKLEQVSEKGKAYTNYFGRCNVAEHEKLILLSQLKPEKDSDEAVTYSLGKFGQRALDFYSIHVTKESTHPVKPLAQIAGNRYASTPVGKALSDACMGTIASFLSKYQDIIIEHQKVVKGNQKRLESLRELAGKENLEYPSVTLPPQPHTKEGVDAYNEVIARVRMWVNLNLWQKLKLSRDDAKPLLRLKGFPSFPLVERQANEVDWWDMVCNVKKLINEKKEDGKVFWQNLAGYKRQEALRPYLSSEEDRKKGKKFARYQLGDLLLHLEKKHGEDWGKVYDEAWERIDKKVEGLSKHIKLEEERRSEDAQSKAALTDWLRAKASFVIEGLKEADKDEFCRCELKLQKWYGDLRGKPFAIEAENSILDISGFSKQYNCAFIWQKDGVKKLNLYLIINYFKGGKLRFKKIKPEAFEANRFYTVINKKSGEIVPMEVNFNFDDPNLIILPLAFGKRQGREFIWNDLLSLETGSLKLANGRVIEKTLYNRRTRQDEPALFVALTFERREVLDSSNIKPMNLIGVDRGENIPAVIALTDPEGCPLSRFKDSLGNPTHILRIGESYKEKQRTIQAKKEVEQRRAGGYSRKYASKAKNLADDMVRNTARDLLYYAVTQDAMLIFENLSRGFGRQGKRTFMAERQYTRMEDWLTAKLAYNGLPSKTYLSKTLAQYTSKTCSNCGFTITSADYDRVLEKLKKTATGWMTTINGKELKVEGQITYYNRYKRQNVVKDLSVELDRLSEESVNNDISSWTKGRSGEALSLLKKRFSHRPVQEKFVCLNCGFETHADEQAALNIARSWLFLRSQEYKKYQTNKTTGNTDKRAFVETWQSFYRKKLKEVWKPAV

SEQ ID NO: 43250 - protein, 978 aa, synthetic construct
  REGION 1..978: note = engineered CasX variant
QEIKRINKIRRRLVKDSNTKKAGKTGPMKTLLVRVMTPDLRERLENLRKKPENIPQPISNTSRANLNKLLTDYTEMKKAILHVYWEEFQKDPVGLMSRVAQPASKKIDQNKLKPEMDEKGNLTTAGFACSQCGQPLFVYKLEQVSEKGKAYTNYFGRCNVAEHEKLILLSQLKPEKDSDEAVTYSLGKFGQRALDFYSIHVTKESTHPVKPLAQIAGNRYASAPVGKALSDACMGTIASFLSKYQDIIIEHQKVVKGNQKRLESLRELAGKENLEYPSVTLPPQPHTKEGVDAYNEVIARVRMWVNLNLWQKLKLSRDDAKPLLRLKGFPSFPLVERQANEVDWWDMVCNVKKLINEKKEDGKVFWQNLAGYKRQEALRPYLSSEEDRKKGKKFARYQLGDLLLHLEKKHGEDWGKVYDEAWERIDKKVEGLSKHIKLEEERRSEDAQSKAALTDWLRAKASFVIEGLKEADKDEFCRCELKLQKWYGDLRGKPFAIEAENSILDISGFSKQYNCAFIWQKDGVKKLNLYLIINYFKGGKLRFKKIKPEAFEANRFYTVINKKSGEIVPMEVNFNFDDPNLIILPLAFGKRQGREFIWNDLLSLETGSLKLANGRVIEKTLYNRRTRQDEPALFVALTFERREVLDSSNIKPMNLIGVDRGENIPAVIALTDPEGCPLSRFKDSLGNPTHILRIGESYKEKQRTIQAKKEVEQRRAGGYSRKYASKAKNLADDMVRNTARDLLYYAVTQDAMLIFENLSRGFGRQGKRTFMAERQYTRMEDWLTAKLAYNGLPSKTYLSKTLAQYTSKTCSNCGFTITSADYDRVLEKLKKTATGWMTTINGKELKVEGQITYYNRYKRQNVVKDLSVELDRLSEESVNNDISSWTKGRSGEALSLLKKRFSHRPVQEKFVCLNCGFETHADEQAALNIARSWLFLRSQEYKKYQTNKTTGNTDKRAFVETWQSFYRKKLKEVWKPAV

SEQ ID NO: 43251 - protein, 978 aa, synthetic construct
  REGION 1..978: note = engineered CasX variant
QEIKRINKIRRRLVKDSNTKKAGKTGPMKTLLVRVMTPDLRERLENLRKKPENIPQPISNTSRANLNKLLTDYTEMKKAILHVYWEEFQKDPVGLMSRVAQPASKKIDQNKLKPEMDEKGNLTTAGFACSQCGQPLFVYKLEQVSEKGKAYTNYFGRCNVAEHEKLILLSQLKPEKDSDEAVTYSLGKFGQRALDFYSIHVTKESTHPVKPLAQIAGNRYASVPVGKALSDACMGTIASFLSKYQDIIIEHQKVVKGNQKRLESLRELAGKENLEYPSVTLPPQPHTKEGVDAYNEVIARVRMWVNLNLWQKLKLSRDDAKPLLRLKGFPSFPLVERQANEVDWWDMVCNVKKLINEKKEDGKVFWQNLAGYKRQEALRPYLSSEEDRKKGKKFARYQLGDLLLHLEKKHGEDWGKVYDEAWERIDKKVEGLSKHIKLEEERRSEDAQSKAALTDWLRAKASFVIEGLKEADKDEFCRCELKLQKWYGDLRGKPFAIEAENSILDISGFSKQYNCAFIWQKDGVKKLNLYLIINYFKGGKLRFKKIKPEAFEANRFYTVINKKSGEIVPMEVNFNFDDPNLIILPLAFGKRQGREFIWNDLLSLETGSLKLANGRVIEKTLYNRRTRQDEPALFVALTFERREVLDSSNIKPMNLIGVDRGENIPAVIALTDPEGCPLSRFKDSLGNPTHILRIGESYKEKQRTIQAKKEVEQRRAGGYSRKYASKAKNLADDMVRNTARDLLYYAVTQDAMLIFENLSRGFGRQGKRTFMAERQYTRMEDWLTAKLAYNGLPSKTYLSKTLAQYTSKTCSNCGFTITSADYDRVLEKLKKTATGWMTTINGKELKVEGQITYYNRYKRQNVVKDLSVELDRLSEESVNNDISSWTKGRSGEALSLLKKRFSHRPVQEKFVCLNCGFETHADEQAALNIARSWLFLRSQEYKKYQTNKTTGNTDKRAFVETWQSFYRKKLKEVWKPAV

SEQ ID NO: 43252 - protein, 978 aa, synthetic construct
  REGION 1..978: note = engineered CasX variant
QEIKRINKIRRRLVKDSNTKKAGKTGPMKTLLVRVMTPDLRERLENLRKKPENIPQPISNTSRANLNKLLTDYTEMKKAILHVYWEEFQKDPVGLMSRVAQPASKKIDQNKLKPEMDEKGNLTTAGFACSQCGQPLFVYKLEQVSEKGKAYTNYFGRCNVAEHEKLIKLSQLKPEKDSDEAVTYSLGKFGQRALDFYSIHVTKESTHPVKPLAQIAGNRYASGPVGKALSDACMGTIASFLSKYQDIIIEHQKVVKGNQKRLESLRELAGKENLEYPSVTLPPQPHTKEGVDAYNEVIARVRMWVNLNLWQKLKLSRDDAKPLLRLKGFPSFPLVERQANEVDWWDMVCNVKKLINEKKEDGKVFWQNLAGYKRQEALRPYLSSEEDRKKGKKFARYQLGDLLLHLEKKHGEDWGKVYDEAWERIDKKVEGLSKHIKLEEERRSEDAQSKAALTDWLRAKASFVIEGLKEADKDEFCRCELKLQKWYGDLRGKPFAIEAENSILDISGFSKQYNCAFIWQKDGVKKLNLYLIINYFKGGKLRFKKIKPEAFEANRFYTVINKKSGEIVPMEVNFNFDDPNLIILPLAFGKRQGREFIWNDLLSLETGSLKLANGRVIEKTLYNRRTRQDEPALFVALTFERREVLDSSNIKPMNLIGVDRGENIPAVIALTDPEGCPLSRFKDSLGNPTHILRIGESYKEKQRTIQAKKEVEQRRAGGYSRKYASKAKNLADDMVRNTARDLLYYAVTQDAMLIFENLSRGFGRQGKRTFMAERQYTRMEDWLTAKLAYNGLPSKTYLSKTLAQYTSKTCSNCGFTITSADYDRVLEKLKKTATGWMTTINGKELKVEGQITYYNRYKRQNVVKDLSVELDRLSEESVNNDISSWTKGRSGEALSLLKKRFSHRPVQEKFVCLNCGFETHADEQAALNIARSWLFLRSQEYKKYQTNKTTGNTDKRAFVETWQSFYRKKLKEVWKPAV

SEQ ID NO: 43253 - protein, 977 aa, synthetic construct
  REGION 1..977: note = engineered CasX variant
QEIKRINKIRRRLVKDSNTKKAGKTGPMKTLLVRVMTPDLRERLENLRKKPENIPQPISNTSRANLNKLLTDYTEMKKAILHVYWEEFQKDPVGLMSRVAQPASKKIDQNKLKPEMDEKGNLTTAGFACSQCGQPLFVYKLEQVSEKGKAYTNYFGRCNVAEHEKLILLSQLKPEKDSDEAVTYSLGKFGQRALDFYSIHVTKESTHPVKPLAQIAGNRYASPVGKALSDACMGTIASFLSKYQDIIIEHQKVVKGNQKRLESLRELAGKENLEYPSVTLPPQPHTKEGVDAYNEVIARVRMWVNLNLWQKLKLSRDDAKPLLRLKGFPSFPLVERQANEVDWWDMVCNVKKLINEKKEDGKVFWQNLAGYKRQEALRPYLSSEEDRKKGKKFARYQLGDLLLHLEKKHGEDWGKVYDEAWERIDKKVEGLSKHIKLEEERRSEDAQSKAALTDWLRAKASFVIEGLKEADKDEFCRCELKLQKWYGDLRGKPFAIEAENSILDISGFSKQYNCAFIWQKDGVKKLNLYLIINYFKGGKLRFKKIKPEAFEANRFYTVINKKSGEIVPMEVNFNFDDPNLIILPLAFGKRQGREFIWNDLLSLETGSLKLANGRVIEKTLYNRRTRQDEPALFVALTFERREVLDSSNIKPMNLIGVDRGENIPAVIALTDPEGCPLSRFKDSLGNPTHILRIGESYKEKQRTIQAKKEVEQRRAGGYSRKYASKAKNLADDMVRNTARDLLYYAVTQDAMLIFENLSRGFGRQGKRTFMAERQYTRMEDWLTAKLAYNGLPSKTYLSKTLAQYTSKTCSNCGFTITSADYDRVLEKLKKTATGWMTTINGKELKVEGQITYYNRYKRQNVVKDLSVELDRLSEESVNNDISSWTKGRSGEALSLLKKRFSHRPVQEKFVCLNCGFETHADEQAALNIARSWLFLRSQEYKKYQTNKTTGNTDKRAFVETWQSFYRKKLKEVWKPAV

SEQ ID NO: 43254 - protein, 978 aa, synthetic construct
  REGION 1..978: note = engineered CasX variant
QEIKRINKIRRRLVKDSNTKKAGKTGPMKTLLVRVMTPDLRERLENLRKKPENIPQPISNTSRANLNKLLTDYTEMKKAILHVYWEEFQKDPVGLMSRVAQPASKKIDQNKLKPEMDEKGNLTTAGFACSQCGQPLFVYKLEQVSEKGKAYTNYFGRCNVAEHEKLIQLSQLKPEKDSDEAVTYSLGKFGQRALDFYSIHVTKESTHPVKPLAQIAGNRYASYPVGKALSDACMGTIASFLSKYQDIIIEHQKVVKGNQKRLESLRELAGKENLEYPSVTLPPQPHTKEGVDAYNEVIARVRMWVNLNLWQKLKLSRDDAKPLLRLKGFPSFPLVERQANEVDWWDMVCNVKKLINEKKEDGKVFWQNLAGYKRQEALRPYLSSEEDRKKGKKFARYQLGDLLLHLEKKHGEDWGKVYDEAWERIDKKVEGLSKHIKLEEERRSEDAQSKAALTDWLRAKASFVIEGLKEADKDEFCRCELKLQKWYGDLRGKPFAIEAENSILDISGFSKQYNCAFIWQKDGVKKLNLYLIINYFKGGKLRFKKIKPEAFEANRFYTVINKKSGEIVPMEVNFNFDDPNLIILPLAFGKRQGREFIWNDLLSLETGSLKLANGRVIEKTLYNRRTRQDEPALFVALTFERREVLDSSNIKPMNLIGVDRGENIPAVIALTDPEGCPLSRFKDSLGNPTHILRIGESYKEKQRTIQAKKEVEQRRAGGYSRKYASKAKNLADDMVRNTARDLLYYAVTQDAMLIFENLSRGFGRQGKRTFMAERQYTRMEDWLTAKLAYEGLPSKTYLSKTLAQYTSKTCSNCGFTITSADYDRVLEKLKKTATGWMTTINGKELKVEGQITYYNRYKRQNVVKDLSVELDRLSEESVNNDISSWTKGRSGEALSLLKKRFSHRPVQEKFVCLNCGFETHADEQAALNIARSWLFLRSQEYKKYQTNKTTGNTDKRAFVETWQSFYRKKLKEVWKPAV

SEQ ID NO: 43255 - protein, 978 aa, synthetic construct
  REGION 1..978: note = engineered CasX variant
QEIKRINKIRRRLVKDSNTKKAGKTGPMKTLLVRVMTPDLRERLENLRKKPENIPQPISNTSRANLNKLLTDYTEMKKAILHVYWEEFQKDPVGLMSRVAQPASKKIDQNKLKPEMDEKGNLTTAGFACSQCGQPLFVYKLEQVSEKGKAYTNYFGRCNVAEHEKLIQLSQLKPEKDSDEAVTYSLGKFGQRALDFYSIHVTKESTHPVKPLAQIAGNRYASHPVGKALSDACMGTIASFLSKYQDIIIEHQKVVKGNQKRLESLRELAGKENLEYPSVTLPPQPHTKEGVDAYNEVIARVRMWVNLNLWQKLKLSRDDAKPLLRLKGFPSFPLVERQANEVDWWDMVCNVKKLINEKKEDGKVFWQNLAGYKRQEALRPYLSSEEDRKKGKKFARYQLGDLLLHLEKKHGEDWGKVYDEAWERIDKKVEGLSKHIKLEEERRSEDAQSKAALTDWLRAKASFVIEGLKEADKDEFCRCELKLQKWYGDLRGKPFAIEAENSILDISGFSKQYNCAFIWQKDGVKKLNLYLIINYFKGGKLRFKKIKPEAFEANRFYTVINKKSGEIVPMEVNFNFDDPNLIILPLAFGKRQGREFIWNDLLSLETGSLKLANGRVIEKTLYNRRTRQDEPALFVALTFERREVLDSSNIKPMNLIGVDRGENIPAVIALTDPEGCPLSRFKDSLGNPTHILRIGESYKEKQRTIQAKKEVEQRRAGGYSRKYASKAKNLADDMVRNTARDLLYYAVTQDAMLIFENLSRGFGRQGKRTFMAERQYTRMEDWLTAKLAYEGLPSKTYLSKTLAQYTSKTCSNCGFTITSADYDRVLEKLKKTATGWMTTINGKELKVEGQITYYNRYKRQNVVKDLSVELDRLSEESVNNDISSWTKGRSGEALSLLKKRFSHRPVQEKFVCLNCGFETHADEQAALNIARSWLFLRSQEYKKYQTNKTTGNTDKRAFVETWQSFYRKKLKEVWKPAV

SEQ ID NO: 43256 - protein, 978 aa, synthetic construct
  REGION 1..978: note = engineered CasX variant
QEIKRINKIRRRLVKDSNTKKAGKTGPMKTLLVRVMTPDLRERLENLRKKPENIPQPISNTSRANLNKLLTDYTEMKKAILHVYWEEFQKDPVGLMSRVAQPASKKIDQNKLKPEMDEKGNLTTAGFACSQCGQPLFVYKLEQVSEKGKAYTNYFGRCNVAEHEKLIQLSQLKPEKDSDEAVTYSLGKFGQRALDFYSIHVTKESTHPVKPLAQIAGNRYASSPVGKALSDACMGTIASFLSKYQDIIIEHQKVVKGNQKRLESLRELAGKENLEYPSVTLPPQPHTKEGVDAYNEVIARVRMWVNLNLWQKLKLSRDDAKPLLRLKGFPSFPLVERQANEVDWWDMVCNVKKLINEKKEDGKVFWQNLAGYKRQEALRPYLSSEEDRKKGKKFARYQLGDLLLHLEKKHGEDWGKVYDEAWERIDKKVEGLSKHIKLEEERRSEDAQSKAALTDWLRAKASFVIEGLKEADKDEFCRCELKLQKWYGDLRGKPFAIEAENSILDISGFSKQYNCAFIWQKDGVKKLNLYLIINYFKGGKLRFKKIKPEAFEANRFYTVINKKSGEIVPMEVNFNFDDPNLIILPLAFGKRQGREFIWNDLLSLETGSLKLANGRVIEKTLYNRRTRQDEPALFVALTFERREVLDSSNIKPMNLIGVDRGENIPAVIALTDPEGCPLSRFKDSLGNPTHILRIGESYKEKQRTIQAKKEVEQRRAGGYSRKYASKAKNLADDMVRNTARDLLYYAVTQDAMLIFENLSRGFGRQGKRTFMAERQYTRMEDWLTAKLAYEGLPSKTYLSKTLAQYTSKTCSNCGFTITSADYDRVLEKLKKTATGWMTTINGKELKVEGQITYYNRYKRQNVVKDLSVELDRLSEESVNNDISSWTKGRSGEALSLLKKRFSHRPVQEKFVCLNCGFETHADEQAALNIARSWLFLRSQEYKKYQTNKTTGNTDKRAFVETWQSFYRKKLKEVWKPAV

SEQ ID NO: 43257 - protein, 978 aa, synthetic construct
  REGION 1..978: note = engineered CasX variant
QEIKRINKIRRRLVKDSNTKKAGKTGPMKTLLVRVMTPDLRERLENLRKKPENIPQPISNTSRANLNKLLTDYTEMKKAILHVYWEEFQKDPVGLMSRVAQPASKKIDQNKLKPEMDEKGNLTTAGFACSQCGQPLFVYKLEQVSEKGKAYTNYFGRCNVAEHEKLIQLSQLKPEKDSDEAVTYSLGKFGQRALDFYSIHVTKESTHPVKPLAQIAGNRYASTPVGKALSDACMGTIASFLSKYQDIIIEHQKVVKGNQKRLESLRELAGKENLEYPSVTLPPQPHTKEGVDAYNEVIARVRMWVNLNLWQKLKLSRDDAKPLLRLKGFPSFPLVERQANEVDWWDMVCNVKKLINEKKEDGKVFWQNLAGYKRQEALRPYLSSEEDRKKGKKFARYQLGDLLLHLEKKHGEDWGKVYDEAWERIDKKVEGLSKHIKLEEERRSEDAQSKAALTDWLRAKASFVIEGLKEADKDEFCRCELKLQKWYGDLRGKPFAIEAENSILDISGFSKQYNCAFIWQKDGVKKLNLYLIINYFKGGKLRFKKIKPEAFEANRFYTVINKKSGEIVPMEVNFNFDDPNLIILPLAFGKRQGREFIWNDLLSLETGSLKLANGRVIEKTLYNRRTRQDEPALFVALTFERREVLDSSNIKPMNLIGVDRGENIPAVIALTDPEGCPLSRFKDSLGNPTHILRIGESYKEKQRTIQAKKEVEQRRAGGYSRKYASKAKNLADDMVRNTARDLLYYAVTQDAMLIFENLSRGFGRQGKRTFMAERQYTRMEDWLTAKLAYEGLPSKTYLSKTLAQYTSKTCSNCGFTITSADYDRVLEKLKKTATGWMTTINGKELKVEGQITYYNRYKRQNVVKDLSVELDRLSEESVNNDISSWTKGRSGEALSLLKKRFSHRPVQEKFVCLNCGFETHADEQAALNIARSWLFLRSQEYKKYQTNKTTGNTDKRAFVETWQSFYRKKLKEVWKPAV

SEQ ID NO: 43258 - protein, 978 aa, synthetic construct
  REGION 1..978: note = engineered CasX variant
QEIKRINKIRRRLVKDSNTKKAGKTGPMKTLLVRVMTPDLRERLENLRKKPENIPQPISNTSRANLNKLLTDYTEMKKAILHVYWEEFQKDPVGLMSRVAQPASKKIDQNKLKPEMDEKGNLTTAGFACSQCGQPLFVYKLEQVSEKGKAYTNYFGRCNVAEHEKLIQLSQLKPEKDSDEAVTYSLGKFGQRALDFYSIHVTKESTHPVKPLAQIAGNRYASAPVGKALSDACMGTIASFLSKYQDIIIEHQKVVKGNQKRLESLRELAGKENLEYPSVTLPPQPHTKEGVDAYNEVIARVRMWVNLNLWQKLKLSRDDAKPLLRLKGFPSFPLVERQANEVDWWDMVCNVKKLINEKKEDGKVFWQNLAGYKRQEALRPYLSSEEDRKKGKKFARYQLGDLLLHLEKKHGEDWGKVYDEAWERIDKKVEGLSKHIKLEEERRSEDAQSKAALTDWLRAKASFVIEGLKEADKDEFCRCELKLQKWYGDLRGKPFAIEAENSILDISGFSKQYNCAFIWQKDGVKKLNLYLIINYFKGGKLRFKKIKPEAFEANRFYTVINKKSGEIVPMEVNFNFDDPNLIILPLAFGKRQGREFIWNDLLSLETGSLKLANGRVIEKTLYNRRTRQDEPALFVALTFERREVLDSSNIKPMNLIGVDRGENIPAVIALTDPEGCPLSRFKDSLGNPTHILRIGESYKEKQRTIQAKKEVEQRRAGGYSRKYASKAKNLADDMVRNTARDLLYYAVTQDAMLIFENLSRGFGRQGKRTFMAERQYTRMEDWLTAKLAYEGLPSKTYLSKTLAQYTSKTCSNCGFTITSADYDRVLEKLKKTATGWMTTINGKELKVEGQITYYNRYKRQNVVKDLSVELDRLSEESVNNDISSWTKGRSGEALSLLKKRFSHRPVQEKFVCLNCGFETHADEQAALNIARSWLFLRSQEYKKYQTNKTTGNTDKRAFVETWQSFYRKKLKEVWKPAV

SEQ ID NO: 43259 - protein, 978 aa, synthetic construct
  REGION 1..978: note = engineered CasX variant
QEIKRINKIRRRLVKDSNTKKAGKTGPMKTLLVRVMTPDLRERLENLRKKPENIPQPISNTSRANLNKLLTDYTEMKKAILHVYWEEFQKDPVGLMSRVAQPASKKIDQNKLKPEMDEKGNLTTAGFACSQCGQPLFVYKLEQVSEKGKAYTNYFGRCNVAEHEKLIQLSQLKPEKDSDEAVTYSLGKFGQRALDFYSIHVTKESTHPVKPLAQIAGNRYASVPVGKALSDACMGTIASFLSKYQDIIIEHQKVVKGNQKRLESLRELAGKENLEYPSVTLPPQPHTKEGVDAYNEVIARVRMWVNLNLWQKLKLSRDDAKPLLRLKGFPSFPLVERQANEVDWWDMVCNVKKLINEKKEDGKVFWQNLAGYKRQEALRPYLSSEEDRKKGKKFARYQLGDLLLHLEKKHGEDWGKVYDEAWERIDKKVEGLSKHIKLEEERRSEDAQSKAALTDWLRAKASFVIEGLKEADKDEFCRCELKLQKWYGDLRGKPFAIEAENSILDISGFSKQYNCAFIWQKDGVKKLNLYLIINYFKGGKLRFKKIKPEAFEANRFYTVINKKSGEIVPMEVNFNFDDPNLIILPLAFGKRQGREFIWNDLLSLETGSLKLANGRVIEKTLYNRRTRQDEPALFVALTFERREVLDSSNIKPMNLIGVDRGENIPAVIALTDPEGCPLSRFKDSLGNPTHILRIGESYKEKQRTIQAKKEVEQRRAGGYSRKYASKAKNLADDMVRNTARDLLYYAVTQDAMLIFENLSRGFGRQGKRTFMAERQYTRMEDWLTAKLAYEGLPSKTYLSKTLAQYTSKTCSNCGFTITSADYDRVLEKLKKTATGWMTTINGKELKVEGQITYYNRYKRQNVVKDLSVELDRLSEESVNNDISSWTKGRSGEALSLLKKRFSHRPVQEKFVCLNCGFETHADEQAALNIARSWLFLRSQEYKKYQTNKTTGNTDKRAFVETWQSFYRKKLKEVWKPAV

SEQ ID NO: 43260 - protein, 979 aa, synthetic construct
  REGION 1..979: note = engineered CasX variant
QEIKRINKIRRRLVKDSNTKKAGKTGPMKTLLVRVMTPDLRERLENLRKKPENIPQPISNTSRANLNKLLTDYTEMKKAILHVYWEEFQKDPVGLMSRVAQPASKKIDQNKLKPEMDEKGNLTTAGFACSQCGQPLFVYKLEQVSEKGKAYTNYFGRCNVAEHEKLIQKLSQLKPEKDSDEAVTYSLGKFGQRALDFYSIHVTKESTHPVKPLAQIAGNRYASGPVGKALSDACMGTIASFLSKYQDIIIEHQKVVKGNQKRLESLRELAGKENLEYPSVTLPPQPHTKEGVDAYNEVIARVRMWVNLNLWQKLKLSRDDAKPLLRLKGFPSFPLVERQANEVDWWDMVCNVKKLINEKKEDGKVFWQNLAGYKRQEALRPYLSSEEDRKKGKKFARYQLGDLLLHLEKKHGEDWGKVYDEAWERIDKKVEGLSKHIKLEEERRSEDAQSKAALTDWLRAKASFVIEGLKEADKDEFCRCELKLQKWYGDLRGKPFAIEAENSILDISGFSKQYNCAFIWQKDGVKKLNLYLIINYFKGGKLRFKKIKPEAFEANRFYTVINKKSGEIVPMEVNFNFDDPNLIILPLAFGKRQGREFIWNDLLSLETGSLKLANGRVIEKTLYNRRTRQDEPALFVALTFERREVLDSSNIKPMNLIGVDRGENIPAVIALTDPEGCPLSRFKDSLGNPTHILRIGESYKEKQRTIQAKKEVEQRRAGGYSRKYASKAKNLADDMVRNTARDLLYYAVTQDAMLIFENLSRGFGRQGKRTFMAERQYTRMEDWLTAKLAYEGLPSKTYLSKTLAQYTSKTCSNCGFTITSADYDRVLEKLKKTATGWMTTINGKELKVEGQITYYNRYKRQNVVKDLSVELDRLSEESVNNDISSWTKGRSGEALSLLKKRFSHRPVQEKFVCLNCGFETHADEQAALNIARSWLFLRSQEYKKYQTNKTTGNTDKRAFVETWQSFYRKKLKEVWKPAV

SEQ ID NO: 43261 - protein, 977 aa, synthetic construct
  REGION 1..977: note = engineered CasX variant
QEIKRINKIRRRLVKDSNTKKAGKTGPMKTLLVRVMTPDLRERLENLRKKPENIPQPISNTSRANLNKLLTDYTEMKKAILHVYWEEFQKDPVGLMSRVAQPASKKIDQNKLKPEMDEKGNLTTAGFACSQCGQPLFVYKLEQVSEKGKAYTNYFGRCNVAEHEKLIQLSQLKPEKDSDEAVTYSLGKFGQRALDFYSIHVTKESTHPVKPLAQIAGNRYASPVGKALSDACMGTIASFLSKYQDIIIEHQKVVKGNQKRLESLRELAGKENLEYPSVTLPPQPHTKEGVDAYNEVIARVRMWVNLNLWQKLKLSRDDAKPLLRLKGFPSFPLVERQANEVDWWDMVCNVKKLINEKKEDGKVFWQNLAGYKRQEALRPYLSSEEDRKKGKKFARYQLGDLLLHLEKKHGEDWGKVYDEAWERIDKKVEGLSKHIKLEEERRSEDAQSKAALTDWLRAKASFVIEGLKEADKDEFCRCELKLQKWYGDLRGKPFAIEAENSILDISGFSKQYNCAFIWQKDGVKKLNLYLIINYFKGGKLRFKKIKPEAFEANRFYTVINKKSGEIVPMEVNFNFDDPNLIILPLAFGKRQGREFIWNDLLSLETGSLKLANGRVIEKTLYNRRTRQDEPALFVALTFERREVLDSSNIKPMNLIGVDRGENIPAVIALTDPEGCPLSRFKDSLGNPTHILRIGESYKEKQRTIQAKKEVEQRRAGGYSRKYASKAKNLADDMVRNTARDLLYYAVTQDAMLIFENLSRGFGRQGKRTFMAERQYTRMEDWLTAKLAYEGLPSKTYLSKTLAQYTSKTCSNCGFTITSADYDRVLEKLKKTATGWMTTINGKELKVEGQITYYNRYKRQNVVKDLSVELDRLSEESVNNDISSWTKGRSGEALSLLKKRFSHRPVQEKFVCLNCGFETHADEQAALNIARSWLFLRSQEYKKYQTNKTTGNTDKRAFVETWQSFYRKKLKEVWKPAV

SEQ ID NO: 43262 - protein, 978 aa, synthetic construct
  REGION 1..978: note = engineered CasX variant
QEIKRINKIRRRLVKDSNTKKAGKTGPMKTLLVRVMTPDLRERLENLRKKPENIPQPISNTSRANLNKLLTDYTEMKKAILHVYWEEFQKDPVGLMSRVAQPASKKIDQNKLKPEMDEKGNLTTAGFACSQCGQPLFVYKLEQVSEKGKAYTNYFGRCNVAEHEKLILLSQLKPEKDSDEAVTYSLGKFGQRALDFYSIHVTKESTHPVKPLAQIAGNRYASYPVGKALSDACMGTIASFLSKYQDIIIEHQKVVKGNQKRLESLRELAGKENLEYPSVTLPPQPHTKEGVDAYNEVIARVRMWVNLNLWQKLKLSRDDAKPLLRLKGFPSFPLVERQANEVDWWDMVCNVKKLINEKKEDGKVFWQNLAIYKRQEALRPYLSSEEDRKKGKKFARYQLGDLLLHLEKKHGEDWGKVYDEAWERIDKKVEGLSKHIKLEEERRSEDAQSKAALTDWLRAKASFVIEGLKEADKDEFCRCELKLQKWYGDLRGKPFAIEAENSILDISGFSKQYNCAFIWQKDGVKKLNLYLIINYFKGGKLRFKKIKPEAFEANRFYTVINKKSGEIVPMEVNFNFDDPNLIILPLAFGKRQGREFIWNDLLSLETGSLKLANGRVIEKTLYNRRTRQDEPALFVALTFERREVLDSSNIKPMNLIGVDRGENIPAVIALTDPEGCPLSRFKDSLGNPTHILRIGESYKEKQRTIQAKKEVEQRRAGGYSRKYASKAKNLADDMVRNTARDLLYYAVTQDAMLIFENLSRGFGRQGKRTFMAERQYTRMEDWLTAKLAYEGLPSKTYLSKTLAQYTSKTCSNCGFTITSADYDRVLEKLKKTATGWMTTINGKELKVEGQITYYNRYKRQNVVKDLSVELDRLSEESVNNDISSWTKGRSGEALSLLKKRFSHRPVQEKFVCLNCGFETHADEQAALNIARSWLFLRSQEYKKYQTNKTTGNTDKRAFVETWQSFYRKKLKEVWKPAV

SEQ ID NO: 43263 - protein, 978 aa, synthetic construct
  REGION 1..978: note = engineered CasX variant
QEIKRINKIRRRLVKDSNTKKAGKTGPMKTLLVRVMTPDLRERLENLRKKPENIPQPISNTSRANLNKLLTDYTEMKKAILHVYWEEFQKDPVGLMSRVAQPASKKIDQNKLKPEMDEKGNLTTAGFACSQCGQPLFVYKLEQVSEKGKAYTNYFGRCNVAEHEKLILLSQLKPEKDSDEAVTYSLGKFGQRALDFYSIHVTKESTHPVKPLAQIAGNRYASHPVGKALSDACMGTIASFLSKYQDIIIEHQKVVKGNQKRLESLRELAGKENLEYPSVTLPPQPHTKEGVDAYNEVIARVRMWVNLNLWQKLKLSRDDAKPLLRLKGFPSFPLVERQANEVDWWDMVCNVKKLINEKKEDGKVFWQNLAIYKRQEALRPYLSSEEDRKKGKKFARYQLGDLLLHLEKKHGEDWGKVYDEAWERIDKKVEGLSKHIKLEEERRSEDAQSKAALTDWLRAKASFVIEGLKEADKDEFCRCELKLQKWYGDLRGKPFAIEAENSILDISGFSKQYNCAFIWQKDGVKKLNLYLIINYFKGGKLRFKKIKPEAFEANRFYTVINKKSGEIVPMEVNFNFDDPNLIILPLAFGKRQGREFIWNDLLSLETGSLKLANGRVIEKTLYNRRTRQDEPALFVALTFERREVLDSSNIKPMNLIGVDRGENIPAVIALTDPEGCPLSRFKDSLGNPTHILRIGESYKEKQRTIQAKKEVEQRRAGGYSRKYASKAKNLADDMVRNTARDLLYYAVTQDAMLIFENLSRGFGRQGKRTFMAERQYTRMEDWLTAKLAYEGLPSKTYLSKTLAQYTSKTCSNCGFTITSADYDRVLEKLKKTATGWMTTINGKELKVEGQITYYNRYKRQNVVKDLSVELDRLSEESVNNDISSWTKGRSGEALSLLKKRFSHRPVQEKFVCLNCGFETHADEQAALNIARSWLFLRSQEYKKYQTNKTTGNTDKRAFVETWQSFYRKKLKEVWKPAV

SEQ ID NO: 43264 - protein, 978 aa, synthetic construct
  REGION 1..978: note = engineered CasX variant
QEIKRINKIRRRLVKDSNTKKAGKTGPMKTLLVRVMTPDLRERLENLRKKPENIPQPISNTSRANLNKLLTDYTEMKKAILHVYWEEFQKDPVGLMSRVAQPASKKIDQNKLKPEMDEKGNLTTAGFACSQCGQPLFVYKLEQVSEKGKAYTNYFGRCNVAEHEKLILLSQLKPEKDSDEAVTYSLGKFGQRALDFYSIHVTKESTHPVKPLAQIAGNRYASSPVGKALSDACMGTIASFLSKYQDIIIEHQKVVKGNQKRLESLRELAGKENLEYPSVTLPPQPHTKEGVDAYNEVIARVRMWVNLNLWQKLKLSRDDAKPLLRLKGFPSFPLVERQANEVDWWDMVCNVKKLINEKKEDGKVFWQNLAIYKRQEALRPYLSSEEDRKKGKKFARYQLGDLLLHLEKKHGEDWGKVYDEAWERIDKKVEGLSKHIKLEEERRSEDAQSKAALTDWLRAKASFVIEGLKEADKDEFCRCELKLQKWYGDLRGKPFAIEAENSILDISGFSKQYNCAFIWQKDGVKKLNLYLIINYFKGGKLRFKKIKPEAFEANRFYTVINKKSGEIVPMEVNFNFDDPNLIILPLAFGKRQGREFIWNDLLSLETGSLKLANGRVIEKTLYNRRTRQDEPALFVALTFERREVLDSSNIKPMNLIGVDRGENIPAVIALTDPEGCPLSRFKDSLGNPTHILRIGESYKEKQRTIQAKKEVEQRRAGGYSRKYASKAKNLADDMVRNTARDLLYYAVTQDAMLIFENLSRGFGRQGKRTFMAERQYTRMEDWLTAKLAYEGLPSKTYLSKTLAQYTSKTCSNCGFTITSADYDRVLEKLKKTATGWMTTINGKELKVEGQITYYNRYKRQNVVKDLSVELDRLSEESVNNDISSWTKGRSGEALSLLKKRFSHRPVQEKFVCLNCGFETHADEQAALNIARSWLFLRSQEYKKYQTNKTTGNTDKRAFVETWQSFYRKKLKEVWKPAV

SEQ ID NO: 43265 - protein, 978 aa, synthetic construct
  REGION 1..978: note = engineered CasX variant
QEIKRINKIRRRLVKDSNTKKAGKTGPMKTLLVRVMTPDLRERLENLRKKPENIPQPISNTSRANLNKLLTDYTEMKKAILHVYWEEFQKDPVGLMSRVAQPASKKIDQNKLKPEMDEKGNLTTAGFACSQCGQPLFVYKLEQVSEKGKAYTNYFGRCNVAEHEKLILLSQLKPEKDSDEAVTYSLGKFGQRALDFYSIHVTKESTHPVKPLAQIAGNRYASTPVGKALSDACMGTIASFLSKYQDIIIEHQKVVKGNQKRLESLRELAGKENLEYPSVTLPPQPHTKEGVDAYNEVIARVRMWVNLNLWQKLKLSRDDAKPLLRLKGFPSFPLVERQANEVDWWDMVCNVKKLINEKKEDGKVFWQNLAIYKRQEALRPYLSSEEDRKKGKKFARYQLGDLLLHLEKKHGEDWGKVYDEAWERIDKKVEGLSKHIKLEEERRSEDAQSKAALTDWLRAKASFVIEGLKEADKDEFCRCELKLQKWYGDLRGKPFAIEAENSILDISGFSKQYNCAFIWQKDGVKKLNLYLIINYFKGGKLRFKKIKPEAFEANRFYTVINKKSGEIVPMEVNFNFDDPNLIILPLAFGKRQGREFIWNDLLSLETGSLKLANGRVIEKTLYNRRTRQDEPALFVALTFERREVLDSSNIKPMNLIGVDRGENIPAVIALTDPEGCPLSRFKDSLGNPTHILRIGESYKEKQRTIQAKKEVEQRRAGGYSRKYASKAKNLADDMVRNTARDLLYYAVTQDAMLIFENLSRGFGRQGKRTFMAERQYTRMEDWLTAKLAYEGLPSKTYLSKTLAQYTSKTCSNCGFTITSADYDRVLEKLKKTATGWMTTINGKELKVEGQITYYNRYKRQNVVKDLSVELDRLSEESVNNDISSWTKGRSGEALSLLKKRFSHRPVQEKFVCLNCGFETHADEQAALNIARSWLFLRSQEYKKYQTNKTTGNTDKRAFVETWQSFYRKKLKEVWKPAV

SEQ ID NO: 43266 - protein, 978 aa, synthetic construct
  REGION 1..978: note = engineered CasX variant
QEIKRINKIRRRLVKDSNTKKAGKTGPMKTLLVRVMTPDLRERLENLRKKPENIPQPISNTSRANLNKLLTDYTEMKKAILHVYWEEFQKDPVGLMSRVAQPASKKIDQNKLKPEMDEKGNLTTAGFACSQCGQPLFVYKLEQVSEKGKAYTNYFGRCNVAEHEKLILLSQLKPEKDSDEAVTYSLGKFGQRALDFYSIHVTKESTHPVKPLAQIAGNRYASAPVGKALSDACMGTIASFLSKYQDIIIEHQKVVKGNQKRLESLRELAGKENLEYPSVTLPPQPHTKEGVDAYNEVIARVRMWVNLNLWQKLKLSRDDAKPLLRLKGFPSFPLVERQANEVDWWDMVCNVKKLINEKKEDGKVFWQNLAIYKRQEALRPYLSSEEDRKKGKKFARYQLGDLLLHLEKKHGEDWGKVYDEAWERIDKKVEGLSKHIKLEEERRSEDAQSKAALTDWLRAKASFVIEGLKEADKDEFCRCELKLQKWYGDLRGKPFAIEAENSILDISGFSKQYNCAFIWQKDGVKKLNLYLIINYFKGGKLRFKKIKPEAFEANRFYTVINKKSGEIVPMEVNFNFDDPNLIILPLAFGKRQGREFIWNDLLSLETGSLKLANGRVIEKTLYNRRTRQDEPALFVALTFERREVLDSSNIKPMNLIGVDRGENIPAVIALTDPEGCPLSRFKDSLGNPTHILRIGESYKEKQRTIQAKKEVEQRRAGGYSRKYASKAKNLADDMVRNTARDLLYYAVTQDAMLIFENLSRGFGRQGKRTFMAERQYTRMEDWLTAKLAYEGLPSKTYLSKTLAQYTSKTCSNCGFTITSADYDRVLEKLKKTATGWMTTINGKELKVEGQITYYNRYKRQNVVKDLSVELDRLSEESVNNDISSWTKGRSGEALSLLKKRFSHRPVQEKFVCLNCGFETHADEQAALNIARSWLFLRSQEYKKYQTNKTTGNTDKRAFVETWQSFYRKKLKEVWKPAV

SEQ ID NO: 43267 - protein, 978 aa, synthetic construct
  REGION 1..978: note = engineered CasX variant
QEIKRINKIRRRLVKDSNTKKAGKTGPMKTLLVRVMTPDLRERLENLRKKPENIPQPISNTSRANLNKLLTDYTEMKKAILHVYWEEFQKDPVGLMSRVAQPASKKIDQNKLKPEMDEKGNLTTAGFACSQCGQPLFVYKLEQVSEKGKAYTNYFGRCNVAEHEKLILLSQLKPEKDSDEAVTYSLGKFGQRALDFYSIHVTKESTHPVKPLAQIAGNRYASVPVGKALSDACMGTIASFLSKYQDIIIEHQKVVKGNQKRLESLRELAGKENLEYPSVTLPPQPHTKEGVDAYNEVIARVRMWVNLNLWQKLKLSRDDAKPLLRLKGFPSFPLVERQANEVDWWDMVCNVKKLINEKKEDGKVFWQNLAIYKRQEALRPYLSSEEDRKKGKKFARYQLGDLLLHLEKKHGEDWGKVYDEAWERIDKKVEGLSKHIKLEEERRSEDAQSKAALTDWLRAKASFVIEGLKEADKDEFCRCELKLQKWYGDLRGKPFAIEAENSILDISGFSKQYNCAFIWQKDGVKKLNLYLIINYFKGGKLRFKKIKPEAFEANRFYTVINKKSGEIVPMEVNFNFDDPNLIILPLAFGKRQGREFIWNDLLSLETGSLKLANGRVIEKTLYNRRTRQDEPALFVALTFERREVLDSSNIKPMNLIGVDRGENIPAVIALTDPEGCPLSRFKDSLGNPTHILRIGESYKEKQRTIQAKKEVEQRRAGGYSRKYASKAKNLADDMVRNTARDLLYYAVTQDAMLIFENLSRGFGRQGKRTFMAERQYTRMEDWLTAKLAYEGLPSKTYLSKTLAQYTSKTCSNCGFTITSADYDRVLEKLKKTATGWMTTINGKELKVEGQITYYNRYKRQNVVKDLSVELDRLSEESVNNDISSWTKGRSGEALSLLKKRFSHRPVQEKFVCLNCGFETHADEQAALNIARSWLFLRSQEYKKYQTNKTTGNTDKRAFVETWQSFYRKKLKEVWKPAV

SEQ ID NO: 43268 - protein, 978 aa, synthetic construct
  REGION 1..978: note = engineered CasX variant
QEIKRINKIRRRLVKDSNTKKAGKTGPMKTLLVRVMTPDLRERLENLRKKPENIPQPISNTSRANLNKLLTDYTEMKKAILHVYWEEFQKDPVGLMSRVAQPASKKIDQNKLKPEMDEKGNLTTAGFACSQCGQPLFVYKLEQVSEKGKAYTNYFGRCNVAEHEKLIKLSQLKPEKDSDEAVTYSLGKFGQRALDFYSIHVTKESTHPVKPLAQIAGNRYASGPVGKALSDACMGTIASFLSKYQDIIIEHQKVVKGNQKRLESLRELAGKENLEYPSVTLPPQPHTKEGVDAYNEVIARVRMWVNLNLWQKLKLSRDDAKPLLRLKGFPSFPLVERQANEVDWWDMVCNVKKLINEKKEDGKVFWQNLAIYKRQEALRPYLSSEEDRKKGKKFARYQLGDLLLHLEKKHGEDWGKVYDEAWERIDKKVEGLSKHIKLEEERRSEDAQSKAALTDWLRAKASFVIEGLKEADKDEFCRCELKLQKWYGDLRGKPFAIEAENSILDISGFSKQYNCAFIWQKDGVKKLNLYLIINYFKGGKLRFKKIKPEAFEANRFYTVINKKSGEIVPMEVNFNFDDPNLIILPLAFGKRQGREFIWNDLLSLETGSLKLANGRVIEKTLYNRRTRQDEPALFVALTFERREVLDSSNIKPMNLIGVDRGENIPAVIALTDPEGCPLSRFKDSLGNPTHILRIGESYKEKQRTIQAKKEVEQRRAGGYSRKYASKAKNLADDMVRNTARDLLYYAVTQDAMLIFENLSRGFGRQGKRTFMAERQYTRMEDWLTAKLAYEGLPSKTYLSKTLAQYTSKTCSNCGFTITSADYDRVLEKLKKTATGWMTTINGKELKVEGQITYYNRYKRQNVVKDLSVELDRLSEESVNNDISSWTKGRSGEALSLLKKRFSHRPVQEKFVCLNCGFETHADEQAALNIARSWLFLRSQEYKKYQTNKTTGNTDKRAFVETWQSFYRKKLKEVWKPAV

SEQ ID NO: 43269 - protein, 977 aa, synthetic construct
  REGION 1..977: note = engineered CasX variant
QEIKRINKIRRRLVKDSNTKKAGKTGPMKTLLVRVMTPDLRERLENLRKKPENIPQPISNTSRANLNKLLTDYTEMKKAILHVYWEEFQKDPVGLMSRVAQPASKKIDQNKLKPEMDEKGNLTTAGFACSQCGQPLFVYKLEQVSEKGKAYTNYFGRCNVAEHEKLILLSQLKPEKDSDEAVTYSLGKFGQRALDFYSIHVTKESTHPVKPLAQIAGNRYASPVGKALSDACMGTIASFLSKYQDIIIEHQKVVKGNQKRLESLRELAGKENLEYPSVTLPPQPHTKEGVDAYNEVIARVRMWVNLNLWQKLKLSRDDAKPLLRLKGFPSFPLVERQANEVDWWDMVCNVKKLINEKKEDGKVFWQNLAIYKRQEALRPYLSSEEDRKKGKKFARYQLGDLLLHLEKKHGEDWGKVYDEAWERIDKKVEGLSKHIKLEEERRSEDAQSKAALTDWLRAKASFVIEGLKEADKDEFCRCELKLQKWYGDLRGKPFAIEAENSILDISGFSKQYNCAFIWQKDGVKKLNLYLIINYFKGGKLRFKKIKPEAFEANRFYTVINKKSGEIVPMEVNFNFDDPNLIILPLAFGKRQGREFIWNDLLSLETGSLKLANGRVIEKTLYNRRTRQDEPALFVALTFERREVLDSSNIKPMNLIGVDRGENIPAVIALTDPEGCPLSRFKDSLGNPTHILRIGESYKEKQRTIQAKKEVEQRRAGGYSRKYASKAKNLADDMVRNTARDLLYYAVTQDAMLIFENLSRGFGRQGKRTFMAERQYTRMEDWLTAKLAYEGLPSKTYLSKTLAQYTSKTCSNCGFTITSADYDRVLEKLKKTATGWMTTINGKELKVEGQITYYNRYKRQNVVKDLSVELDRLSEESVNNDISSWTKGRSGEALSLLKKRFSHRPVQEKFVCLNCGFETHADEQAALNIARSWLFLRSQEYKKYQTNKTTGNTDKRAFVETWQSFYRKKLKEVWKPAV

SEQ ID NO: 43270 - protein, 978 aa, synthetic construct
  REGION 1..978: note = engineered CasX variant
QEIKRINKIRRRLVKDSNTKKAGKTGPMKTLLVRVMTPDLRERLENLRKKPENIPQPISNTSRANLNKLLTDYTEMKKAILHVYWEEFQKDPVGLMSRVAQPASKKIDQNKLKPEMDEKGNLTTAGFACSQCGQPLFVYKLEQVSEKGKAYTNYFGRCNVAEHEKLILLSQLKPEKDSDEAVTYSLGKFGQRALDFYSIHVTKESTHPVKPLAQIAGNRYASYPVGKALSDACMGTIASFLSKYQDIIIEHQKVVKGNQKRLESLRELAGKENLEYPSVTLPPQPHTKEGVDAYNEVIARVRMWVNLNLWQKLKLSRDDAKPLLRLKGFPSFPLVERQANEVDWWDMVCNVKKLINEKKEDGKVFWQNLAGYKRQEALRPYLSSEEDREKGKKFARYQLGDLLLHLEKKHGEDWGKVYDEAWERIDKKVEGLSKHIKLEEERRSEDAQSKAALTDWLRAKASFVIEGLKEADKDEFCRCELKLQKWYGDLRGKPFAIEAENSILDISGFSKQYNCAFIWQKDGVKKLNLYLIINYFKGGKLRFKKIKPEAFEANRFYTVINKKSGEIVPMEVNFNFDDPNLIILPLAFGKRQGREFIWNDLLSLETGSLKLANGRVIEKTLYNRRTRQDEPALFVALTFERREVLDSSNIKPMNLIGVDRGENIPAVIALTDPEGCPLSRFKDSLGNPTHILRIGESYKEKQRTIQAKKEVEQRRAGGYSRKYASKAKNLADDMVRNTARDLLYYAVTQDAMLIFENLSRGFGRQGKRTFMAERQYTRMEDWLTAKLAYEGLPSKTYLSKTLAQYTSKTCSNCGFTITSADYDRVLEKLKKTATGWMTTINGKELKVEGQITYYNRYKRQNVVKDLSVELDRLSEESVNNDISSWTKGRSGEALSLLKKRFSHRPVQEKFVCLNCGFETHADEQAALNIARSWLFLRSQEYKKYQTNKTTGNTDKRAFVETWQSFYRKKLKEVWKPAV

SEQ ID NO: 43271 - protein, 978 aa, synthetic construct
  REGION 1..978: note = engineered CasX variant
QEIKRINKIRRRLVKDSNTKKAGKTGPMKTLLVRVMTPDLRERLENLRKKPENIPQPISNTSRANLNKLLTDYTEMKKAILHVYWEEFQKDPVGLMSRVAQPASKKIDQNKLKPEMDEKGNLTTAGFACSQCGQPLFVYKLEQVSEKGKAYTNYFGRCNVAEHEKLILLSQLKPEKDSDEAVTYSLGKFGQRALDFYSIHVTKESTHPVKPLAQIAGNRYASHPVGKALSDACMGTIASFLSKYQDIIIEHQKVVKGNQKRLESLRELAGKENLEYPSVTLPPQPHTKEGVDAYNEVIARVRMWVNLNLWQKLKLSRDDAKPLLRLKGFPSFPLVERQANEVDWWDMVCNVKKLINEKKEDGKVFWQNLAGYKRQEALRPYLSSEEDREKGKKFARYQLGDLLLHLEKKHGEDWGKVYDEAWERIDKKVEGLSKHIKLEEERRSEDAQSKAALTDWLRAKASFVIEGLKEADKDEFCRCELKLQKWYGDLRGKPFAIEAENSILDISGFSKQYNCAFIWQKDGVKKLNLYLIINYFKGGKLRFKKIKPEAFEANRFYTVINKKSGEIVPMEVNFNFDDPNLIILPLAFGKRQGREFIWNDLLSLETGSLKLANGRVIEKTLYNRRTRQDEPALFVALTFERREVLDSSNIKPMNLIGVDRGENIPAVIALTDPEGCPLSRFKDSLGNPTHILRIGESYKEKQRTIQAKKEVEQRRAGGYSRKYASKAKNLADDMVRNTARDLLYYAVTQDAMLIFENLSRGFGRQGKRTFMAERQYTRMEDWLTAKLAYEGLPSKTYLSKTLAQYTSKTCSNCGFTITSADYDRVLEKLKKTATGWMTTINGKELKVEGQITYYNRYKRQNVVKDLSVELDRLSEESVNNDISSWTKGRSGEALSLLKKRFSHRPVQEKFVCLNCGFETHADEQAALNIARSWLFLRSQEYKKYQTNKTTGNTDKRAFVETWQSFYRKKLKEVWKPAV

SEQ ID NO: 43272 - protein, 978 aa, synthetic construct
  REGION 1..978: note = engineered CasX variant
QEIKRINKIRRRLVKDSNTKKAGKTGPMKTLLVRVMTPDLRERLENLRKKPENIPQPISNTSRANLNKLLTDYTEMKKAILHVYWEEFQKDPVGLMSRVAQPASKKIDQNKLKPEMDEKGNLTTAGFACSQCGQPLFVYKLEQVSEKGKAYTNYFGRCNVAEHEKLILLSQLKPEKDSDEAVTYSLGKFGQRALDFYSIHVTKESTHPVKPLAQIAGNRYASSPVGKALSDACMGTIASFLSKYQDIIIEHQKVVKGNQKRLESLRELAGKENLEYPSVTLPPQPHTKEGVDAYNEVIARVRMWVNLNLWQKLKLSRDDAKPLLRLKGFPSFPLVERQANEVDWWDMVCNVKKLINEKKEDGKVFWQNLAGYKRQEALRPYLSSEEDREKGKKFARYQLGDLLLHLEKKHGEDWGKVYDEAWERIDKKVEGLSKHIKLEEERRSEDAQSKAALTDWLRAKASFVIEGLKEADKDEFCRCELKLQKWYGDLRGKPFAIEAENSILDISGFSKQYNCAFIWQKDGVKKLNLYLIINYFKGGKLRFKKIKPEAFEANRFYTVINKKSGEIVPMEVNFNFDDPNLIILPLAFGKRQGREFIWNDLLSLETGSLKLANGRVIEKTLYNRRTRQDEPALFVALTFERREVLDSSNIKPMNLIGVDRGENIPAVIALTDPEGCPLSRFKDSLGNPTHILRIGESYKEKQRTIQAKKEVEQRRAGGYSRKYASKAKNLADDMVRNTARDLLYYAVTQDAMLIFENLSRGFGRQGKRTFMAERQYTRMEDWLTAKLAYEGLPSKTYLSKTLAQYTSKTCSNCGFTITSADYDRVLEKLKKTATGWMTTINGKELKVEGQITYYNRYKRQNVVKDLSVELDRLSEESVNNDISSWTKGRSGEALSLLKKRFSHRPVQEKFVCLNCGFETHADEQAALNIARSWLFLRSQEYKKYQTNKTTGNTDKRAFVETWQSFYRKKLKEVWKPAV

SEQ ID NO: 43273 - protein, 978 aa, synthetic construct
  REGION 1..978: note = engineered CasX variant
QEIKRINKIRRRLVKDSNTKKAGKTGPMKTLLVRVMTPDLRERLENLRKKPENIPQPISNTSRANLNKLLTDYTEMKKAILHVYWEEFQKDPVGLMSRVAQPASKKIDQNKLKPEMDEKGNLTTAGFACSQCGQPLFVYKLEQVSEKGKAYTNYFGRCNVAEHEKLILLSQLKPEKDSDEAVTYSLGKFGQRALDFYSIHVTKESTHPVKPLAQIAGNRYASTPVGKALSDACMGTIASFLSKYQDIIIEHQKVVKGNQKRLESLRELAGKENLEYPSVTLPPQPHTKEGVDAYNEVIARVRMWVNLNLWQKLKLSRDDAKPLLRLKGFPSFPLVERQANEVDWWDMVCNVKKLINEKKEDGKVFWQNLAGYKRQEALRPYLSSEEDREKGKKFARYQLGDLLLHLEKKHGEDWGKVYDEAWERIDKKVEGLSKHIKLEEERRSEDAQSKAALTDWLRAKASFVIEGLKEADKDEFCRCELKLQKWYGDLRGKPFAIEAENSILDISGFSKQYNCAFIWQKDGVKKLNLYLIINYFKGGKLRFKKIKPEAFEANRFYTVINKKSGEIVPMEVNFNFDDPNLIILPLAFGKRQGREFIWNDLLSLETGSLKLANGRVIEKTLYNRRTRQDEPALFVALTFERREVLDSSNIKPMNLIGVDRGENIPAVIALTDPEGCPLSRFKDSLGNPTHILRIGESYKEKQRTIQAKKEVEQRRAGGYSRKYASKAKNLADDMVRNTARDLLYYAVTQDAMLIFENLSRGFGRQGKRTFMAERQYTRMEDWLTAKLAYEGLPSKTYLSKTLAQYTSKTCSNCGFTITSADYDRVLEKLKKTATGWMTTINGKELKVEGQITYYNRYKRQNVVKDLSVELDRLSEESVNNDISSWTKGRSGEALSLLKKRFSHRPVQEKFVCLNCGFETHADEQAALNIARSWLFLRSQEYKKYQTNKTTGNTDKRAFVETWQSFYRKKLKEVWKPAV

SEQ ID NO: 43274 - protein, 978 aa, synthetic construct
  REGION 1..978: note = engineered CasX variant
QEIKRINKIRRRLVKDSNTKKAGKTGPMKTLLVRVMTPDLRERLENLRKKPENIPQPISNTSRANLNKLLTDYTEMKKAILHVYWEEFQKDPVGLMSRVAQPASKKIDQNKLKPEMDEKGNLTTAGFACSQCGQPLFVYKLEQVSEKGKAYTNYFGRCNVAEHEKLILLSQLKPEKDSDEAVTYSLGKFGQRALDFYSIHVTKESTHPVKPLAQIAGNRYASAPVGKALSDACMGTIASFLSKYQDIIIEHQKVVKGNQKRLESLRELAGKENLEYPSVTLPPQPHTKEGVDAYNEVIARVRMWVNLNLWQKLKLSRDDAKPLLRLKGFPSFPLVERQANEVDWWDMVCNVKKLINEKKEDGKVFWQNLAGYKRQEALRPYLSSEEDREKGKKFARYQLGDLLLHLEKKHGEDWGKVYDEAWERIDKKVEGLSKHIKLEEERRSEDAQSKAALTDWLRAKASFVIEGLKEADKDEFCRCELKLQKWYGDLRGKPFAIEAENSILDISGFSKQYNCAFIWQKDGVKKLNLYLIINYFKGGKLRFKKIKPEAFEANRFYTVINKKSGEIVPMEVNFNFDDPNLIILPLAFGKRQGREFIWNDLLSLETGSLKLANGRVIEKTLYNRRTRQDEPALFVALTFERREVLDSSNIKPMNLIGVDRGENIPAVIALTDPEGCPLSRFKDSLGNPTHILRIGESYKEKQRTIQAKKEVEQRRAGGYSRKYASKAKNLADDMVRNTARDLLYYAVTQDAMLIFENLSRGFGRQGKRTFMAERQYTRMEDWLTAKLAYEGLPSKTYLSKTLAQYTSKTCSNCGFTITSADYDRVLEKLKKTATGWMTTINGKELKVEGQITYYNRYKRQNVVKDLSVELDRLSEESVNNDISSWTKGRSGEALSLLKKRFSHRPVQEKFVCLNCGFETHADEQAALNIARSWLFLRSQEYKKYQTNKTTGNTDKRAFVETWQSFYRKKLKEVWKPAV

SEQ ID NO: 43275 - protein, 978 aa, synthetic construct
  REGION 1..978: note = engineered CasX variant
QEIKRINKIRRRLVKDSNTKKAGKTGPMKTLLVRVMTPDLRERLENLRKKPENIPQPISNTSRANLNKLLTDYTEMKKAILHVYWEEFQKDPVGLMSRVAQPASKKIDQNKLKPEMDEKGNLTTAGFACSQCGQPLFVYKLEQVSEKGKAYTNYFGRCNVAEHEKLILLSQLKPEKDSDEAVTYSLGKFGQRALDFYSIHVTKESTHPVKPLAQIAGNRYASVPVGKALSDACMGTIASFLSKYQDIIIEHQKVVKGNQKRLESLRELAGKENLEYPSVTLPPQPHTKEGVDAYNEVIARVRMWVNLNLWQKLKLSRDDAKPLLRLKGFPSFPLVERQANEVDWWDMVCNVKKLINEKKEDGKVFWQNLAGYKRQEALRPYLSSEEDREKGKKFARYQLGDLLLHLEKKHGEDWGKVYDEAWERIDKKVEGLSKHIKLEEERRSEDAQSKAALTDWLRAKASFVIEGLKEADKDEFCRCELKLQKWYGDLRGKPFAIEAENSILDISGFSKQYNCAFIWQKDGVKKLNLYLIINYFKGGKLRFKKIKPEAFEANRFYTVINKKSGEIVPMEVNFNFDDPNLIILPLAFGKRQGREFIWNDLLSLETGSLKLANGRVIEKTLYNRRTRQDEPALFVALTFERREVLDSSNIKPMNLIGVDRGENIPAVIALTDPEGCPLSRFKDSLGNPTHILRIGESYKEKQRTIQAKKEVEQRRAGGYSRKYASKAKNLADDMVRNTARDLLYYAVTQDAMLIFENLSRGFGRQGKRTFMAERQYTRMEDWLTAKLAYEGLPSKTYLSKTLAQYTSKTCSNCGFTITSADYDRVLEKLKKTATGWMTTINGKELKVEGQITYYNRYKRQNVVKDLSVELDRLSEESVNNDISSWTKGRSGEALSLLKKRFSHRPVQEKFVCLNCGFETHADEQAALNIARSWLFLRSQEYKKYQTNKTTGNTDKRAFVETWQSFYRKKLKEVWKPAV

SEQ ID NO: 43276 - protein, 978 aa, synthetic construct
  REGION 1..978: note = engineered CasX variant
QEIKRINKIRRRLVKDSNTKKAGKTGPMKTLLVRVMTPDLRERLENLRKKPENIPQPISNTSRANLNKLLTDYTEMKKAILHVYWEEFQKDPVGLMSRVAQPASKKIDQNKLKPEMDEKGNLTTAGFACSQCGQPLFVYKLEQVSEKGKAYTNYFGRCNVAEHEKLIKLSQLKPEKDSDEAVTYSLGKFGQRALDFYSIHVTKESTHPVKPLAQIAGNRYASGPVGKALSDACMGTIASFLSKYQDIIIEHQKVVKGNQKRLESLRELAGKENLEYPSVTLPPQPHTKEGVDAYNEVIARVRMWVNLNLWQKLKLSRDDAKPLLRLKGFPSFPLVERQANEVDWWDMVCNVKKLINEKKEDGKVFWQNLAGYKRQEALRPYLSSEEDREKGKKFARYQLGDLLLHLEKKHGEDWGKVYDEAWERIDKKVEGLSKHIKLEEERRSEDAQSKAALTDWLRAKASFVIEGLKEADKDEFCRCELKLQKWYGDLRGKPFAIEAENSILDISGFSKQYNCAFIWQKDGVKKLNLYLIINYFKGGKLRFKKIKPEAFEANRFYTVINKKSGEIVPMEVNFNFDDPNLIILPLAFGKRQGREFIWNDLLSLETGSLKLANGRVIEKTLYNRRTRQDEPALFVALTFERREVLDSSNIKPMNLIGVDRGENIPAVIALTDPEGCPLSRFKDSLGNPTHILRIGESYKEKQRTIQAKKEVEQRRAGGYSRKYASKAKNLADDMVRNTARDLLYYAVTQDAMLIFENLSRGFGRQGKRTFMAERQYTRMEDWLTAKLAYEGLPSKTYLSKTLAQYTSKTCSNCGFTITSADYDRVLEKLKKTATGWMTTINGKELKVEGQITYYNRYKRQNVVKDLSVELDRLSEESVNNDISSWTKGRSGEALSLLKKRFSHRPVQEKFVCLNCGFETHADEQAALNIARSWLFLRSQEYKKYQTNKTTGNTDKRAFVETWQSFYRKKLKEVWKPAV

SEQ ID NO: 43277 - protein, 977 aa, synthetic construct
  REGION 1..977: note = engineered CasX variant
QEIKRINKIRRRLVKDSNTKKAGKTGPMKTLLVRVMTPDLRERLENLRKKPENIPQPISNTSRANLNKLLTDYTEMKKAILHVYWEEFQKDPVGLMSRVAQPASKKIDQNKLKPEMDEKGNLTTAGFACSQCGQPLFVYKLEQVSEKGKAYTNYFGRCNVAEHEKLILLSQLKPEKDSDEAVTYSLGKFGQRALDFYSIHVTKESTHPVKPLAQIAGNRYASPVGKALSDACMGTIASFLSKYQDIIIEHQKVVKGNQKRLESLRELAGKENLEYPSVTLPPQPHTKEGVDAYNEVIARVRMWVNLNLWQKLKLSRDDAKPLLRLKGFPSFPLVERQANEVDWWDMVCNVKKLINEKKEDGKVFWQNLAGYKRQEALRPYLSSEEDREKGKKFARYQLGDLLLHLEKKHGEDWGKVYDEAWERIDKKVEGLSKHIKLEEERRSEDAQSKAALTDWLRAKASFVIEGLKEADKDEFCRCELKLQKWYGDLRGKPFAIEAENSILDISGFSKQYNCAFIWQKDGVKKLNLYLIINYFKGGKLRFKKIKPEAFEANRFYTVINKKSGEIVPMEVNFNFDDPNLIILPLAFGKRQGREFIWNDLLSLETGSLKLANGRVIEKTLYNRRTRQDEPALFVALTFERREVLDSSNIKPMNLIGVDRGENIPAVIALTDPEGCPLSRFKDSLGNPTHILRIGESYKEKQRTIQAKKEVEQRRAGGYSRKYASKAKNLADDMVRNTARDLLYYAVTQDAMLIFENLSRGFGRQGKRTFMAERQYTRMEDWLTAKLAYEGLPSKTYLSKTLAQYTSKTCSNCGFTITSADYDRVLEKLKKTATGWMTTINGKELKVEGQITYYNRYKRQNVVKDLSVELDRLSEESVNNDISSWTKGRSGEALSLLKKRFSHRPVQEKFVCLNCGFETHADEQAALNIARSWLFLRSQEYKKYQTNKTTGNTDKRAFVETWQSFYRKKLKEVWKPAV

SEQ ID NO: 43278 - protein, 978 aa, synthetic construct
  REGION 1..978: note = engineered CasX variant
QEIKRINKIRRRLVKDSNTKKAGKTGPMKTLLVRVMTPDLRERLENLRKKPENIPQPISNTSRANLNKLLTDYTEMKKAILHVYWEEFQKDPVGLMSRVAQPASKKIDQNKLKPEMDEKGNLTTAGFACSQCGQPLFVYKLEQVSEKGKAYTNYFGRCNVAEHEKLILLSQLKPEKDSDEAVTYSLGKFGQRALDFYSIHVTKESTHPVKPLAQIAGNRYASYPVGKALSDACMGTIASFLSKYQDIIIEHQKVVKGNQKRLESLRELAGKENLEYPSVTLPPQPHTKEGVDAYNEVIARVRMWVNLNLWQKLKLSRDDAKPLLRLKGFPSFPLVERQANEVDWWDMVCNVKKLINEKKEDGKVFWQNLAGYKRQEALRPYLSSEEDRKKGKKFARYQLGDLLLHLEKKHGEDWGKVYDEAWERIDKKVEGLSKHIKLEEERRSEDAQSKAALTDWLRAKASFVIEGLKEADKDEFCRCELKLQKWYGDLRGKPFAIEAENSILDISGFSKQYNCAFIWQKDGVKKLNLYLIINYFKGGKLRFKKIKPEAFEANRFYTVINKKSGEIVIMEVNFNFDDPNLIILPLAFGKRQGREFIWNDLLSLETGSLKLANGRVIEKTLYNRRTRQDEPALFVALTFERREVLDSSNIKPMNLIGVDRGENIPAVIALTDPEGCPLSRFKDSLGNPTHILRIGESYKEKQRTIQAKKEVEQRRAGGYSRKYASKAKNLADDMVRNTARDLLYYAVTQDAMLIFENLSRGFGRQGKRTFMAERQYTRMEDWLTAKLAYEGLPSKTYLSKTLAQYTSKTCSNCGFTITSADYDRVLEKLKKTATGWMTTINGKELKVEGQITYYNRYKRQNVVKDLSVELDRLSEESVNNDISSWTKGRSGEALSLLKKRFSHRPVQEKFVCLNCGFETHADEQAALNIARSWLFLRSQEYKKYQTNKTTGNTDKRAFVETWQSFYRKKLKEVWKPAV

SEQ ID NO: 43279 - protein, 978 aa, synthetic construct
  REGION 1..978: note = engineered CasX variant
QEIKRINKIRRRLVKDSNTKKAGKTGPMKTLLVRVMTPDLRERLENLRKKPENIPQPISNTSRANLNKLLTDYTEMKKAILHVYWEEFQKDPVGLMSRVAQPASKKIDQNKLKPEMDEKGNLTTAGFACSQCGQPLFVYKLEQVSEKGKAYTNYFGRCNVAEHEKLILLSQLKPEKDSDEAVTYSLGKFGQRALDFYSIHVTKESTHPVKPLAQIAGNRYASHPVGKALSDACMGTIASFLSKYQDIIIEHQKVVKGNQKRLESLRELAGKENLEYPSVTLPPQPHTKEGVDAYNEVIARVRMWVNLNLWQKLKLSRDDAKPLLRLKGFPSFPLVERQANEVDWWDMVCNVKKLINEKKEDGKVFWQNLAGYKRQEALRPYLSSEEDRKKGKKFARYQLGDLLLHLEKKHGEDWGKVYDEAWERIDKKVEGLSKHIKLEEERRSEDAQSKAALTDWLRAKASFVIEGLKEADKDEFCRCELKLQKWYGDLRGKPFAIEAENSILDISGFSKQYNCAFIWQKDGVKKLNLYLIINYFKGGKLRFKKIKPEAFEANRFYTVINKKSGEIVIMEVNFNFDDPNLIILPLAFGKRQGREFIWNDLLSLETGSLKLANGRVIEKTLYNRRTRQDEPALFVALTFERREVLDSSNIKPMNLIGVDRGENIPAVIALTDPEGCPLSRFKDSLGNPTHILRIGESYKEKQRTIQAKKEVEQRRAGGYSRKYASKAKNLADDMVRNTARDLLYYAVTQDAMLIFENLSRGFGRQGKRTFMAERQYTRMEDWLTAKLAYEGLPSKTYLSKTLAQYTSKTCSNCGFTITSADYDRVLEKLKKTATGWMTTINGKELKVEGQITYYNRYKRQNVVKDLSVELDRLSEESVNNDISSWTKGRSGEALSLLKKRFSHRPVQEKFVCLNCGFETHADEQAALNIARSWLFLRSQEYKKYQTNKTTGNTDKRAFVETWQSFYRKKLKEVWKPAV

SEQ ID NO: 43280 - protein, 978 aa, synthetic construct
  REGION 1..978: note = engineered CasX variant
QEIKRINKIRRRLVKDSNTKKAGKTGPMKTLLVRVMTPDLRERLENLRKKPENIPQPISNTSRANLNKLLTDYTEMKKAILHVYWEEFQKDPVGLMSRVAQPASKKIDQNKLKPEMDEKGNLTTAGFACSQCGQPLFVYKLEQVSEKGKAYTNYFGRCNVAEHEKLILLSQLKPEKDSDEAVTYSLGKFGQRALDFYSIHVTKESTHPVKPLAQIAGNRYASSPVGKALSDACMGTIASFLSKYQDIIIEHQKVVKGNQKRLESLRELAGKENLEYPSVTLPPQPHTKEGVDAYNEVIARVRMWVNLNLWQKLKLSRDDAKPLLRLKGFPSFPLVERQANEVDWWDMVCNVKKLINEKKEDGKVFWQNLAGYKRQEALRPYLSSEEDRKKGKKFARYQLGDLLLHLEKKHGEDWGKVYDEAWERIDKKVEGLSKHIKLEEERRSEDAQSKAALTDWLRAKASFVIEGLKEADKDEFCRCELKLQKWYGDLRGKPFAIEAENSILDISGFSKQYNCAFIWQKDGVKKLNLYLIINYFKGGKLRFKKIKPEAFEANRFYTVINKKSGEIVIMEVNFNFDDPNLIILPLAFGKRQGREFIWNDLLSLETGSLKLANGRVIEKTLYNRRTRQDEPALFVALTFERREVLDSSNIKPMNLIGVDRGENIPAVIALTDPEGCPLSRFKDSLGNPTHILRIGESYKEKQRTIQAKKEVEQRRAGGYSRKYASKAKNLADDMVRNTARDLLYYAVTQDAMLIFENLSRGFGRQGKRTFMAERQYTRMEDWLTAKLAYEGLPSKTYLSKTLAQYTSKTCSNCGFTITSADYDRVLEKLKKTATGWMTTINGKELKVEGQITYYNRYKRQNVVKDLSVELDRLSEESVNNDISSWTKGRSGEALSLLKKRFSHRPVQEKFVCLNCGFETHADEQAALNIARSWLFLRSQEYKKYQTNKTTGNTDKRAFVETWQSFYRKKLKEVWKPAV

SEQ ID NO: 43281 - protein, 978 aa, synthetic construct
  REGION 1..978: note = engineered CasX variant
QEIKRINKIRRRLVKDSNTKKAGKTGPMKTLLVRVMTPDLRERLENLRKKPENIPQPISNTSRANLNKLLTDYTEMKKAILHVYWEEFQKDPVGLMSRVAQPASKKIDQNKLKPEMDEKGNLTTAGFACSQCGQPLFVYKLEQVSEKGKAYTNYFGRCNVAEHEKLILLSQLKPEKDSDEAVTYSLGKFGQRALDFYSIHVTKESTHPVKPLAQIAGNRYASTPVGKALSDACMGTIASFLSKYQDIIIEHQKVVKGNQKRLESLRELAGKENLEYPSVTLPPQPHTKEGVDAYNEVIARVRMWVNLNLWQKLKLSRDDAKPLLRLKGFPSFPLVERQANEVDWWDMVCNVKKLINEKKEDGKVFWQNLAGYKRQEALRPYLSSEEDRKKGKKFARYQLGDLLLHLEKKHGEDWGKVYDEAWERIDKKVEGLSKHIKLEEERRSEDAQSKAALTDWLRAKASFVIEGLKEADKDEFCRCELKLQKWYGDLRGKPFAIEAENSILDISGFSKQYNCAFIWQKDGVKKLNLYLIINYFKGGKLRFKKIKPEAFEANRFYTVINKKSGEIVIMEVNFNFDDPNLIILPLAFGKRQGREFIWNDLLSLETGSLKLANGRVIEKTLYNRRTRQDEPALFVALTFERREVLDSSNIKPMNLIGVDRGENIPAVIALTDPEGCPLSRFKDSLGNPTHILRIGESYKEKQRTIQAKKEVEQRRAGGYSRKYASKAKNLADDMVRNTARDLLYYAVTQDAMLIFENLSRGFGRQGKRTFMAERQYTRMEDWLTAKLAYEGLPSKTYLSKTLAQYTSKTCSNCGFTITSADYDRVLEKLKKTATGWMTTINGKELKVEGQITYYNRYKRQNVVKDLSVELDRLSEESVNNDISSWTKGRSGEALSLLKKRFSHRPVQEKFVCLNCGFETHADEQAALNIARSWLFLRSQEYKKYQTNKTTGNTDKRAFVETWQSFYRKKLKEVWKPAV

SEQ ID NO: 43282 - protein, 978 aa, synthetic construct
  REGION 1..978: note = engineered CasX variant
QEIKRINKIRRRLVKDSNTKKAGKTGPMKTLLVRVMTPDLRERLENLRKKPENIPQPISNTSRANLNKLLTDYTEMKKAILHVYWEEFQKDPVGLMSRVAQPASKKIDQNKLKPEMDEKGNLTTAGFACSQCGQPLFVYKLEQVSEKGKAYTNYFGRCNVAEHEKLILLSQLKPEKDSDEAVTYSLGKFGQRALDFYSIHVTKESTHPVKPLAQIAGNRYASAPVGKALSDACMGTIASFLSKYQDIIIEHQKVVKGNQKRLESLRELAGKENLEYPSVTLPPQPHTKEGVDAYNEVIARVRMWVNLNLWQKLKLSRDDAKPLLRLKGFPSFPLVERQANEVDWWDMVCNVKKLINEKKEDGKVFWQNLAGYKRQEALRPYLSSEEDRKKGKKFARYQLGDLLLHLEKKHGEDWGKVYDEAWERIDKKVEGLSKHIKLEEERRSEDAQSKAALTDWLRAKASFVIEGLKEADKDEFCRCELKLQKWYGDLRGKPFAIEAENSILDISGFSKQYNCAFIWQKDGVKKLNLYLIINYFKGGKLRFKKIKPEAFEANRFYTVINKKSGEIVIMEVNFNFDDPNLIILPLAFGKRQGREFIWNDLLSLETGSLKLANGRVIEKTLYNRRTRQDEPALFVALTFERREVLDSSNIKPMNLIGVDRGENIPAVIALTDPEGCPLSRFKDSLGNPTHILRIGESYKEKQRTIQAKKEVEQRRAGGYSRKYASKAKNLADDMVRNTARDLLYYAVTQDAMLIFENLSRGFGRQGKRTFMAERQYTRMEDWLTAKLAYEGLPSKTYLSKTLAQYTSKTCSNCGFTITSADYDRVLEKLKKTATGWMTTINGKELKVEGQITYYNRYKRQNVVKDLSVELDRLSEESVNNDISSWTKGRSGEALSLLKKRFSHRPVQEKFVCLNCGFETHADEQAALNIARSWLFLRSQEYKKYQTNKTTGNTDKRAFVETWQSFYRKKLKEVWKPAV

SEQ ID NO: 43283 - protein, 978 aa, synthetic construct
  REGION 1..978: note = engineered CasX variant
QEIKRINKIRRRLVKDSNTKKAGKTGPMKTLLVRVMTPDLRERLENLRKKPENIPQPISNTSRANLNKLLTDYTEMKKAILHVYWEEFQKDPVGLMSRVAQPASKKIDQNKLKPEMDEKGNLTTAGFACSQCGQPLFVYKLEQVSEKGKAYTNYFGRCNVAEHEKLILLSQLKPEKDSDEAVTYSLGKFGQRALDFYSIHVTKESTHPVKPLAQIAGNRYASVPVGKALSDACMGTIASFLSKYQDIIIEHQKVVKGNQKRLESLRELAGKENLEYPSVTLPPQPHTKEGVDAYNEVIARVRMWVNLNLWQKLKLSRDDAKPLLRLKGFPSFPLVERQANEVDWWDMVCNVKKLINEKKEDGKVFWQNLAGYKRQEALRPYLSSEEDRKKGKKFARYQLGDLLLHLEKKHGEDWGKVYDEAWERIDKKVEGLSKHIKLEEERRSEDAQSKAALTDWLRAKASFVIEGLKEADKDEFCRCELKLQKWYGDLRGKPFAIEAENSILDISGFSKQYNCAFIWQKDGVKKLNLYLIINYFKGGKLRFKKIKPEAFEANRFYTVINKKSGEIVIMEVNFNFDDPNLIILPLAFGKRQGREFIWNDLLSLETGSLKLANGRVIEKTLYNRRTRQDEPALFVALTFERREVLDSSNIKPMNLIGVDRGENIPAVIALTDPEGCPLSRFKDSLGNPTHILRIGESYKEKQRTIQAKKEVEQRRAGGYSRKYASKAKNLADDMVRNTARDLLYYAVTQDAMLIFENLSRGFGRQGKRTFMAERQYTRMEDWLTAKLAYEGLPSKTYLSKTLAQYTSKTCSNCGFTITSADYDRVLEKLKKTATGWMTTINGKELKVEGQITYYNRYKRQNVVKDLSVELDRLSEESVNNDISSWTKGRSGEALSLLKKRFSHRPVQEKFVCLNCGFETHADEQAALNIARSWLFLRSQEYKKYQTNKTTGNTDKRAFVETWQSFYRKKLKEVWKPAV

SEQ ID NO: 43284 - protein, 978 aa, synthetic construct
  REGION 1..978: note = engineered CasX variant
QEIKRINKIRRRLVKDSNTKKAGKTGPMKTLLVRVMTPDLRERLENLRKKPENIPQPISNTSRANLNKLLTDYTEMKKAILHVYWEEFQKDPVGLMSRVAQPASKKIDQNKLKPEMDEKGNLTTAGFACSQCGQPLFVYKLEQVSEKGKAYTNYFGRCNVAEHEKLIKLSQLKPEKDSDEAVTYSLGKFGQRALDFYSIHVTKESTHPVKPLAQIAGNRYASGPVGKALSDACMGTIASFLSKYQDIIIEHQKVVKGNQKRLESLRELAGKENLEYPSVTLPPQPHTKEGVDAYNEVIARVRMWVNLNLWQKLKLSRDDAKPLLRLKGFPSFPLVERQANEVDWWDMVCNVKKLINEKKEDGKVFWQNLAGYKRQEALRPYLSSEEDRKKGKKFARYQLGDLLLHLEKKHGEDWGKVYDEAWERIDKKVEGLSKHIKLEEERRSEDAQSKAALTDWLRAKASFVIEGLKEADKDEFCRCELKLQKWYGDLRGKPFAIEAENSILDISGFSKQYNCAFIWQKDGVKKLNLYLIINYFKGGKLRFKKIKPEAFEANRFYTVINKKSGEIVIMEVNFNFDDPNLIILPLAFGKRQGREFIWNDLLSLETGSLKLANGRVIEKTLYNRRTRQDEPALFVALTFERREVLDSSNIKPMNLIGVDRGENIPAVIALTDPEGCPLSRFKDSLGNPTHILRIGESYKEKQRTIQAKKEVEQRRAGGYSRKYASKAKNLADDMVRNTARDLLYYAVTQDAMLIFENLSRGFGRQGKRTFMAERQYTRMEDWLTAKLAYEGLPSKTYLSKTLAQYTSKTCSNCGFTITSADYDRVLEKLKKTATGWMTTINGKELKVEGQITYYNRYKRQNVVKDLSVELDRLSEESVNNDISSWTKGRSGEALSLLKKRFSHRPVQEKFVCLNCGFETHADEQAALNIARSWLFLRSQEYKKYQTNKTTGNTDKRAFVETWQSFYRKKLKEVWKPAV

SEQ ID NO: 43285 - protein, 977 aa, synthetic construct
  REGION 1..977: note = engineered CasX variant
QEIKRINKIRRRLVKDSNTKKAGKTGPMKTLLVRVMTPDLRERLENLRKKPENIPQPISNTSRANLNKLLTDYTEMKKAILHVYWEEFQKDPVGLMSRVAQPASKKIDQNKLKPEMDEKGNLTTAGFACSQCGQPLFVYKLEQVSEKGKAYTNYFGRCNVAEHEKLILLSQLKPEKDSDEAVTYSLGKFGQRALDFYSIHVTKESTHPVKPLAQIAGNRYASPVGKALSDACMGTIASFLSKYQDIIIEHQKVVKGNQKRLESLRELAGKENLEYPSVTLPPQPHTKEGVDAYNEVIARVRMWVNLNLWQKLKLSRDDAKPLLRLKGFPSFPLVERQANEVDWWDMVCNVKKLINEKKEDGKVFWQNLAGYKRQEALRPYLSSEEDRKKGKKFARYQLGDLLLHLEKKHGEDWGKVYDEAWERIDKKVEGLSKHIKLEEERRSEDAQSKAALTDWLRAKASFVIEGLKEADKDEFCRCELKLQKWYGDLRGKPFAIEAENSILDISGFSKQYNCAFIWQKDGVKKLNLYLIINYFKGGKLRFKKIKPEAFEANRFYTVINKKSGEIVIMEVNFNFDDPNLIILPLAFGKRQGREFIWNDLLSLETGSLKLANGRVIEKTLYNRRTRQDEPALFVALTFERREVLDSSNIKPMNLIGVDRGENIPAVIALTDPEGCPLSRFKDSLGNPTHILRIGESYKEKQRTIQAKKEVEQRRAGGYSRKYASKAKNLADDMVRNTARDLLYYAVTQDAMLIFENLSRGFGRQGKRTFMAERQYTRMEDWLTAKLAYEGLPSKTYLSKTLAQYTSKTCSNCGFTITSADYDRVLEKLKKTATGWMTTINGKELKVEGQITYYNRYKRQNVVKDLSVELDRLSEESVNNDISSWTKGRSGEALSLLKKRFSHRPVQEKFVCLNCGFETHADEQAALNIARSWLFLRSQEYKKYQTNKTTGNTDKRAFVETWQSFYRKKLKEVWKPAV

SEQ ID NO: 43286 - protein, 978 aa, synthetic construct
  REGION 1..978: note = engineered CasX variant
QEIKRINKIRRRLVKDSNTKKAGKTGPMKTLLVRVMTPDLRERLENLRKKPENIPQPISNTSRANLNKLLTDYTEMKKAILHVYWEEFQKDPVGLMSRVAQPASKKIDQNKLKPEMDEKGNLTTAGFACSQCGQPLFVYKLEQVSEKGKAYTNYFGRCNVAEHEKLILLAQLKPEKDSDEAVTYSLGKFGQRALDFYSIHVTKESTHPVKPLAQIAGNRYASYPVGKALSGACMGTIASFLSKYQDIIIEHQKVVKGNQKRLESLRELAGKENLEYPSVTLPPQPHTKEGVDAYNEVIARVRMWVNLNLWQKLKLSRDDAKPLLRLKGFPSFPLVERQANEVDWWDMVCNVKKLINEKKEDGKVFWQNLAGYKRQEALRPYLSSEEDRKKGKKFARYQLGDLLLHLEKKHGEDWGKVYDEAWERIDKKVEGLSKHIKLEEERRSEDAQSKAALTDWLRAKASFVIEGLKEADKDEFCRCELKLQKWYGDLRGKPFAIEAENSILDISGFSKQYNCAFIWQKDGVKKLNLYLIINYFKGGKLRFKKIKPEAFEANRFYTVINKKSGEIVPMEVNFNFDDPNLIILPLAFGKRQGREFIWNDLLSLETGSLKLANGRVIEKTLYNRRTRQDEPALFVALTFERREVLDSSNIKPMNLIGVDRGENIPAVIALTDPEGCPLSRFKDSLGNPTHILRIGESYKEKQRTIQAKKEVEQRRAGGYSRKYASKAKNLADDMVRNTARDLLYYAVTQDAMLIFENLSRGFGRQGKRTFMAERQYTRMEDWLTAKLAYEGLPSKTYLSKTLAQYTSKTCSNCGFTITSADYDRVLEKLKKTATGWMTTINGKELKVEGQITYYNRYKRQNVVKDLSVELDRLSEESVNNDISSWTKGRSGEALSLLKKRFSHRPVQEKFVCLNCGFETHADEQAALNIARSWLFLRSQEYKKYQTNKTTGNTDKRAFVETWQSFYRKKLKEVWKPAV

SEQ ID NO: 43287 - protein, 978 aa, synthetic construct
  REGION 1..978: note = engineered CasX variant
QEIKRINKIRRRLVKDSNTKKAGKTGPMKTLLVRVMTPDLRERLENLRKKPENIPQPISNTSRANLNKLLTDYTEMKKAILHVYWEEFQKDPVGLMSRVAQPASKKIDQNKLKPEMDEKGNLTTAGFACSQCGQPLFVYKLEQVSEKGKAYTNYFGRCNVAEHEKLILLAQLKPEKDSDEAVTYSLGKFGQRALDFYSIHVTKESTHPVKPLAQIAGNRYASHPVGKALSGACMGTIASFLSKYQDIIIEHQKVVKGNQKRLESLRELAGKENLEYPSVTLPPQPHTKEGVDAYNEVIARVRMWVNLNLWQKLKLSRDDAKPLLRLKGFPSFPLVERQANEVDWWDMVCNVKKLINEKKEDGKVFWQNLAGYKRQEALRPYLSSEEDRKKGKKFARYQLGDLLLHLEKKHGEDWGKVYDEAWERIDKKVEGLSKHIKLEEERRSEDAQSKAALTDWLRAKASFVIEGLKEADKDEFCRCELKLQKWYGDLRGKPFAIEAENSILDISGFSKQYNCAFIWQKDGVKKLNLYLIINYFKGGKLRFKKIKPEAFEANRFYTVINKKSGEIVPMEVNFNFDDPNLIILPLAFGKRQGREFIWNDLLSLETGSLKLANGRVIEKTLYNRRTRQDEPALFVALTFERREVLDSSNIKPMNLIGVDRGENIPAVIALTDPEGCPLSRFKDSLGNPTHILRIGESYKEKQRTIQAKKEVEQRRAGGYSRKYASKAKNLADDMVRNTARDLLYYAVTQDAMLIFENLSRGFGRQGKRTFMAERQYTRMEDWLTAKLAYEGLPSKTYLSKTLAQYTSKTCSNCGFTITSADYDRVLEKLKKTATGWMTTINGKELKVEGQITYYNRYKRQNVVKDLSVELDRLSEESVNNDISSWTKGRSGEALSLLKKRFSHRPVQEKFVCLNCGFETHADEQAALNIARSWLFLRSQEYKKYQTNKTTGNTDKRAFVETWQSFYRKKLKEVWKPAV

SEQ ID NO: 43288 - protein, 978 aa, synthetic construct
  REGION 1..978: note = engineered CasX variant
QEIKRINKIRRRLVKDSNTKKAGKTGPMKTLLVRVMTPDLRERLENLRKKPENIPQPISNTSRANLNKLLTDYTEMKKAILHVYWEEFQKDPVGLMSRVAQPASKKIDQNKLKPEMDEKGNLTTAGFACSQCGQPLFVYKLEQVSEKGKAYTNYFGRCNVAEHEKLILLAQLKPEKDSDEAVTYSLGKFGQRALDFYSIHVTKESTHPVKPLAQIAGNRYASTPVGKALSGACMGTIASFLSKYQDIIIEHQKVVKGNQKRLESLRELAGKENLEYPSVTLPPQPHTKEGVDAYNEVIARVRMWVNLNLWQKLKLSRDDAKPLLRLKGFPSFPLVERQANEVDWWDMVCNVKKLINEKKEDGKVFWQNLAGYKRQEALRPYLSSEEDRKKGKKFARYQLGDLLLHLEKKHGEDWGKVYDEAWERIDKKVEGLSKHIKLEEERRSEDAQSKAALTDWLRAKASFVIEGLKEADKDEFCRCELKLQKWYGDLRGKPFAIEAENSILDISGFSKQYNCAFIWQKDGVKKLNLYLIINYFKGGKLRFKKIKPEAFEANRFYTVINKKSGEIVPMEVNFNFDDPNLIILPLAFGKRQGREFIWNDLLSLETGSLKLANGRVIEKTLYNRRTRQDEPALFVALTFERREVLDSSNIKPMNLIGVDRGENIPAVIALTDPEGCPLSRFKDSLGNPTHILRIGESYKEKQRTIQAKKEVEQRRAGGYSRKYASKAKNLADDMVRNTARDLLYYAVTQDAMLIFENLSRGFGRQGKRTFMAERQYTRMEDWLTAKLAYEGLPSKTYLSKTLAQYTSKTCSNCGFTITSADYDRVLEKLKKTATGWMTTINGKELKVEGQITYYNRYKRQNVVKDLSVELDRLSEESVNNDISSWTKGRSGEALSLLKKRFSHRPVQEKFVCLNCGFETHADEQAALNIARSWLFLRSQEYKKYQTNKTTGNTDKRAFVETWQSFYRKKLKEVWKPAV

SEQ ID NO: 43289 - protein, 978 aa, synthetic construct
  REGION 1..978: note = engineered CasX variant
QEIKRINKIRRRLVKDSNTKKAGKTGPMKTLLVRVMTPDLRERLENLRKKPENIPQPISNTSRANLNKLLTDYTEMKKAILHVYWEEFQKDPVGLMSRVAQPASKKIDQNKLKPEMDEKGNLTTAGFACSQCGQPLFVYKLEQVSEKGKAYTNYFGRCNVAEHEKLILLAQLKPEKDSDEAVTYSLGKFGQRALDFYSIHVTKESTHPVKPLAQIAGNRYASAPVGKALSGACMGTIASFLSKYQDIIIEHQKVVKGNQKRLESLRELAGKENLEYPSVTLPPQPHTKEGVDAYNEVIARVRMWVNLNLWQKLKLSRDDAKPLLRLKGFPSFPLVERQANEVDWWDMVCNVKKLINEKKEDGKVFWQNLAGYKRQEALRPYLSSEEDRKKGKKFARYQLGDLLLHLEKKHGEDWGKVYDEAWERIDKKVEGLSKHIKLEEERRSEDAQSKAALTDWLRAKASFVIEGLKEADKDEFCRCELKLQKWYGDLRGKPFAIEAENSILDISGFSKQYNCAFIWQKDGVKKLNLYLIINYFKGGKLRFKKIKPEAFEANRFYTVINKKSGEIVPMEVNFNFDDPNLIILPLAFGKRQGREFIWNDLLSLETGSLKLANGRVIEKTLYNRRTRQDEPALFVALTFERREVLDSSNIKPMNLIGVDRGENIPAVIALTDPEGCPLSRFKDSLGNPTHILRIGESYKEKQRTIQAKKEVEQRRAGGYSRKYASKAKNLADDMVRNTARDLLYYAVTQDAMLIFENLSRGFGRQGKRTFMAERQYTRMEDWLTAKLAYEGLPSKTYLSKTLAQYTSKTCSNCGFTITSADYDRVLEKLKKTATGWMTTINGKELKVEGQITYYNRYKRQNVVKDLSVELDRLSEESVNNDISSWTKGRSGEALSLLKKRFSHRPVQEKFVCLNCGFETHADEQAALNIARSWLFLRSQEYKKYQTNKTTGNTDKRAFVETWQSFYRKKLKEVWKPAV

SEQ ID NO: 43290 - protein, 978 aa, synthetic construct
  REGION 1..978: note = engineered CasX variant
QEIKRINKIRRRLVKDSNTKKAGKTGPMKTLLVRVMTPDLRERLENLRKKPENIPQPISNTSRANLNKLLTDYTEMKKAILHVYWEEFQKDPVGLMSRVAQPASKKIDQNKLKPEMDEKGNLTTAGFACSQCGQPLFVYKLEQVSEKGKAYTNYFGRCNVAEHEKLILLAQLKPEKDSDEAVTYSLGKFGQRALDFYSIHVTKESTHPVKPLAQIAGNRYASVPVGKALSGACMGTIASFLSKYQDIIIEHQKVVKGNQKRLESLRELAGKENLEYPSVTLPPQPHTKEGVDAYNEVIARVRMWVNLNLWQKLKLSRDDAKPLLRLKGFPSFPLVERQANEVDWWDMVCNVKKLINEKKEDGKVFWQNLAGYKRQEALRPYLSSEEDRKKGKKFARYQLGDLLLHLEKKHGEDWGKVYDEAWERIDKKVEGLSKHIKLEEERRSEDAQSKAALTDWLRAKASFVIEGLKEADKDEFCRCELKLQKWYGDLRGKPFAIEAENSILDISGFSKQYNCAFIWQKDGVKKLNLYLIINYFKGGKLRFKKIKPEAFEANRFYTVINKKSGEIVPMEVNFNFDDPNLIILPLAFGKRQGREFIWNDLLSLETGSLKLANGRVIEKTLYNRRTRQDEPALFVALTFERREVLDSSNIKPMNLIGVDRGENIPAVIALTDPEGCPLSRFKDSLGNPTHILRIGESYKEKQRTIQAKKEVEQRRAGGYSRKYASKAKNLADDMVRNTARDLLYYAVTQDAMLIFENLSRGFGRQGKRTFMAERQYTRMEDWLTAKLAYEGLPSKTYLSKTLAQYTSKTCSNCGFTITSADYDRVLEKLKKTATGWMTTINGKELKVEGQITYYNRYKRQNVVKDLSVELDRLSEESVNNDISSWTKGRSGEALSLLKKRFSHRPVQEKFVCLNCGFETHADEQAALNIARSWLFLRSQEYKKYQTNKTTGNTDKRAFVETWQSFYRKKLKEVWKPAV

SEQ ID NO: 43291 - protein, 978 aa, synthetic construct
  REGION 1..978: note = engineered CasX variant
QEIKRINKIRRRLVKDSNTKKAGKTGPMKTLLVRVMTPDLRERLENLRKKPENIPQPISNTSRANLNKLLTDYTEMKKAILHVYWEEFQKDPVGLMSRVAQPASKKIDQNKLKPEMDEKGNLTTAGFACSQCGQPLFVYKLEQVSEKGKAYTNYFGRCNVAEHEKLILLAQLKPEKDSDEAVTYSLGKFGQRALDFYSIHVTKESTHPVKPLAQIAGNRYASYPVGKALSDACMGTIASFLSKYQDIIIEHQKVVKGNQKRLESLRELAGKENLEYPSVTLPPQPHTKEGVDAYNEVIARVRMWVNLNLWQKLKLSRDDAKPLLRLKNFPSFPLVERQANEVDWWDMVCNVKKLINEKKEDGKVFWQNLAGYKRQEALRPYLSSEEDRKKGKKFARYQLGDLLLHLEKKHGEDWGKVYDEAWERIDKKVEGLSKHIKLEEERRSEDAQSKAALTDWLRAKASFVIEGLKEADKDEFCRCELKLQKWYGDLRGKPFAIEAENSILDISGFSKQYNCAFIWQKDGVKKLNLYLIINYFKGGKLRFKKIKPEAFEANRFYTVINKKSGEIVPMEVNFNFDDPNLIILPLAFGKRQGREFIWNDLLSLETGSLKLANGRVIEKTLYNRRTRQDEPALFVALTFERREVLDSSNIKPMNLIGVDRGENIPAVIALTDPEGCPLSRFKDSLGNPTHILRIGESYKEKQRTIQAKKEVEQRRAGGYSRKYASKAKNLADDMVRNTARDLLYYAVTQDAMLIFENLSRGFGRQGKRTFMAERQYTRMEDWLTAKLAYEGLPSKTYLSKTLAQYTSKTCSNCGFTITSADYDRVLEKLKKTATGWMTTINGKELKVEGQITYYNRYKRQNVVKDLSVELDRLSEESVNNDISSWTKGRSGEALSLLKKRFSHRPVQEKFVCLNCGFETHADEQAALNIARSWLFLRSQEYKKYQTNKTTGNTDKRAFVETWQSFYRKKLKEVWKPAV

SEQ ID NO: 43292 - protein, 978 aa, synthetic construct
  REGION 1..978: note = engineered CasX variant
QEIKRINKIRRRLVKDSNTKKAGKTGPMKTLLVRVMTPDLRERLENLRKKPENIPQPISNTSRANLNKLLTDYTEMKKAILHVYWEEFQKDPVGLMSRVAQPASKKIDQNKLKPEMDEKGNLTTAGFACSQCGQPLFVYKLEQVSEKGKAYTNYFGRCNVAEHEKLILLAQLKPEKDSDEAVTYSLGKFGQRALDFYSIHVTKESTHPVKPLAQIAGNRYASHPVGKALSDACMGTIASFLSKYQDIIIEHQKVVKGNQKRLESLRELAGKENLEYPSVTLPPQPHTKEGVDAYNEVIARVRMWVNLNLWQKLKLSRDDAKPLLRLKNFPSFPLVERQANEVDWWDMVCNVKKLINEKKEDGKVFWQNLAGYKRQEALRPYLSSEEDRKKGKKFARYQLGDLLLHLEKKHGEDWGKVYDEAWERIDKKVEGLSKHIKLEEERRSEDAQSKAALTDWLRAKASFVIEGLKEADKDEFCRCELKLQKWYGDLRGKPFAIEAENSILDISGFSKQYNCAFIWQKDGVKKLNLYLIINYFKGGKLRFKKIKPEAFEANRFYTVINKKSGEIVPMEVNFNFDDPNLIILPLAFGKRQGREFIWNDLLSLETGSLKLANGRVIEKTLYNRRTRQDEPALFVALTFERREVLDSSNIKPMNLIGVDRGENIPAVIALTDPEGCPLSRFKDSLGNPTHILRIGESYKEKQRTIQAKKEVEQRRAGGYSRKYASKAKNLADDMVRNTARDLLYYAVTQDAMLIFENLSRGFGRQGKRTFMAERQYTRMEDWLTAKLAYEGLPSKTYLSKTLAQYTSKTCSNCGFTITSADYDRVLEKLKKTATGWMTTINGKELKVEGQITYYNRYKRQNVVKDLSVELDRLSEESVNNDISSWTKGRSGEALSLLKKRFSHRPVQEKFVCLNCGFETHADEQAALNIARSWLFLRSQEYKKYQTNKTTGNTDKRAFVETWQSFYRKKLKEVWKPAV

SEQ ID NO: 43293 - protein, 978 aa, synthetic construct
  REGION 1..978: note = engineered CasX variant
QEIKRINKIRRRLVKDSNTKKAGKTGPMKTLLVRVMTPDLRERLENLRKKPENIPQPISNTSRANLNKLLTDYTEMKKAILHVYWEEFQKDPVGLMSRVAQPASKKIDQNKLKPEMDEKGNLTTAGFACSQCGQPLFVYKLEQVSEKGKAYTNYFGRCNVAEHEKLILLAQLKPEKDSDEAVTYSLGKFGQRALDFYSIHVTKESTHPVKPLAQIAGNRYASTPVGKALSDACMGTIASFLSKYQDIIIEHQKVVKGNQKRLESLRELAGKENLEYPSVTLPPQPHTKEGVDAYNEVIARVRMWVNLNLWQKLKLSRDDAKPLLRLKNFPSFPLVERQANEVDWWDMVCNVKKLINEKKEDGKVFWQNLAGYKRQEALRPYLSSEEDRKKGKKFARYQLGDLLLHLEKKHGEDWGKVYDEAWERIDKKVEGLSKHIKLEEERRSEDAQSKAALTDWLRAKASFVIEGLKEADKDEFCRCELKLQKWYGDLRGKPFAIEAENSILDISGFSKQYNCAFIWQKDGVKKLNLYLIINYFKGGKLRFKKIKPEAFEANRFYTVINKKSGEIVPMEVNFNFDDPNLIILPLAFGKRQGREFIWNDLLSLETGSLKLANGRVIEKTLYNRRTRQDEPALFVALTFERREVLDSSNIKPMNLIGVDRGENIPAVIALTDPEGCPLSRFKDSLGNPTHILRIGESYKEKQRTIQAKKEVEQRRAGGYSRKYASKAKNLADDMVRNTARDLLYYAVTQDAMLIFENLSRGFGRQGKRTFMAERQYTRMEDWLTAKLAYEGLPSKTYLSKTLAQYTSKTCSNCGFTITSADYDRVLEKLKKTATGWMTTINGKELKVEGQITYYNRYKRQNVVKDLSVELDRLSEESVNNDISSWTKGRSGEALSLLKKRFSHRPVQEKFVCLNCGFETHADEQAALNIARSWLFLRSQEYKKYQTNKTTGNTDKRAFVETWQSFYRKKLKEVWKPAV

SEQ ID NO: 43294 - protein, 978 aa, synthetic construct
  REGION 1..978: note = engineered CasX variant
QEIKRINKIRRRLVKDSNTKKAGKTGPMKTLLVRVMTPDLRERLENLRKKPENIPQPISNTSRANLNKLLTDYTEMKKAILHVYWEEFQKDPVGLMSRVAQPASKKIDQNKLKPEMDEKGNLTTAGFACSQCGQPLFVYKLEQVSEKGKAYTNYFGRCNVAEHEKLILLAQLKPEKDSDEAVTYSLGKFGQRALDFYSIHVTKESTHPVKPLAQIAGNRYASAPVGKALSDACMGTIASFLSKYQDIIIEHQKVVKGNQKRLESLRELAGKENLEYPSVTLPPQPHTKEGVDAYNEVIARVRMWVNLNLWQKLKLSRDDAKPLLRLKNFPSFPLVERQANEVDWWDMVCNVKKLINEKKEDGKVFWQNLAGYKRQEALRPYLSSEEDRKKGKKFARYQLGDLLLHLEKKHGEDWGKVYDEAWERIDKKVEGLSKHIKLEEERRSEDAQSKAALTDWLRAKASFVIEGLKEADKDEFCRCELKLQKWYGDLRGKPFAIEAENSILDISGFSKQYNCAFIWQKDGVKKLNLYLIINYFKGGKLRFKKIKPEAFEANRFYTVINKKSGEIVPMEVNFNFDDPNLIILPLAFGKRQGREFIWNDLLSLETGSLKLANGRVIEKTLYNRRTRQDEPALFVALTFERREVLDSSNIKPMNLIGVDRGENIPAVIALTDPEGCPLSRFKDSLGNPTHILRIGESYKEKQRTIQAKKEVEQRRAGGYSRKYASKAKNLADDMVRNTARDLLYYAVTQDAMLIFENLSRGFGRQGKRTFMAERQYTRMEDWLTAKLAYEGLPSKTYLSKTLAQYTSKTCSNCGFTITSADYDRVLEKLKKTATGWMTTINGKELKVEGQITYYNRYKRQNVVKDLSVELDRLSEESVNNDISSWTKGRSGEALSLLKKRFSHRPVQEKFVCLNCGFETHADEQAALNIARSWLFLRSQEYKKYQTNKTTGNTDKRAFVETWQSFYRKKLKEVWKPAV

SEQ ID NO: 43295 - protein, 978 aa, synthetic construct
  REGION 1..978: note = engineered CasX variant
QEIKRINKIRRRLVKDSNTKKAGKTGPMKTLLVRVMTPDLRERLENLRKKPENIPQPISNTSRANLNKLLTDYTEMKKAILHVYWEEFQKDPVGLMSRVAQPASKKIDQNKLKPEMDEKGNLTTAGFACSQCGQPLFVYKLEQVSEKGKAYTNYFGRCNVAEHEKLILLAQLKPEKDSDEAVTYSLGKFGQRALDFYSIHVTKESTHPVKPLAQIAGNRYASVPVGKALSDACMGTIASFLSKYQDIIIEHQKVVKGNQKRLESLRELAGKENLEYPSVTLPPQPHTKEGVDAYNEVIARVRMWVNLNLWQKLKLSRDDAKPLLRLKNFPSFPLVERQANEVDWWDMVCNVKKLINEKKEDGKVFWQNLAGYKRQEALRPYLSSEEDRKKGKKFARYQLGDLLLHLEKKHGEDWGKVYDEAWERIDKKVEGLSKHIKLEEERRSEDAQSKAALTDWLRAKASFVIEGLKEADKDEFCRCELKLQKWYGDLRGKPFAIEAENSILDISGFSKQYNCAFIWQKDGVKKLNLYLIINYFKGGKLRFKKIKPEAFEANRFYTVINKKSGEIVPMEVNFNFDDPNLIILPLAFGKRQGREFIWNDLLSLETGSLKLANGRVIEKTLYNRRTRQDEPALFVALTFERREVLDSSNIKPMNLIGVDRGENIPAVIALTDPEGCPLSRFKDSLGNPTHILRIGESYKEKQRTIQAKKEVEQRRAGGYSRKYASKAKNLADDMVRNTARDLLYYAVTQDAMLIFENLSRGFGRQGKRTFMAERQYTRMEDWLTAKLAYEGLPSKTYLSKTLAQYTSKTCSNCGFTITSADYDRVLEKLKKTATGWMTTINGKELKVEGQITYYNRYKRQNVVKDLSVELDRLSEESVNNDISSWTKGRSGEALSLLKKRFSHRPVQEKFVCLNCGFETHADEQAALNIARSWLFLRSQEYKKYQTNKTTGNTDKRAFVETWQSFYRKKLKEVWKPAV

SEQ ID NO: 43296 - protein, 978 aa, synthetic construct
  REGION 1..978: note = engineered CasX variant
QEIKRINKIRRRLVKDSNTKKAGKTGPMKTLLVRVMTPDLRERLENLRKKPENIPQPISNTSRANLNKLLTDYTEMKKAILHVYWEEFQKDPVGLMSRVAQPASKKIDQNKLKPEMDEKGNLTTAGFACSQCGQPLFVYKLEQVSEKGKAYTNYFGRCNVAEHEKLILLAQLKPEKDSDEAVTYSLGKFGQRALDFYSIHVTKESTHPVKPLAQIAGNRYASYPVGKALSDACMGTIASFLSKYQDIIIEHQKVVKGNQKRLESLRELAGKENLEYPSVTLPPQPHTKEGVDAYNEVIARVRMWVNLNLWQKLKLSRDDAKPLLRLKGFPSFPLVERQANEVDWWDMVCNVKKLINEKKEDGKVFWQNLAGYKRQEALRPYLSSEEDRKKGKKFARYQLGDLLNHLEKKHGEDWGKVYDEAWERIDKKVEGLSKHIKLEEERRSEDAQSKAALTDWLRAKASFVIEGLKEADKDEFCRCELKLQKWYGDLRGKPFAIEAENSILDISGFSKQYNCAFIWQKDGVKKLNLYLIINYFKGGKLRFKKIKPEAFEANRFYTVINKKSGEIVPMEVNFNFDDPNLIILPLAFGKRQGREFIWNDLLSLETGSLKLANGRVIEKTLYNRRTRQDEPALFVALTFERREVLDSSNIKPMNLIGVDRGENIPAVIALTDPEGCPLSRFKDSLGNPTHILRIGESYKEKQRTIQAKKEVEQRRAGGYSRKYASKAKNLADDMVRNTARDLLYYAVTQDAMLIFENLSRGFGRQGKRTFMAERQYTRMEDWLTAKLAYEGLPSKTYLSKTLAQYTSKTCSNCGFTITSADYDRVLEKLKKTATGWMTTINGKELKVEGQITYYNRYKRQNVVKDLSVELDRLSEESVNNDISSWTKGRSGEALSLLKKRFSHRPVQEKFVCLNCGFETHADEQAALNIARSWLFLRSQEYKKYQTNKTTGNTDKRAFVETWQSFYRKKLKEVWKPAV

SEQ ID NO: 43297 - protein, 978 aa, synthetic construct
  REGION 1..978: note = engineered CasX variant
QEIKRINKIRRRLVKDSNTKKAGKTGPMKTLLVRVMTPDLRERLENLRKKPENIPQPISNTSRANLNKLLTDYTEMKKAILHVYWEEFQKDPVGLMSRVAQPASKKIDQNKLKPEMDEKGNLTTAGFACSQCGQPLFVYKLEQVSEKGKAYTNYFGRCNVAEHEKLILLAQLKPEKDSDEAVTYSLGKFGQRALDFYSIHVTKESTHPVKPLAQIAGNRYASHPVGKALSDACMGTIASFLSKYQDIIIEHQKVVKGNQKRLESLRELAGKENLEYPSVTLPPQPHTKEGVDAYNEVIARVRMWVNLNLWQKLKLSRDDAKPLLRLKGFPSFPLVERQANEVDWWDMVCNVKKLINEKKEDGKVFWQNLAGYKRQEALRPYLSSEEDRKKGKKFARYQLGDLLNHLEKKHGEDWGKVYDEAWERIDKKVEGLSKHIKLEEERRSEDAQSKAALTDWLRAKASFVIEGLKEADKDEFCRCELKLQKWYGDLRGKPFAIEAENSILDISGFSKQYNCAFIWQKDGVKKLNLYLIINYFKGGKLRFKKIKPEAFEANRFYTVINKKSGEIVPMEVNFNFDDPNLIILPLAFGKRQGREFIWNDLLSLETGSLKLANGRVIEKTLYNRRTRQDEPALFVALTFERREVLDSSNIKPMNLIGVDRGENIPAVIALTDPEGCPLSRFKDSLGNPTHILRIGESYKEKQRTIQAKKEVEQRRAGGYSRKYASKAKNLADDMVRNTARDLLYYAVTQDAMLIFENLSRGFGRQGKRTFMAERQYTRMEDWLTAKLAYEGLPSKTYLSKTLAQYTSKTCSNCGFTITSADYDRVLEKLKKTATGWMTTINGKELKVEGQITYYNRYKRQNVVKDLSVELDRLSEESVNNDISSWTKGRSGEALSLLKKRFSHRPVQEKFVCLNCGFETHADEQAALNIARSWLFLRSQEYKKYQTNKTTGNTDKRAFVETWQSFYRKKLKEVWKPAV

SEQ ID NO: 43298 - protein, 978 aa, synthetic construct
  REGION 1..978: note = engineered CasX variant
QEIKRINKIRRRLVKDSNTKKAGKTGPMKTLLVRVMTPDLRERLENLRKKPENIPQPISNTSRANLNKLLTDYTEMKKAILHVYWEEFQKDPVGLMSRVAQPASKKIDQNKLKPEMDEKGNLTTAGFACSQCGQPLFVYKLEQVSEKGKAYTNYFGRCNVAEHEKLILLAQLKPEKDSDEAVTYSLGKFGQRALDFYSIHVTKESTHPVKPLAQIAGNRYASTPVGKALSDACMGTIASFLSKYQDIIIEHQKVVKGNQKRLESLRELAGKENLEYPSVTLPPQPHTKEGVDAYNEVIARVRMWVNLNLWQKLKLSRDDAKPLLRLKGFPSFPLVERQANEVDWWDMVCNVKKLINEKKEDGKVFWQNLAGYKRQEALRPYLSSEEDRKKGKKFARYQLGDLLNHLEKKHGEDWGKVYDEAWERIDKKVEGLSKHIKLEEERRSEDAQSKAALTDWLRAKASFVIEGLKEADKDEFCRCELKLQKWYGDLRGKPFAIEAENSILDISGFSKQYNCAFIWQKDGVKKLNLYLIINYFKGGKLRFKKIKPEAFEANRFYTVINKKSGEIVPMEVNFNFDDPNLIILPLAFGKRQGREFIWNDLLSLETGSLKLANGRVIEKTLYNRRTRQDEPALFVALTFERREVLDSSNIKPMNLIGVDRGENIPAVIALTDPEGCPLSRFKDSLGNPTHILRIGESYKEKQRTIQAKKEVEQRRAGGYSRKYASKAKNLADDMVRNTARDLLYYAVTQDAMLIFENLSRGFGRQGKRTFMAERQYTRMEDWLTAKLAYEGLPSKTYLSKTLAQYTSKTCSNCGFTITSADYDRVLEKLKKTATGWMTTINGKELKVEGQITYYNRYKRQNVVKDLSVELDRLSEESVNNDISSWTKGRSGEALSLLKKRFSHRPVQEKFVCLNCGFETHADEQAALNIARSWLFLRSQEYKKYQTNKTTGNTDKRAFVETWQSFYRKKLKEVWKPAV

SEQ ID NO: 43299 - protein, 978 aa, synthetic construct
  REGION 1..978: note = engineered CasX variant
QEIKRINKIRRRLVKDSNTKKAGKTGPMKTLLVRVMTPDLRERLENLRKKPENIPQPISNTSRANLNKLLTDYTEMKKAILHVYWEEFQKDPVGLMSRVAQPASKKIDQNKLKPEMDEKGNLTTAGFACSQCGQPLFVYKLEQVSEKGKAYTNYFGRCNVAEHEKLILLAQLKPEKDSDEAVTYSLGKFGQRALDFYSIHVTKESTHPVKPLAQIAGNRYASAPVGKALSDACMGTIASFLSKYQDIIIEHQKVVKGNQKRLESLRELAGKENLEYPSVTLPPQPHTKEGVDAYNEVIARVRMWVNLNLWQKLKLSRDDAKPLLRLKGFPSFPLVERQANEVDWWDMVCNVKKLINEKKEDGKVFWQNLAGYKRQEALRPYLSSEEDRKKGKKFARYQLGDLLNHLEKKHGEDWGKVYDEAWERIDKKVEGLSKHIKLEEERRSEDAQSKAALTDWLRAKASFVIEGLKEADKDEFCRCELKLQKWYGDLRGKPFAIEAENSILDISGFSKQYNCAFIWQKDGVKKLNLYLIINYFKGGKLRFKKIKPEAFEANRFYTVINKKSGEIVPMEVNFNFDDPNLIILPLAFGKRQGREFIWNDLLSLETGSLKLANGRVIEKTLYNRRTRQDEPALFVALTFERREVLDSSNIKPMNLIGVDRGENIPAVIALTDPEGCPLSRFKDSLGNPTHILRIGESYKEKQRTIQAKKEVEQRRAGGYSRKYASKAKNLADDMVRNTARDLLYYAVTQDAMLIFENLSRGFGRQGKRTFMAERQYTRMEDWLTAKLAYEGLPSKTYLSKTLAQYTSKTCSNCGFTITSADYDRVLEKLKKTATGWMTTINGKELKVEGQITYYNRYKRQNVVKDLSVELDRLSEESVNNDISSWTKGRSGEALSLLKKRFSHRPVQEKFVCLNCGFETHADEQAALNIARSWLFLRSQEYKKYQTNKTTGNTDKRAFVETWQSFYRKKLKEVWKPAV

SEQ ID NO: 43300 - protein, 978 aa, synthetic construct
  REGION 1..978: note = engineered CasX variant
QEIKRINKIRRRLVKDSNTKKAGKTGPMKTLLVRVMTPDLRERLENLRKKPENIPQPISNTSRANLNKLLTDYTEMKKAILHVYWEEFQKDPVGLMSRVAQPASKKIDQNKLKPEMDEKGNLTTAGFACSQCGQPLFVYKLEQVSEKGKAYTNYFGRCNVAEHEKLILLAQLKPEKDSDEAVTYSLGKFGQRALDFYSIHVTKESTHPVKPLAQIAGNRYASVPVGKALSDACMGTIASFLSKYQDIIIEHQKVVKGNQKRLESLRELAGKENLEYPSVTLPPQPHTKEGVDAYNEVIARVRMWVNLNLWQKLKLSRDDAKPLLRLKGFPSFPLVERQANEVDWWDMVCNVKKLINEKKEDGKVFWQNLAGYKRQEALRPYLSSEEDRKKGKKFARYQLGDLLNHLEKKHGEDWGKVYDEAWERIDKKVEGLSKHIKLEEERRSEDAQSKAALTDWLRAKASFVIEGLKEADKDEFCRCELKLQKWYGDLRGKPFAIEAENSILDISGFSKQYNCAFIWQKDGVKKLNLYLIINYFKGGKLRFKKIKPEAFEANRFYTVINKKSGEIVPMEVNFNFDDPNLIILPLAFGKRQGREFIWNDLLSLETGSLKLANGRVIEKTLYNRRTRQDEPALFVALTFERREVLDSSNIKPMNLIGVDRGENIPAVIALTDPEGCPLSRFKDSLGNPTHILRIGESYKEKQRTIQAKKEVEQRRAGGYSRKYASKAKNLADDMVRNTARDLLYYAVTQDAMLIFENLSRGFGRQGKRTFMAERQYTRMEDWLTAKLAYEGLPSKTYLSKTLAQYTSKTCSNCGFTITSADYDRVLEKLKKTATGWMTTINGKELKVEGQITYYNRYKRQNVVKDLSVELDRLSEESVNNDISSWTKGRSGEALSLLKKRFSHRPVQEKFVCLNCGFETHADEQAALNIARSWLFLRSQEYKKYQTNKTTGNTDKRAFVETWQSFYRKKLKEVWKPAV

SEQ ID NO: 43301 - protein, 978 aa, synthetic construct
  REGION 1..978: note = engineered CasX variant
QEIKRINKIRRRLVKDSNTKKAGKTGPMKTLLVRVMTPDLRERLENLRKKPENIPQPISNTSRANLNKLLTDYTEMKKAILHVYWEEFQKDPVGLMSRVAQPASKKIDQNKLKPEMDEKGNLTTAGFACSQCGQPLFVYKLEQVSEKGKAYTNYFGRCNVAEHEKLILLAQLKPEKDSDEAVTYSLGKFGQRALDFYSIHVTKESTHPVKPLAQIAGNRYASYPVGKALSDACMGTIASFLSKYQDIIIEHQKVVKGNQKRLESLRELAGKENLEYPSVTLPPQPHTKEGVDAYNEVIARVRMWVNLNLWQKLKLSRDDAKPLLRLKGFPSFPLVERQANEVDWWDMVCNVKKLINEKKEDGKVFWQNLAGYKRQEALRPYLSSEEDRKKGKKFARYQLGDLLWHLEKKHGEDWGKVYDEAWERIDKKVEGLSKHIKLEEERRSEDAQSKAALTDWLRAKASFVIEGLKEADKDEFCRCELKLQKWYGDLRGKPFAIEAENSILDISGFSKQYNCAFIWQKDGVKKLNLYLIINYFKGGKLRFKKIKPEAFEANRFYTVINKKSGEIVPMEVNFNFDDPNLIILPLAFGKRQGREFIWNDLLSLETGSLKLANGRVIEKTLYNRRTRQDEPALFVALTFERREVLDSSNIKPMNLIGVDRGENIPAVIALTDPEGCPLSRFKDSLGNPTHILRIGESYKEKQRTIQAKKEVEQRRAGGYSRKYASKAKNLADDMVRNTARDLLYYAVTQDAMLIFENLSRGFGRQGKRTFMAERQYTRMEDWLTAKLAYEGLPSKTYLSKTLAQYTSKTCSNCGFTITSADYDRVLEKLKKTATGWMTTINGKELKVEGQITYYNRYKRQNVVKDLSVELDRLSEESVNNDISSWTKGRSGEALSLLKKRFSHRPVQEKFVCLNCGFETHADEQAALNIARSWLFLRSQEYKKYQTNKTTGNTDKRAFVETWQSFYRKKLKEVWKPAV

SEQ ID NO: 43302 - protein, 978 aa, synthetic construct
  REGION 1..978: note = engineered CasX variant
QEIKRINKIRRRLVKDSNTKKAGKTGPMKTLLVRVMTPDLRERLENLRKKPENIPQPISNTSRANLNKLLTDYTEMKKAILHVYWEEFQKDPVGLMSRVAQPASKKIDQNKLKPEMDEKGNLTTAGFACSQCGQPLFVYKLEQVSEKGKAYTNYFGRCNVAEHEKLILLAQLKPEKDSDEAVTYSLGKFGQRALDFYSIHVTKESTHPVKPLAQIAGNRYASHPVGKALSDACMGTIASFLSKYQDIIIEHQKVVKGNQKRLESLRELAGKENLEYPSVTLPPQPHTKEGVDAYNEVIARVRMWVNLNLWQKLKLSRDDAKPLLRLKGFPSFPLVERQANEVDWWDMVCNVKKLINEKKEDGKVFWQNLAGYKRQEALRPYLSSEEDRKKGKKFARYQLGDLLWHLEKKHGEDWGKVYDEAWERIDKKVEGLSKHIKLEEERRSEDAQSKAALTDWLRAKASFVIEGLKEADKDEFCRCELKLQKWYGDLRGKPFAIEAENSILDISGFSKQYNCAFIWQKDGVKKLNLYLIINYFKGGKLRFKKIKPEAFEANRFYTVINKKSGEIVPMEVNFNFDDPNLIILPLAFGKRQGREFIWNDLLSLETGSLKLANGRVIEKTLYNRRTRQDEPALFVALTFERREVLDSSNIKPMNLIGVDRGENIPAVIALTDPEGCPLSRFKDSLGNPTHILRIGESYKEKQRTIQAKKEVEQRRAGGYSRKYASKAKNLADDMVRNTARDLLYYAVTQDAMLIFENLSRGFGRQGKRTFMAERQYTRMEDWLTAKLAYEGLPSKTYLSKTLAQYTSKTCSNCGFTITSADYDRVLEKLKKTATGWMTTINGKELKVEGQITYYNRYKRQNVVKDLSVELDRLSEESVNNDISSWTKGRSGEALSLLKKRFSHRPVQEKFVCLNCGFETHADEQAALNIARSWLFLRSQEYKKYQTNKTTGNTDKRAFVETWQSFYRKKLKEVWKPAV

SEQ ID NO: 43303 - protein, 978 aa, synthetic construct
  REGION 1..978: note = engineered CasX variant
QEIKRINKIRRRLVKDSNTKKAGKTGPMKTLLVRVMTPDLRERLENLRKKPENIPQPISNTSRANLNKLLTDYTEMKKAILHVYWEEFQKDPVGLMSRVAQPASKKIDQNKLKPEMDEKGNLTTAGFACSQCGQPLFVYKLEQVSEKGKAYTNYFGRCNVAEHEKLILLAQLKPEKDSDEAVTYSLGKFGQRALDFYSIHVTKESTHPVKPLAQIAGNRYASTPVGKALSDACMGTIASFLSKYQDIIIEHQKVVKGNQKRLESLRELAGKENLEYPSVTLPPQPHTKEGVDAYNEVIARVRMWVNLNLWQKLKLSRDDAKPLLRLKGFPSFPLVERQANEVDWWDMVCNVKKLINEKKEDGKVFWQNLAGYKRQEALRPYLSSEEDRKKGKKFARYQLGDLLWHLEKKHGEDWGKVYDEAWERIDKKVEGLSKHIKLEEERRSEDAQSKAALTDWLRAKASFVIEGLKEADKDEFCRCELKLQKWYGDLRGKPFAIEAENSILDISGFSKQYNCAFIWQKDGVKKLNLYLIINYFKGGKLRFKKIKPEAFEANRFYTVINKKSGEIVPMEVNFNFDDPNLIILPLAFGKRQGREFIWNDLLSLETGSLKLANGRVIEKTLYNRRTRQDEPALFVALTFERREVLDSSNIKPMNLIGVDRGENIPAVIALTDPEGCPLSRFKDSLGNPTHILRIGESYKEKQRTIQAKKEVEQRRAGGYSRKYASKAKNLADDMVRNTARDLLYYAVTQDAMLIFENLSRGFGRQGKRTFMAERQYTRMEDWLTAKLAYEGLPSKTYLSKTLAQYTSKTCSNCGFTITSADYDRVLEKLKKTATGWMTTINGKELKVEGQITYYNRYKRQNVVKDLSVELDRLSEESVNNDISSWTKGRSGEALSLLKKRFSHRPVQEKFVCLNCGFETHADEQAALNIARSWLFLRSQEYKKYQTNKTTGNTDKRAFVETWQSFYRKKLKEVWKPAV

SEQ ID NO: 43304 - protein, 978 aa, synthetic construct
  REGION 1..978: note = engineered CasX variant
QEIKRINKIRRRLVKDSNTKKAGKTGPMKTLLVRVMTPDLRERLENLRKKPENIPQPISNTSRANLNKLLTDYTEMKKAILHVYWEEFQKDPVGLMSRVAQPASKKIDQNKLKPEMDEKGNLTTAGFACSQCGQPLFVYKLEQVSEKGKAYTNYFGRCNVAEHEKLILLAQLKPEKDSDEAVTYSLGKFGQRALDFYSIHVTKESTHPVKPLAQIAGNRYASAPVGKALSDACMGTIASFLSKYQDIIIEHQKVVKGNQKRLESLRELAGKENLEYPSVTLPPQPHTKEGVDAYNEVIARVRMWVNLNLWQKLKLSRDDAKPLLRLKGFPSFPLVERQANEVDWWDMVCNVKKLINEKKEDGKVFWQNLAGYKRQEALRPYLSSEEDRKKGKKFARYQLGDLLWHLEKKHGEDWGKVYDEAWERIDKKVEGLSKHIKLEEERRSEDAQSKAALTDWLRAKASFVIEGLKEADKDEFCRCELKLQKWYGDLRGKPFAIEAENSILDISGFSKQYNCAFIWQKDGVKKLNLYLIINYFKGGKLRFKKIKPEAFEANRFYTVINKKSGEIVPMEVNFNFDDPNLIILPLAFGKRQGREFIWNDLLSLETGSLKLANGRVIEKTLYNRRTRQDEPALFVALTFERREVLDSSNIKPMNLIGVDRGENIPAVIALTDPEGCPLSRFKDSLGNPTHILRIGESYKEKQRTIQAKKEVEQRRAGGYSRKYASKAKNLADDMVRNTARDLLYYAVTQDAMLIFENLSRGFGRQGKRTFMAERQYTRMEDWLTAKLAYEGLPSKTYLSKTLAQYTSKTCSNCGFTITSADYDRVLEKLKKTATGWMTTINGKELKVEGQITYYNRYKRQNVVKDLSVELDRLSEESVNNDISSWTKGRSGEALSLLKKRFSHRPVQEKFVCLNCGFETHADEQAALNIARSWLFLRSQEYKKYQTNKTTGNTDKRAFVETWQSFYRKKLKEVWKPAV

SEQ ID NO: 43305 - protein, 978 aa, synthetic construct
  REGION 1..978: note = engineered CasX variant
QEIKRINKIRRRLVKDSNTKKAGKTGPMKTLLVRVMTPDLRERLENLRKKPENIPQPISNTSRANLNKLLTDYTEMKKAILHVYWEEFQKDPVGLMSRVAQPASKKIDQNKLKPEMDEKGNLTTAGFACSQCGQPLFVYKLEQVSEKGKAYTNYFGRCNVAEHEKLILLAQLKPEKDSDEAVTYSLGKFGQRALDFYSIHVTKESTHPVKPLAQIAGNRYASVPVGKALSDACMGTIASFLSKYQDIIIEHQKVVKGNQKRLESLRELAGKENLEYPSVTLPPQPHTKEGVDAYNEVIARVRMWVNLNLWQKLKLSRDDAKPLLRLKGFPSFPLVERQANEVDWWDMVCNVKKLINEKKEDGKVFWQNLAGYKRQEALRPYLSSEEDRKKGKKFARYQLGDLLWHLEKKHGEDWGKVYDEAWERIDKKVEGLSKHIKLEEERRSEDAQSKAALTDWLRAKASFVIEGLKEADKDEFCRCELKLQKWYGDLRGKPFAIEAENSILDISGFSKQYNCAFIWQKDGVKKLNLYLIINYFKGGKLRFKKIKPEAFEANRFYTVINKKSGEIVPMEVNFNFDDPNLIILPLAFGKRQGREFIWNDLLSLETGSLKLANGRVIEKTLYNRRTRQDEPALFVALTFERREVLDSSNIKPMNLIGVDRGENIPAVIALTDPEGCPLSRFKDSLGNPTHILRIGESYKEKQRTIQAKKEVEQRRAGGYSRKYASKAKNLADDMVRNTARDLLYYAVTQDAMLIFENLSRGFGRQGKRTFMAERQYTRMEDWLTAKLAYEGLPSKTYLSKTLAQYTSKTCSNCGFTITSADYDRVLEKLKKTATGWMTTINGKELKVEGQITYYNRYKRQNVVKDLSVELDRLSEESVNNDISSWTKGRSGEALSLLKKRFSHRPVQEKFVCLNCGFETHADEQAALNIARSWLFLRSQEYKKYQTNKTTGNTDKRAFVETWQSFYRKKLKEVWKPAV

SEQ ID NO: 43306 - protein, 978 aa, synthetic construct
  REGION 1..978: note = engineered CasX variant
QEIKRINKIRRRLVKDSNTKKAGKTGPMKTLLVRVMTPDLRERLENLRKKPENIPQPISNTSRANLNKLLTDYTEMKKAILHVYWEEFQKDPVGLMSRVAQPASKKIDQNKLKPEMDEKGNLTTAGFACSQCGQPLFVYKLEQVSEKGKAYTNYFGRCNVAEHEKLILLAQLKPEKDSDEAVTYSLGKFGQRALDFYSIHVTKESTHPVKPLAQIAGNRYASYPVGKALSDACMGTIASFLSKYQDIIIEHQKVVKGNQKRLESLRELAGKENLEYPSVTLPPQPHTKEGVDAYNEVIARVRMWVNLNLWQKLKLSRDDAKPLLRLKGFPSFPLVERQANEVDWWDMVCNVKKLINEKKEDGKVFWQNLAGYKRQEALRPYLSSEEDRKKGKKFARYQLGDLLLHLYKKHGEDWGKVYDEAWERIDKKVEGLSKHIKLEEERRSEDAQSKAALTDWLRAKASFVIEGLKEADKDEFCRCELKLQKWYGDLRGKPFAIEAENSILDISGFSKQYNCAFIWQKDGVKKLNLYLIINYFKGGKLRFKKIKPEAFEANRFYTVINKKSGEIVPMEVNFNFDDPNLIILPLAFGKRQGREFIWNDLLSLETGSLKLANGRVIEKTLYNRRTRQDEPALFVALTFERREVLDSSNIKPMNLIGVDRGENIPAVIALTDPEGCPLSRFKDSLGNPTHILRIGESYKEKQRTIQAKKEVEQRRAGGYSRKYASKAKNLADDMVRNTARDLLYYAVTQDAMLIFENLSRGFGRQGKRTFMAERQYTRMEDWLTAKLAYEGLPSKTYLSKTLAQYTSKTCSNCGFTITSADYDRVLEKLKKTATGWMTTINGKELKVEGQITYYNRYKRQNVVKDLSVELDRLSEESVNNDISSWTKGRSGEALSLLKKRFSHRPVQEKFVCLNCGFETHADEQAALNIARSWLFLRSQEYKKYQTNKTTGNTDKRAFVETWQSFYRKKLKEVWKPAV

SEQ ID NO: 43307 - protein, 978 aa, synthetic construct
  REGION 1..978: note = engineered CasX variant
QEIKRINKIRRRLVKDSNTKKAGKTGPMKTLLVRVMTPDLRERLENLRKKPENIPQPISNTSRANLNKLLTDYTEMKKAILHVYWEEFQKDPVGLMSRVAQPASKKIDQNKLKPEMDEKGNLTTAGFACSQCGQPLFVYKLEQVSEKGKAYTNYFGRCNVAEHEKLILLAQLKPEKDSDEAVTYSLGKFGQRALDFYSIHVTKESTHPVKPLAQIAGNRYASHPVGKALSDACMGTIASFLSKYQDIIIEHQKVVKGNQKRLESLRELAGKENLEYPSVTLPPQPHTKEGVDAYNEVIARVRMWVNLNLWQKLKLSRDDAKPLLRLKGFPSFPLVERQANEVDWWDMVCNVKKLINEKKEDGKVFWQNLAGYKRQEALRPYLSSEEDRKKGKKFARYQLGDLLLHLYKKHGEDWGKVYDEAWERIDKKVEGLSKHIKLEEERRSEDAQSKAALTDWLRAKASFVIEGLKEADKDEFCRCELKLQKWYGDLRGKPFAIEAENSILDISGFSKQYNCAFIWQKDGVKKLNLYLIINYFKGGKLRFKKIKPEAFEANRFYTVINKKSGEIVPMEVNFNFDDPNLIILPLAFGKRQGREFIWNDLLSLETGSLKLANGRVIEKTLYNRRTRQDEPALFVALTFERREVLDSSNIKPMNLIGVDRGENIPAVIALTDPEGCPLSRFKDSLGNPTHILRIGESYKEKQRTIQAKKEVEQRRAGGYSRKYASKAKNLADDMVRNTARDLLYYAVTQDAMLIFENLSRGFGRQGKRTFMAERQYTRMEDWLTAKLAYEGLPSKTYLSKTLAQYTSKTCSNCGFTITSADYDRVLEKLKKTATGWMTTINGKELKVEGQITYYNRYKRQNVVKDLSVELDRLSEESVNNDISSWTKGRSGEALSLLKKRFSHRPVQEKFVCLNCGFETHADEQAALNIARSWLFLRSQEYKKYQTNKTTGNTDKRAFVETWQSFYRKKLKEVWKPAV

SEQ ID NO: 43308 - protein, 978 aa, synthetic construct
  REGION 1..978: note = engineered CasX variant
QEIKRINKIRRRLVKDSNTKKAGKTGPMKTLLVRVMTPDLRERLENLRKKPENIPQPISNTSRANLNKLLTDYTEMKKAILHVYWEEFQKDPVGLMSRVAQPASKKIDQNKLKPEMDEKGNLTTAGFACSQCGQPLFVYKLEQVSEKGKAYTNYFGRCNVAEHEKLILLAQLKPEKDSDEAVTYSLGKFGQRALDFYSIHVTKESTHPVKPLAQIAGNRYASTPVGKALSDACMGTIASFLSKYQDIIIEHQKVVKGNQKRLESLRELAGKENLEYPSVTLPPQPHTKEGVDAYNEVIARVRMWVNLNLWQKLKLSRDDAKPLLRLKGFPSFPLVERQANEVDWWDMVCNVKKLINEKKEDGKVFWQNLAGYKRQEALRPYLSSEEDRKKGKKFARYQLGDLLLHLYKKHGEDWGKVYDEAWERIDKKVEGLSKHIKLEEERRSEDAQSKAALTDWLRAKASFVIEGLKEADKDEFCRCELKLQKWYGDLRGKPFAIEAENSILDISGFSKQYNCAFIWQKDGVKKLNLYLIINYFKGGKLRFKKIKPEAFEANRFYTVINKKSGEIVPMEVNFNFDDPNLIILPLAFGKRQGREFIWNDLLSLETGSLKLANGRVIEKTLYNRRTRQDEPALFVALTFERREVLDSSNIKPMNLIGVDRGENIPAVIALTDPEGCPLSRFKDSLGNPTHILRIGESYKEKQRTIQAKKEVEQRRAGGYSRKYASKAKNLADDMVRNTARDLLYYAVTQDAMLIFENLSRGFGRQGKRTFMAERQYTRMEDWLTAKLAYEGLPSKTYLSKTLAQYTSKTCSNCGFTITSADYDRVLEKLKKTATGWMTTINGKELKVEGQITYYNRYKRQNVVKDLSVELDRLSEESVNNDISSWTKGRSGEALSLLKKRFSHRPVQEKFVCLNCGFETHADEQAALNIARSWLFLRSQEYKKYQTNKTTGNTDKRAFVETWQSFYRKKLKEVWKPAV

SEQ ID NO: 43309 - protein, 978 aa, synthetic construct
  REGION 1..978: note = engineered CasX variant
QEIKRINKIRRRLVKDSNTKKAGKTGPMKTLLVRVMTPDLRERLENLRKKPENIPQPISNTSRANLNKLLTDYTEMKKAILHVYWEEFQKDPVGLMSRVAQPASKKIDQNKLKPEMDEKGNLTTAGFACSQCGQPLFVYKLEQVSEKGKAYTNYFGRCNVAEHEKLILLAQLKPEKDSDEAVTYSLGKFGQRALDFYSIHVTKESTHPVKPLAQIAGNRYASAPVGKALSDACMGTIASFLSKYQDIIIEHQKVVKGNQKRLESLRELAGKENLEYPSVTLPPQPHTKEGVDAYNEVIARVRMWVNLNLWQKLKLSRDDAKPLLRLKGFPSFPLVERQANEVDWWDMVCNVKKLINEKKEDGKVFWQNLAGYKRQEALRPYLSSEEDRKKGKKFARYQLGDLLLHLYKKHGEDWGKVYDEAWERIDKKVEGLSKHIKLEEERRSEDAQSKAALTDWLRAKASFVIEGLKEADKDEFCRCELKLQKWYGDLRGKPFAIEAENSILDISGFSKQYNCAFIWQKDGVKKLNLYLIINYFKGGKLRFKKIKPEAFEANRFYTVINKKSGEIVPMEVNFNFDDPNLIILPLAFGKRQGREFIWNDLLSLETGSLKLANGRVIEKTLYNRRTRQDEPALFVALTFERREVLDSSNIKPMNLIGVDRGENIPAVIALTDPEGCPLSRFKDSLGNPTHILRIGESYKEKQRTIQAKKEVEQRRAGGYSRKYASKAKNLADDMVRNTARDLLYYAVTQDAMLIFENLSRGFGRQGKRTFMAERQYTRMEDWLTAKLAYEGLPSKTYLSKTLAQYTSKTCSNCGFTITSADYDRVLEKLKKTATGWMTTINGKELKVEGQITYYNRYKRQNVVKDLSVELDRLSEESVNNDISSWTKGRSGEALSLLKKRFSHRPVQEKFVCLNCGFETHADEQAALNIARSWLFLRSQEYKKYQTNKTTGNTDKRAFVETWQSFYRKKLKEVWKPAV

SEQ ID NO: 43310 - protein, 978 aa, synthetic construct
  REGION 1..978: note = engineered CasX variant
QEIKRINKIRRRLVKDSNTKKAGKTGPMKTLLVRVMTPDLRERLENLRKKPENIPQPISNTSRANLNKLLTDYTEMKKAILHVYWEEFQKDPVGLMSRVAQPASKKIDQNKLKPEMDEKGNLTTAGFACSQCGQPLFVYKLEQVSEKGKAYTNYFGRCNVAEHEKLILLAQLKPEKDSDEAVTYSLGKFGQRALDFYSIHVTKESTHPVKPLAQIAGNRYASVPVGKALSDACMGTIASFLSKYQDIIIEHQKVVKGNQKRLESLRELAGKENLEYPSVTLPPQPHTKEGVDAYNEVIARVRMWVNLNLWQKLKLSRDDAKPLLRLKGFPSFPLVERQANEVDWWDMVCNVKKLINEKKEDGKVFWQNLAGYKRQEALRPYLSSEEDRKKGKKFARYQLGDLLLHLYKKHGEDWGKVYDEAWERIDKKVEGLSKHIKLEEERRSEDAQSKAALTDWLRAKASFVIEGLKEADKDEFCRCELKLQKWYGDLRGKPFAIEAENSILDISGFSKQYNCAFIWQKDGVKKLNLYLIINYFKGGKLRFKKIKPEAFEANRFYTVINKKSGEIVPMEVNFNFDDPNLIILPLAFGKRQGREFIWNDLLSLETGSLKLANGRVIEKTLYNRRTRQDEPALFVALTFERREVLDSSNIKPMNLIGVDRGENIPAVIALTDPEGCPLSRFKDSLGNPTHILRIGESYKEKQRTIQAKKEVEQRRAGGYSRKYASKAKNLADDMVRNTARDLLYYAVTQDAMLIFENLSRGFGRQGKRTFMAERQYTRMEDWLTAKLAYEGLPSKTYLSKTLAQYTSKTCSNCGFTITSADYDRVLEKLKKTATGWMTTINGKELKVEGQITYYNRYKRQNVVKDLSVELDRLSEESVNNDISSWTKGRSGEALSLLKKRFSHRPVQEKFVCLNCGFETHADEQAALNIARSWLFLRSQEYKKYQTNKTTGNTDKRAFVETWQSFYRKKLKEVWKPAV

SEQ ID NO: 43311 - protein, 978 aa, synthetic construct
  REGION 1..978: note = engineered CasX variant
QEIKRINKIRRRLVKDSNTKKAGKTGPMKTLLVRVMTPDLRERLENLRKKPENIPQPISNTSRANLNKLLTDYTEMKKAILHVYWEEFQKDPVGLMSRVAQPASKKIDQNKLKPEMDEKGNLTTAGFACSQCGQPLFVYKLEQVSEKGKAYTNYFGRCNVAEHEKLILLAQLKPEKDSDEAVTYSLGKFGQRALDFYSIHVTKESTHPVKPLAQIAGNRYASYPVGKALSDACMGTIASFLSKYQDIIIEHQKVVKGNQKRLESLRELAGKENLEYPSVTLPPQPHTKEGVDAYNEVIARVRMWVNLNLWQKLKLSRDDAKPLLRLKGFPSFPLVERQANEVDWWDMVCNVKKLINEKKEDGKVFWQNLAGYKRQEALRPYLSSEEDRKKGKKFARYQLGDLLLHLEKKHPEDWGKVYDEAWERIDKKVEGLSKHIKLEEERRSEDAQSKAALTDWLRAKASFVIEGLKEADKDEFCRCELKLQKWYGDLRGKPFAIEAENSILDISGFSKQYNCAFIWQKDGVKKLNLYLIINYFKGGKLRFKKIKPEAFEANRFYTVINKKSGEIVPMEVNFNFDDPNLIILPLAFGKRQGREFIWNDLLSLETGSLKLANGRVIEKTLYNRRTRQDEPALFVALTFERREVLDSSNIKPMNLIGVDRGENIPAVIALTDPEGCPLSRFKDSLGNPTHILRIGESYKEKQRTIQAKKEVEQRRAGGYSRKYASKAKNLADDMVRNTARDLLYYAVTQDAMLIFENLSRGFGRQGKRTFMAERQYTRMEDWLTAKLAYEGLPSKTYLSKTLAQYTSKTCSNCGFTITSADYDRVLEKLKKTATGWMTTINGKELKVEGQITYYNRYKRQNVVKDLSVELDRLSEESVNNDISSWTKGRSGEALSLLKKRFSHRPVQEKFVCLNCGFETHADEQAALNIARSWLFLRSQEYKKYQTNKTTGNTDKRAFVETWQSFYRKKLKEVWKPAV

SEQ ID NO: 43312 - protein, 978 aa, synthetic construct
  REGION 1..978: note = engineered CasX variant
QEIKRINKIRRRLVKDSNTKKAGKTGPMKTLLVRVMTPDLRERLENLRKKPENIPQPISNTSRANLNKLLTDYTEMKKAILHVYWEEFQKDPVGLMSRVAQPASKKIDQNKLKPEMDEKGNLTTAGFACSQCGQPLFVYKLEQVSEKGKAYTNYFGRCNVAEHEKLILLAQLKPEKDSDEAVTYSLGKFGQRALDFYSIHVTKESTHPVKPLAQIAGNRYASHPVGKALSDACMGTIASFLSKYQDIIIEHQKVVKGNQKRLESLRELAGKENLEYPSVTLPPQPHTKEGVDAYNEVIARVRMWVNLNLWQKLKLSRDDAKPLLRLKGFPSFPLVERQANEVDWWDMVCNVKKLINEKKEDGKVFWQNLAGYKRQEALRPYLSSEEDRKKGKKFARYQLGDLLLHLEKKHPEDWGKVYDEAWERIDKKVEGLSKHIKLEEERRSEDAQSKAALTDWLRAKASFVIEGLKEADKDEFCRCELKLQKWYGDLRGKPFAIEAENSILDISGFSKQYNCAFIWQKDGVKKLNLYLIINYFKGGKLRFKKIKPEAFEANRFYTVINKKSGEIVPMEVNFNFDDPNLIILPLAFGKRQGREFIWNDLLSLETGSLKLANGRVIEKTLYNRRTRQDEPALFVALTFERREVLDSSNIKPMNLIGVDRGENIPAVIALTDPEGCPLSRFKDSLGNPTHILRIGESYKEKQRTIQAKKEVEQRRAGGYSRKYASKAKNLADDMVRNTARDLLYYAVTQDAMLIFENLSRGFGRQGKRTFMAERQYTRMEDWLTAKLAYEGLPSKTYLSKTLAQYTSKTCSNCGFTITSADYDRVLEKLKKTATGWMTTINGKELKVEGQITYYNRYKRQNVVKDLSVELDRLSEESVNNDISSWTKGRSGEALSLLKKRFSHRPVQEKFVCLNCGFETHADEQAALNIARSWLFLRSQEYKKYQTNKTTGNTDKRAFVETWQSFYRKKLKEVWKPAV

SEQ ID NO: 43313 - protein, 978 aa, synthetic construct
  REGION 1..978: note = engineered CasX variant
QEIKRINKIRRRLVKDSNTKKAGKTGPMKTLLVRVMTPDLRERLENLRKKPENIPQPISNTSRANLNKLLTDYTEMKKAILHVYWEEFQKDPVGLMSRVAQPASKKIDQNKLKPEMDEKGNLTTAGFACSQCGQPLFVYKLEQVSEKGKAYTNYFGRCNVAEHEKLILLAQLKPEKDSDEAVTYSLGKFGQRALDFYSIHVTKESTHPVKPLAQIAGNRYASTPVGKALSDACMGTIASFLSKYQDIIIEHQKVVKGNQKRLESLRELAGKENLEYPSVTLPPQPHTKEGVDAYNEVIARVRMWVNLNLWQKLKLSRDDAKPLLRLKGFPSFPLVERQANEVDWWDMVCNVKKLINEKKEDGKVFWQNLAGYKRQEALRPYLSSEEDRKKGKKFARYQLGDLLLHLEKKHPEDWGKVYDEAWERIDKKVEGLSKHIKLEEERRSEDAQSKAALTDWLRAKASFVIEGLKEADKDEFCRCELKLQKWYGDLRGKPFAIEAENSILDISGFSKQYNCAFIWQKDGVKKLNLYLIINYFKGGKLRFKKIKPEAFEANRFYTVINKKSGEIVPMEVNFNFDDPNLIILPLAFGKRQGREFIWNDLLSLETGSLKLANGRVIEKTLYNRRTRQDEPALFVALTFERREVLDSSNIKPMNLIGVDRGENIPAVIALTDPEGCPLSRFKDSLGNPTHILRIGESYKEKQRTIQAKKEVEQRRAGGYSRKYASKAKNLADDMVRNTARDLLYYAVTQDAMLIFENLSRGFGRQGKRTFMAERQYTRMEDWLTAKLAYEGLPSKTYLSKTLAQYTSKTCSNCGFTITSADYDRVLEKLKKTATGWMTTINGKELKVEGQITYYNRYKRQNVVKDLSVELDRLSEESVNNDISSWTKGRSGEALSLLKKRFSHRPVQEKFVCLNCGFETHADEQAALNIARSWLFLRSQEYKKYQTNKTTGNTDKRAFVETWQSFYRKKLKEVWKPAV

SEQ ID NO: 43314 - protein, 978 aa, synthetic construct
  REGION 1..978: note = engineered CasX variant
QEIKRINKIRRRLVKDSNTKKAGKTGPMKTLLVRVMTPDLRERLENLRKKPENIPQPISNTSRANLNKLLTDYTEMKKAILHVYWEEFQKDPVGLMSRVAQPASKKIDQNKLKPEMDEKGNLTTAGFACSQCGQPLFVYKLEQVSEKGKAYTNYFGRCNVAEHEKLILLAQLKPEKDSDEAVTYSLGKFGQRALDFYSIHVTKESTHPVKPLAQIAGNRYASAPVGKALSDACMGTIASFLSKYQDIIIEHQKVVKGNQKRLESLRELAGKENLEYPSVTLPPQPHTKEGVDAYNEVIARVRMWVNLNLWQKLKLSRDDAKPLLRLKGFPSFPLVERQANEVDWWDMVCNVKKLINEKKEDGKVFWQNLAGYKRQEALRPYLSSEEDRKKGKKFARYQLGDLLLHLEKKHPEDWGKVYDEAWERIDKKVEGLSKHIKLEEERRSEDAQSKAALTDWLRAKASFVIEGLKEADKDEFCRCELKLQKWYGDLRGKPFAIEAENSILDISGFSKQYNCAFIWQKDGVKKLNLYLIINYFKGGKLRFKKIKPEAFEANRFYTVINKKSGEIVPMEVNFNFDDPNLIILPLAFGKRQGREFIWNDLLSLETGSLKLANGRVIEKTLYNRRTRQDEPALFVALTFERREVLDSSNIKPMNLIGVDRGENIPAVIALTDPEGCPLSRFKDSLGNPTHILRIGESYKEKQRTIQAKKEVEQRRAGGYSRKYASKAKNLADDMVRNTARDLLYYAVTQDAMLIFENLSRGFGRQGKRTFMAERQYTRMEDWLTAKLAYEGLPSKTYLSKTLAQYTSKTCSNCGFTITSADYDRVLEKLKKTATGWMTTINGKELKVEGQITYYNRYKRQNVVKDLSVELDRLSEESVNNDISSWTKGRSGEALSLLKKRFSHRPVQEKFVCLNCGFETHADEQAALNIARSWLFLRSQEYKKYQTNKTTGNTDKRAFVETWQSFYRKKLKEVWKPAV

SEQ ID NO: 43315 - protein, 978 aa, synthetic construct
  REGION 1..978: note = engineered CasX variant
QEIKRINKIRRRLVKDSNTKKAGKTGPMKTLLVRVMTPDLRERLENLRKKPENIPQPISNTSRANLNKLLTDYTEMKKAILHVYWEEFQKDPVGLMSRVAQPASKKIDQNKLKPEMDEKGNLTTAGFACSQCGQPLFVYKLEQVSEKGKAYTNYFGRCNVAEHEKLILLAQLKPEKDSDEAVTYSLGKFGQRALDFYSIHVTKESTHPVKPLAQIAGNRYASVPVGKALSDACMGTIASFLSKYQDIIIEHQKVVKGNQKRLESLRELAGKENLEYPSVTLPPQPHTKEGVDAYNEVIARVRMWVNLNLWQKLKLSRDDAKPLLRLKGFPSFPLVERQANEVDWWDMVCNVKKLINEKKEDGKVFWQNLAGYKRQEALRPYLSSEEDRKKGKKFARYQLGDLLLHLEKKHPEDWGKVYDEAWERIDKKVEGLSKHIKLEEERRSEDAQSKAALTDWLRAKASFVIEGLKEADKDEFCRCELKLQKWYGDLRGKPFAIEAENSILDISGFSKQYNCAFIWQKDGVKKLNLYLIINYFKGGKLRFKKIKPEAFEANRFYTVINKKSGEIVPMEVNFNFDDPNLIILPLAFGKRQGREFIWNDLLSLETGSLKLANGRVIEKTLYNRRTRQDEPALFVALTFERREVLDSSNIKPMNLIGVDRGENIPAVIALTDPEGCPLSRFKDSLGNPTHILRIGESYKEKQRTIQAKKEVEQRRAGGYSRKYASKAKNLADDMVRNTARDLLYYAVTQDAMLIFENLSRGFGRQGKRTFMAERQYTRMEDWLTAKLAYEGLPSKTYLSKTLAQYTSKTCSNCGFTITSADYDRVLEKLKKTATGWMTTINGKELKVEGQITYYNRYKRQNVVKDLSVELDRLSEESVNNDISSWTKGRSGEALSLLKKRFSHRPVQEKFVCLNCGFETHADEQAALNIARSWLFLRSQEYKKYQTNKTTGNTDKRAFVETWQSFYRKKLKEVWKPAV

SEQ ID NO: 43316 - protein, 979 aa, synthetic construct
  REGION 1..979: note = engineered CasX variant
QEIKRINKIRRRLVKDSNTKKAGKTGPMKTLLVRVMTPDLRERLENLRKKPENIPQPISNTSRANLNKLLTDYTEMKKAILHVYWEEFQKDPVGLMSRVAQPASKKIDQNKLKPEMDEKGNLTTAGFACSQCGQPLFVYKLEQVSEKGKAYTNYFGRCNVAEHEKLILLAQLKPEKDSDEAVTYSLGKFGQRALDFYSIHVTKESTHPVKPLAQIAGNRYASYPVGKALSDACMGTIASFLSKYQDIIIEHQKVVKGNQKRLESLRELAGKENLEYPSVTLPPQPHTKEGVDAYNEVIARVRMWVNLNLWQKLKLSRDDAKPLLRLKGFPSFPLVERQANEVDWWDMVCNVKKLINEKKEDGKVFWQNLAGYKRQEALRPYLSSEEDRKKGKKFARYQLGDLLLHLEKKHGERDWGKVYDEAWERIDKKVEGLSKHIKLEEERRSEDAQSKAALTDWLRAKASFVIEGLKEADKDEFCRCELKLQKWYGDLRGKPFAIEAENSILDISGFSKQYNCAFIWQKDGVKKLNLYLIINYFKGGKLRFKKIKPEAFEANRFYTVINKKSGEIVPMEVNFNFDDPNLIILPLAFGKRQGREFIWNDLLSLETGSLKLANGRVIEKTLYNRRTRQDEPALFVALTFERREVLDSSNIKPMNLIGVDRGENIPAVIALTDPEGCPLSRFKDSLGNPTHILRIGESYKEKQRTIQAKKEVEQRRAGGYSRKYASKAKNLADDMVRNTARDLLYYAVTQDAMLIFENLSRGFGRQGKRTFMAERQYTRMEDWLTAKLAYEGLPSKTYLSKTLAQYTSKTCSNCGFTITSADYDRVLEKLKKTATGWMTTINGKELKVEGQITYYNRYKRQNVVKDLSVELDRLSEESVNNDISSWTKGRSGEALSLLKKRFSHRPVQEKFVCLNCGFETHADEQAALNIARSWLFLRSQEYKKYQTNKTTGNTDKRAFVETWQSFYRKKLKEVWKPAV

SEQ ID NO: 43317 - protein, 979 aa, synthetic construct
  REGION 1..979: note = engineered CasX variant
QEIKRINKIRRRLVKDSNTKKAGKTGPMKTLLVRVMTPDLRERLENLRKKPENIPQPISNTSRANLNKLLTDYTEMKKAILHVYWEEFQKDPVGLMSRVAQPASKKIDQNKLKPEMDEKGNLTTAGFACSQCGQPLFVYKLEQVSEKGKAYTNYFGRCNVAEHEKLILLAQLKPEKDSDEAVTYSLGKFGQRALDFYSIHVTKESTHPVKPLAQIAGNRYASHPVGKALSDACMGTIASFLSKYQDIIIEHQKVVKGNQKRLESLRELAGKENLEYPSVTLPPQPHTKEGVDAYNEVIARVRMWVNLNLWQKLKLSRDDAKPLLRLKGFPSFPLVERQANEVDWWDMVCNVKKLINEKKEDGKVFWQNLAGYKRQEALRPYLSSEEDRKKGKKFARYQLGDLLLHLEKKHGERDWGKVYDEAWERIDKKVEGLSKHIKLEEERRSEDAQSKAALTDWLRAKASFVIEGLKEADKDEFCRCELKLQKWYGDLRGKPFAIEAENSILDISGFSKQYNCAFIWQKDGVKKLNLYLIINYFKGGKLRFKKIKPEAFEANRFYTVINKKSGEIVPMEVNFNFDDPNLIILPLAFGKRQGREFIWNDLLSLETGSLKLANGRVIEKTLYNRRTRQDEPALFVALTFERREVLDSSNIKPMNLIGVDRGENIPAVIALTDPEGCPLSRFKDSLGNPTHILRIGESYKEKQRTIQAKKEVEQRRAGGYSRKYASKAKNLADDMVRNTARDLLYYAVTQDAMLIFENLSRGFGRQGKRTFMAERQYTRMEDWLTAKLAYEGLPSKTYLSKTLAQYTSKTCSNCGFTITSADYDRVLEKLKKTATGWMTTINGKELKVEGQITYYNRYKRQNVVKDLSVELDRLSEESVNNDISSWTKGRSGEALSLLKKRFSHRPVQEKFVCLNCGFETHADEQAALNIARSWLFLRSQEYKKYQTNKTTGNTDKRAFVETWQSFYRKKLKEVWKPAV

SEQ ID NO: 43318 - protein, 979 aa, synthetic construct
  REGION 1..979: note = engineered CasX variant
QEIKRINKIRRRLVKDSNTKKAGKTGPMKTLLVRVMTPDLRERLENLRKKPENIPQPISNTSRANLNKLLTDYTEMKKAILHVYWEEFQKDPVGLMSRVAQPASKKIDQNKLKPEMDEKGNLTTAGFACSQCGQPLFVYKLEQVSEKGKAYTNYFGRCNVAEHEKLILLAQLKPEKDSDEAVTYSLGKFGQRALDFYSIHVTKESTHPVKPLAQIAGNRYASTPVGKALSDACMGTIASFLSKYQDIIIEHQKVVKGNQKRLESLRELAGKENLEYPSVTLPPQPHTKEGVDAYNEVIARVRMWVNLNLWQKLKLSRDDAKPLLRLKGFPSFPLVERQANEVDWWDMVCNVKKLINEKKEDGKVFWQNLAGYKRQEALRPYLSSEEDRKKGKKFARYQLGDLLLHLEKKHGERDWGKVYDEAWERIDKKVEGLSKHIKLEEERRSEDAQSKAALTDWLRAKASFVIEGLKEADKDEFCRCELKLQKWYGDLRGKPFAIEAENSILDISGFSKQYNCAFIWQKDGVKKLNLYLIINYFKGGKLRFKKIKPEAFEANRFYTVINKKSGEIVPMEVNFNFDDPNLIILPLAFGKRQGREFIWNDLLSLETGSLKLANGRVIEKTLYNRRTRQDEPALFVALTFERREVLDSSNIKPMNLIGVDRGENIPAVIALTDPEGCPLSRFKDSLGNPTHILRIGESYKEKQRTIQAKKEVEQRRAGGYSRKYASKAKNLADDMVRNTARDLLYYAVTQDAMLIFENLSRGFGRQGKRTFMAERQYTRMEDWLTAKLAYEGLPSKTYLSKTLAQYTSKTCSNCGFTITSADYDRVLEKLKKTATGWMTTINGKELKVEGQITYYNRYKRQNVVKDLSVELDRLSEESVNNDISSWTKGRSGEALSLLKKRFSHRPVQEKFVCLNCGFETHADEQAALNIARSWLFLRSQEYKKYQTNKTTGNTDKRAFVETWQSFYRKKLKEVWKPAV

SEQ ID NO: 43319 - protein, 979 aa, synthetic construct
  REGION 1..979: note = engineered CasX variant
QEIKRINKIRRRLVKDSNTKKAGKTGPMKTLLVRVMTPDLRERLENLRKKPENIPQPISNTSRANLNKLLTDYTEMKKAILHVYWEEFQKDPVGLMSRVAQPASKKIDQNKLKPEMDEKGNLTTAGFACSQCGQPLFVYKLEQVSEKGKAYTNYFGRCNVAEHEKLILLAQLKPEKDSDEAVTYSLGKFGQRALDFYSIHVTKESTHPVKPLAQIAGNRYASAPVGKALSDACMGTIASFLSKYQDIIIEHQKVVKGNQKRLESLRELAGKENLEYPSVTLPPQPHTKEGVDAYNEVIARVRMWVNLNLWQKLKLSRDDAKPLLRLKGFPSFPLVERQANEVDWWDMVCNVKKLINEKKEDGKVFWQNLAGYKRQEALRPYLSSEEDRKKGKKFARYQLGDLLLHLEKKHGERDWGKVYDEAWERIDKKVEGLSKHIKLEEERRSEDAQSKAALTDWLRAKASFVIEGLKEADKDEFCRCELKLQKWYGDLRGKPFAIEAENSILDISGFSKQYNCAFIWQKDGVKKLNLYLIINYFKGGKLRFKKIKPEAFEANRFYTVINKKSGEIVPMEVNFNFDDPNLIILPLAFGKRQGREFIWNDLLSLETGSLKLANGRVIEKTLYNRRTRQDEPALFVALTFERREVLDSSNIKPMNLIGVDRGENIPAVIALTDPEGCPLSRFKDSLGNPTHILRIGESYKEKQRTIQAKKEVEQRRAGGYSRKYASKAKNLADDMVRNTARDLLYYAVTQDAMLIFENLSRGFGRQGKRTFMAERQYTRMEDWLTAKLAYEGLPSKTYLSKTLAQYTSKTCSNCGFTITSADYDRVLEKLKKTATGWMTTINGKELKVEGQITYYNRYKRQNVVKDLSVELDRLSEESVNNDISSWTKGRSGEALSLLKKRFSHRPVQEKFVCLNCGFETHADEQAALNIARSWLFLRSQEYKKYQTNKTTGNTDKRAFVETWQSFYRKKLKEVWKPAV

SEQ ID NO: 43320 - protein, 979 aa, synthetic construct
  REGION 1..979: note = engineered CasX variant
QEIKRINKIRRRLVKDSNTKKAGKTGPMKTLLVRVMTPDLRERLENLRKKPENIPQPISNTSRANLNKLLTDYTEMKKAILHVYWEEFQKDPVGLMSRVAQPASKKIDQNKLKPEMDEKGNLTTAGFACSQCGQPLFVYKLEQVSEKGKAYTNYFGRCNVAEHEKLILLAQLKPEKDSDEAVTYSLGKFGQRALDFYSIHVTKESTHPVKPLAQIAGNRYASVPVGKALSDACMGTIASFLSKYQDIIIEHQKVVKGNQKRLESLRELAGKENLEYPSVTLPPQPHTKEGVDAYNEVIARVRMWVNLNLWQKLKLSRDDAKPLLRLKGFPSFPLVERQANEVDWWDMVCNVKKLINEKKEDGKVFWQNLAGYKRQEALRPYLSSEEDRKKGKKFARYQLGDLLLHLEKKHGERDWGKVYDEAWERIDKKVEGLSKHIKLEEERRSEDAQSKAALTDWLRAKASFVIEGLKEADKDEFCRCELKLQKWYGDLRGKPFAIEAENSILDISGFSKQYNCAFIWQKDGVKKLNLYLIINYFKGGKLRFKKIKPEAFEANRFYTVINKKSGEIVPMEVNFNFDDPNLIILPLAFGKRQGREFIWNDLLSLETGSLKLANGRVIEKTLYNRRTRQDEPALFVALTFERREVLDSSNIKPMNLIGVDRGENIPAVIALTDPEGCPLSRFKDSLGNPTHILRIGESYKEKQRTIQAKKEVEQRRAGGYSRKYASKAKNLADDMVRNTARDLLYYAVTQDAMLIFENLSRGFGRQGKRTFMAERQYTRMEDWLTAKLAYEGLPSKTYLSKTLAQYTSKTCSNCGFTITSADYDRVLEKLKKTATGWMTTINGKELKVEGQITYYNRYKRQNVVKDLSVELDRLSEESVNNDISSWTKGRSGEALSLLKKRFSHRPVQEKFVCLNCGFETHADEQAALNIARSWLFLRSQEYKKYQTNKTTGNTDKRAFVETWQSFYRKKLKEVWKPAV

SEQ ID NO: 43321 - protein, 979 aa, synthetic construct
  REGION 1..979: note = engineered CasX variant
QEIKRINKIRRRLVKDSNTKKAGKTGPMKTLLVRVMTPDLRERLENLRKKPENIPQPISNTSRANLNKLLTDYTEMKKAILHVYWEEFQKDPVGLMSRVAQPASKKIDQNKLKPEMDEKGNLTTAGFACSQCGQPLFVYKLEQVSEKGKAYTNYFGRCNVAEHEKLILLAQLKPEKDSDEAVTYSLGKFGQRALDFYSIHVTKESTHPVKPLAQIAGNRYASYPVGKALSDACMGTIASFLSKYQDIIIEHQKVVKGNQKRLESLRELAGKENLEYPSVTLPPQPHTKEGVDAYNEVIARVRMWVNLNLWQKLKLSRDDAKPLLRLKGFPSFPLVERQANEVDWWDMVCNVKKLINEKKEDGKVFWQNLAGYKRQEALRPYLSSEEDRKKGKKFARYQLGDLLLHLEKKHGEYDWGKVYDEAWERIDKKVEGLSKHIKLEEERRSEDAQSKAALTDWLRAKASFVIEGLKEADKDEFCRCELKLQKWYGDLRGKPFAIEAENSILDISGFSKQYNCAFIWQKDGVKKLNLYLIINYFKGGKLRFKKIKPEAFEANRFYTVINKKSGEIVPMEVNFNFDDPNLIILPLAFGKRQGREFIWNDLLSLETGSLKLANGRVIEKTLYNRRTRQDEPALFVALTFERREVLDSSNIKPMNLIGVDRGENIPAVIALTDPEGCPLSRFKDSLGNPTHILRIGESYKEKQRTIQAKKEVEQRRAGGYSRKYASKAKNLADDMVRNTARDLLYYAVTQDAMLIFENLSRGFGRQGKRTFMAERQYTRMEDWLTAKLAYEGLPSKTYLSKTLAQYTSKTCSNCGFTITSADYDRVLEKLKKTATGWMTTINGKELKVEGQITYYNRYKRQNVVKDLSVELDRLSEESVNNDISSWTKGRSGEALSLLKKRFSHRPVQEKFVCLNCGFETHADEQAALNIARSWLFLRSQEYKKYQTNKTTGNTDKRAFVETWQSFYRKKLKEVWKPAV

SEQ ID NO: 43322 - protein, 979 aa, synthetic construct
  REGION 1..979: note = engineered CasX variant
QEIKRINKIRRRLVKDSNTKKAGKTGPMKTLLVRVMTPDLRERLENLRKKPENIPQPISNTSRANLNKLLTDYTEMKKAILHVYWEEFQKDPVGLMSRVAQPASKKIDQNKLKPEMDEKGNLTTAGFACSQCGQPLFVYKLEQVSEKGKAYTNYFGRCNVAEHEKLILLAQLKPEKDSDEAVTYSLGKFGQRALDFYSIHVTKESTHPVKPLAQIAGNRYASHPVGKALSDACMGTIASFLSKYQDIIIEHQKVVKGNQKRLESLRELAGKENLEYPSVTLPPQPHTKEGVDAYNEVIARVRMWVNLNLWQKLKLSRDDAKPLLRLKGFPSFPLVERQANEVDWWDMVCNVKKLINEKKEDGKVFWQNLAGYKRQEALRPYLSSEEDRKKGKKFARYQLGDLLLHLEKKHGEYDWGKVYDEAWERIDKKVEGLSKHIKLEEERRSEDAQSKAALTDWLRAKASFVIEGLKEADKDEFCRCELKLQKWYGDLRGKPFAIEAENSILDISGFSKQYNCAFIWQKDGVKKLNLYLIINYFKGGKLRFKKIKPEAFEANRFYTVINKKSGEIVPMEVNFNFDDPNLIILPLAFGKRQGREFIWNDLLSLETGSLKLANGRVIEKTLYNRRTRQDEPALFVALTFERREVLDSSNIKPMNLIGVDRGENIPAVIALTDPEGCPLSRFKDSLGNPTHILRIGESYKEKQRTIQAKKEVEQRRAGGYSRKYASKAKNLADDMVRNTARDLLYYAVTQDAMLIFENLSRGFGRQGKRTFMAERQYTRMEDWLTAKLAYEGLPSKTYLSKTLAQYTSKTCSNCGFTITSADYDRVLEKLKKTATGWMTTINGKELKVEGQITYYNRYKRQNVVKDLSVELDRLSEESVNNDISSWTKGRSGEALSLLKKRFSHRPVQEKFVCLNCGFETHADEQAALNIARSWLFLRSQEYKKYQTNKTTGNTDKRAFVETWQSFYRKKLKEVWKPAV

SEQ ID NO: 43323 - protein, 979 aa, synthetic construct
  REGION 1..979: note = engineered CasX variant
QEIKRINKIRRRLVKDSNTKKAGKTGPMKTLLVRVMTPDLRERLENLRKKPENIPQPISNTSRANLNKLLTDYTEMKKAILHVYWEEFQKDPVGLMSRVAQPASKKIDQNKLKPEMDEKGNLTTAGFACSQCGQPLFVYKLEQVSEKGKAYTNYFGRCNVAEHEKLILLAQLKPEKDSDEAVTYSLGKFGQRALDFYSIHVTKESTHPVKPLAQIAGNRYASTPVGKALSDACMGTIASFLSKYQDIIIEHQKVVKGNQKRLESLRELAGKENLEYPSVTLPPQPHTKEGVDAYNEVIARVRMWVNLNLWQKLKLSRDDAKPLLRLKGFPSFPLVERQANEVDWWDMVCNVKKLINEKKEDGKVFWQNLAGYKRQEALRPYLSSEEDRKKGKKFARYQLGDLLLHLEKKHGEYDWGKVYDEAWERIDKKVEGLSKHIKLEEERRSEDAQSKAALTDWLRAKASFVIEGLKEADKDEFCRCELKLQKWYGDLRGKPFAIEAENSILDISGFSKQYNCAFIWQKDGVKKLNLYLIINYFKGGKLRFKKIKPEAFEANRFYTVINKKSGEIVPMEVNFNFDDPNLIILPLAFGKRQGREFIWNDLLSLETGSLKLANGRVIEKTLYNRRTRQDEPALFVALTFERREVLDSSNIKPMNLIGVDRGENIPAVIALTDPEGCPLSRFKDSLGNPTHILRIGESYKEKQRTIQAKKEVEQRRAGGYSRKYASKAKNLADDMVRNTARDLLYYAVTQDAMLIFENLSRGFGRQGKRTFMAERQYTRMEDWLTAKLAYEGLPSKTYLSKTLAQYTSKTCSNCGFTITSADYDRVLEKLKKTATGWMTTINGKELKVEGQITYYNRYKRQNVVKDLSVELDRLSEESVNNDISSWTKGRSGEALSLLKKRFSHRPVQEKFVCLNCGFETHADEQAALNIARSWLFLRSQEYKKYQTNKTTGNTDKRAFVETWQSFYRKKLKEVWKPAV

SEQ ID NO: 43324 - protein, 979 aa, synthetic construct
  REGION 1..979: note = engineered CasX variant
QEIKRINKIRRRLVKDSNTKKAGKTGPMKTLLVRVMTPDLRERLENLRKKPENIPQPISNTSRANLNKLLTDYTEMKKAILHVYWEEFQKDPVGLMSRVAQPASKKIDQNKLKPEMDEKGNLTTAGFACSQCGQPLFVYKLEQVSEKGKAYTNYFGRCNVAEHEKLILLAQLKPEKDSDEAVTYSLGKFGQRALDFYSIHVTKESTHPVKPLAQIAGNRYASAPVGKALSDACMGTIASFLSKYQDIIIEHQKVVKGNQKRLESLRELAGKENLEYPSVTLPPQPHTKEGVDAYNEVIARVRMWVNLNLWQKLKLSRDDAKPLLRLKGFPSFPLVERQANEVDWWDMVCNVKKLINEKKEDGKVFWQNLAGYKRQEALRPYLSSEEDRKKGKKFARYQLGDLLLHLEKKHGEYDWGKVYDEAWERIDKKVEGLSKHIKLEEERRSEDAQSKAALTDWLRAKASFVIEGLKEADKDEFCRCELKLQKWYGDLRGKPFAIEAENSILDISGFSKQYNCAFIWQKDGVKKLNLYLIINYFKGGKLRFKKIKPEAFEANRFYTVINKKSGEIVPMEVNFNFDDPNLIILPLAFGKRQGREFIWNDLLSLETGSLKLANGRVIEKTLYNRRTRQDEPALFVALTFERREVLDSSNIKPMNLIGVDRGENIPAVIALTDPEGCPLSRFKDSLGNPTHILRIGESYKEKQRTIQAKKEVEQRRAGGYSRKYASKAKNLADDMVRNTARDLLYYAVTQDAMLIFENLSRGFGRQGKRTFMAERQYTRMEDWLTAKLAYEGLPSKTYLSKTLAQYTSKTCSNCGFTITSADYDRVLEKLKKTATGWMTTINGKELKVEGQITYYNRYKRQNVVKDLSVELDRLSEESVNNDISSWTKGRSGEALSLLKKRFSHRPVQEKFVCLNCGFETHADEQAALNIARSWLFLRSQEYKKYQTNKTTGNTDKRAFVETWQSFYRKKLKEVWKPAV

SEQ ID NO: 43325 - protein, 979 aa, synthetic construct
  REGION 1..979: note = engineered CasX variant
QEIKRINKIRRRLVKDSNTKKAGKTGPMKTLLVRVMTPDLRERLENLRKKPENIPQPISNTSRANLNKLLTDYTEMKKAILHVYWEEFQKDPVGLMSRVAQPASKKIDQNKLKPEMDEKGNLTTAGFACSQCGQPLFVYKLEQVSEKGKAYTNYFGRCNVAEHEKLILLAQLKPEKDSDEAVTYSLGKFGQRALDFYSIHVTKESTHPVKPLAQIAGNRYASVPVGKALSDACMGTIASFLSKYQDIIIEHQKVVKGNQKRLESLRELAGKENLEYPSVTLPPQPHTKEGVDAYNEVIARVRMWVNLNLWQKLKLSRDDAKPLLRLKGFPSFPLVERQANEVDWWDMVCNVKKLINEKKEDGKVFWQNLAGYKRQEALRPYLSSEEDRKKGKKFARYQLGDLLLHLEKKHGEYDWGKVYDEAWERIDKKVEGLSKHIKLEEERRSEDAQSKAALTDWLRAKASFVIEGLKEADKDEFCRCELKLQKWYGDLRGKPFAIEAENSILDISGFSKQYNCAFIWQKDGVKKLNLYLIINYFKGGKLRFKKIKPEAFEANRFYTVINKKSGEIVPMEVNFNFDDPNLIILPLAFGKRQGREFIWNDLLSLETGSLKLANGRVIEKTLYNRRTRQDEPALFVALTFERREVLDSSNIKPMNLIGVDRGENIPAVIALTDPEGCPLSRFKDSLGNPTHILRIGESYKEKQRTIQAKKEVEQRRAGGYSRKYASKAKNLADDMVRNTARDLLYYAVTQDAMLIFENLSRGFGRQGKRTFMAERQYTRMEDWLTAKLAYEGLPSKTYLSKTLAQYTSKTCSNCGFTITSADYDRVLEKLKKTATGWMTTINGKELKVEGQITYYNRYKRQNVVKDLSVELDRLSEESVNNDISSWTKGRSGEALSLLKKRFSHRPVQEKFVCLNCGFETHADEQAALNIARSWLFLRSQEYKKYQTNKTTGNTDKRAFVETWQSFYRKKLKEVWKPAV

SEQ ID NO: 43326 - protein, 978 aa, synthetic construct
  REGION 1..978: note = engineered CasX variant
QEIKRINKIRRRLVKDSNTKKAGKTGPMKTLLVRVMTPDLRERLENLRKKPENIPQPISNTSRANLNKLLTDYTEMKKAILHVYWEEFQKDPVGLMSRVAQPASKKIDQNKLKPEMDEKGNLTTAGFACSQCGQPLFVYKLEQVSEKGKAYTNYFGRCNVAEHEKLILLAQLKPEKDSDEAVTYSLGKFGQRALDFYSIHVTKESTHPVKPLAQIAGNRYASYPVGKALSDACMGTIASFLSKYQDIIIEHQKVVKGNQKRLESLRELAGKENLEYPSVTLPPQPHTKEGVDAYNEVIARVRMWVNLNLWQKLKLSRDDAKPLLRLKGFPSFPLVERQANEVDWWDMVCNVKKLINEKKEDGKVFWQNLAGYKRQEALRPYLSSEEDRKKGKKFARYQLGDLLLHLEKKHGEDWGDVYDEAWERIDKKVEGLSKHIKLEEERRSEDAQSKAALTDWLRAKASFVIEGLKEADKDEFCRCELKLQKWYGDLRGKPFAIEAENSILDISGFSKQYNCAFIWQKDGVKKLNLYLIINYFKGGKLRFKKIKPEAFEANRFYTVINKKSGEIVPMEVNFNFDDPNLIILPLAFGKRQGREFIWNDLLSLETGSLKLANGRVIEKTLYNRRTRQDEPALFVALTFERREVLDSSNIKPMNLIGVDRGENIPAVIALTDPEGCPLSRFKDSLGNPTHILRIGESYKEKQRTIQAKKEVEQRRAGGYSRKYASKAKNLADDMVRNTARDLLYYAVTQDAMLIFENLSRGFGRQGKRTFMAERQYTRMEDWLTAKLAYEGLPSKTYLSKTLAQYTSKTCSNCGFTITSADYDRVLEKLKKTATGWMTTINGKELKVEGQITYYNRYKRQNVVKDLSVELDRLSEESVNNDISSWTKGRSGEALSLLKKRFSHRPVQEKFVCLNCGFETHADEQAALNIARSWLFLRSQEYKKYQTNKTTGNTDKRAFVETWQSFYRKKLKEVWKPAV

SEQ ID NO: 43327 - protein, 978 aa, synthetic construct
  REGION 1..978: note = engineered CasX variant
QEIKRINKIRRRLVKDSNTKKAGKTGPMKTLLVRVMTPDLRERLENLRKKPENIPQPISNTSRANLNKLLTDYTEMKKAILHVYWEEFQKDPVGLMSRVAQPASKKIDQNKLKPEMDEKGNLTTAGFACSQCGQPLFVYKLEQVSEKGKAYTNYFGRCNVAEHEKLILLAQLKPEKDSDEAVTYSLGKFGQRALDFYSIHVTKESTHPVKPLAQIAGNRYASHPVGKALSDACMGTIASFLSKYQDIIIEHQKVVKGNQKRLESLRELAGKENLEYPSVTLPPQPHTKEGVDAYNEVIARVRMWVNLNLWQKLKLSRDDAKPLLRLKGFPSFPLVERQANEVDWWDMVCNVKKLINEKKEDGKVFWQNLAGYKRQEALRPYLSSEEDRKKGKKFARYQLGDLLLHLEKKHGEDWGDVYDEAWERIDKKVEGLSKHIKLEEERRSEDAQSKAALTDWLRAKASFVIEGLKEADKDEFCRCELKLQKWYGDLRGKPFAIEAENSILDISGFSKQYNCAFIWQKDGVKKLNLYLIINYFKGGKLRFKKIKPEAFEANRFYTVINKKSGEIVPMEVNFNFDDPNLIILPLAFGKRQGREFIWNDLLSLETGSLKLANGRVIEKTLYNRRTRQDEPALFVALTFERREVLDSSNIKPMNLIGVDRGENIPAVIALTDPEGCPLSRFKDSLGNPTHILRIGESYKEKQRTIQAKKEVEQRRAGGYSRKYASKAKNLADDMVRNTARDLLYYAVTQDAMLIFENLSRGFGRQGKRTFMAERQYTRMEDWLTAKLAYEGLPSKTYLSKTLAQYTSKTCSNCGFTITSADYDRVLEKLKKTATGWMTTINGKELKVEGQITYYNRYKRQNVVKDLSVELDRLSEESVNNDISSWTKGRSGEALSLLKKRFSHRPVQEKFVCLNCGFETHADEQAALNIARSWLFLRSQEYKKYQTNKTTGNTDKRAFVETWQSFYRKKLKEVWKPAV

SEQ ID NO: 43328 - protein, 978 aa, synthetic construct
  REGION 1..978: note = engineered CasX variant
QEIKRINKIRRRLVKDSNTKKAGKTGPMKTLLVRVMTPDLRERLENLRKKPENIPQPISNTSRANLNKLLTDYTEMKKAILHVYWEEFQKDPVGLMSRVAQPASKKIDQNKLKPEMDEKGNLTTAGFACSQCGQPLFVYKLEQVSEKGKAYTNYFGRCNVAEHEKLILLAQLKPEKDSDEAVTYSLGKFGQRALDFYSIHVTKESTHPVKPLAQIAGNRYASTPVGKALSDACMGTIASFLSKYQDIIIEHQKVVKGNQKRLESLRELAGKENLEYPSVTLPPQPHTKEGVDAYNEVIARVRMWVNLNLWQKLKLSRDDAKPLLRLKGFPSFPLVERQANEVDWWDMVCNVKKLINEKKEDGKVFWQNLAGYKRQEALRPYLSSEEDRKKGKKFARYQLGDLLLHLEKKHGEDWGDVYDEAWERIDKKVEGLSKHIKLEEERRSEDAQSKAALTDWLRAKASFVIEGLKEADKDEFCRCELKLQKWYGDLRGKPFAIEAENSILDISGFSKQYNCAFIWQKDGVKKLNLYLIINYFKGGKLRFKKIKPEAFEANRFYTVINKKSGEIVPMEVNFNFDDPNLIILPLAFGKRQGREFIWNDLLSLETGSLKLANGRVIEKTLYNRRTRQDEPALFVALTFERREVLDSSNIKPMNLIGVDRGENIPAVIALTDPEGCPLSRFKDSLGNPTHILRIGESYKEKQRTIQAKKEVEQRRAGGYSRKYASKAKNLADDMVRNTARDLLYYAVTQDAMLIFENLSRGFGRQGKRTFMAERQYTRMEDWLTAKLAYEGLPSKTYLSKTLAQYTSKTCSNCGFTITSADYDRVLEKLKKTATGWMTTINGKELKVEGQITYYNRYKRQNVVKDLSVELDRLSEESVNNDISSWTKGRSGEALSLLKKRFSHRPVQEKFVCLNCGFETHADEQAALNIARSWLFLRSQEYKKYQTNKTTGNTDKRAFVETWQSFYRKKLKEVWKPAV

SEQ ID NO: 43329 - protein, 978 aa, synthetic construct
  REGION 1..978: note = engineered CasX variant
QEIKRINKIRRRLVKDSNTKKAGKTGPMKTLLVRVMTPDLRERLENLRKKPENIPQPISNTSRANLNKLLTDYTEMKKAILHVYWEEFQKDPVGLMSRVAQPASKKIDQNKLKPEMDEKGNLTTAGFACSQCGQPLFVYKLEQVSEKGKAYTNYFGRCNVAEHEKLILLAQLKPEKDSDEAVTYSLGKFGQRALDFYSIHVTKESTHPVKPLAQIAGNRYASAPVGKALSDACMGTIASFLSKYQDIIIEHQKVVKGNQKRLESLRELAGKENLEYPSVTLPPQPHTKEGVDAYNEVIARVRMWVNLNLWQKLKLSRDDAKPLLRLKGFPSFPLVERQANEVDWWDMVCNVKKLINEKKEDGKVFWQNLAGYKRQEALRPYLSSEEDRKKGKKFARYQLGDLLLHLEKKHGEDWGDVYDEAWERIDKKVEGLSKHIKLEEERRSEDAQSKAALTDWLRAKASFVIEGLKEADKDEFCRCELKLQKWYGDLRGKPFAIEAENSILDISGFSKQYNCAFIWQKDGVKKLNLYLIINYFKGGKLRFKKIKPEAFEANRFYTVINKKSGEIVPMEVNFNFDDPNLIILPLAFGKRQGREFIWNDLLSLETGSLKLANGRVIEKTLYNRRTRQDEPALFVALTFERREVLDSSNIKPMNLIGVDRGENIPAVIALTDPEGCPLSRFKDSLGNPTHILRIGESYKEKQRTIQAKKEVEQRRAGGYSRKYASKAKNLADDMVRNTARDLLYYAVTQDAMLIFENLSRGFGRQGKRTFMAERQYTRMEDWLTAKLAYEGLPSKTYLSKTLAQYTSKTCSNCGFTITSADYDRVLEKLKKTATGWMTTINGKELKVEGQITYYNRYKRQNVVKDLSVELDRLSEESVNNDISSWTKGRSGEALSLLKKRFSHRPVQEKFVCLNCGFETHADEQAALNIARSWLFLRSQEYKKYQTNKTTGNTDKRAFVETWQSFYRKKLKEVWKPAV

SEQ ID NO: 43330 - protein, 978 aa, synthetic construct
  REGION 1..978: note = engineered CasX variant
QEIKRINKIRRRLVKDSNTKKAGKTGPMKTLLVRVMTPDLRERLENLRKKPENIPQPISNTSRANLNKLLTDYTEMKKAILHVYWEEFQKDPVGLMSRVAQPASKKIDQNKLKPEMDEKGNLTTAGFACSQCGQPLFVYKLEQVSEKGKAYTNYFGRCNVAEHEKLILLAQLKPEKDSDEAVTYSLGKFGQRALDFYSIHVTKESTHPVKPLAQIAGNRYASVPVGKALSDACMGTIASFLSKYQDIIIEHQKVVKGNQKRLESLRELAGKENLEYPSVTLPPQPHTKEGVDAYNEVIARVRMWVNLNLWQKLKLSRDDAKPLLRLKGFPSFPLVERQANEVDWWDMVCNVKKLINEKKEDGKVFWQNLAGYKRQEALRPYLSSEEDRKKGKKFARYQLGDLLLHLEKKHGEDWGDVYDEAWERIDKKVEGLSKHIKLEEERRSEDAQSKAALTDWLRAKASFVIEGLKEADKDEFCRCELKLQKWYGDLRGKPFAIEAENSILDISGFSKQYNCAFIWQKDGVKKLNLYLIINYFKGGKLRFKKIKPEAFEANRFYTVINKKSGEIVPMEVNFNFDDPNLIILPLAFGKRQGREFIWNDLLSLETGSLKLANGRVIEKTLYNRRTRQDEPALFVALTFERREVLDSSNIKPMNLIGVDRGENIPAVIALTDPEGCPLSRFKDSLGNPTHILRIGESYKEKQRTIQAKKEVEQRRAGGYSRKYASKAKNLADDMVRNTARDLLYYAVTQDAMLIFENLSRGFGRQGKRTFMAERQYTRMEDWLTAKLAYEGLPSKTYLSKTLAQYTSKTCSNCGFTITSADYDRVLEKLKKTATGWMTTINGKELKVEGQITYYNRYKRQNVVKDLSVELDRLSEESVNNDISSWTKGRSGEALSLLKKRFSHRPVQEKFVCLNCGFETHADEQAALNIARSWLFLRSQEYKKYQTNKTTGNTDKRAFVETWQSFYRKKLKEVWKPAV

SEQ ID NO: 43331 - protein, 978 aa, synthetic construct
  REGION 1..978: note = engineered CasX variant
QEIKRINKIRRRLVKDSNTKKAGKTGPMKTLLVRVMTPDLRERLENLRKKPENIPQPISNTSRANLNKLLTDYTEMKKAILHVYWEEFQKDPVGLMSRVAQPASKKIDQNKLKPEMDEKGNLTTAGFACSQCGQPLFVYKLEQVSEKGKAYTNYFGRCNVAEHEKLILLAQLKPEKDSDEAVTYSLGKFGQRALDFYSIHVTKESTHPVKPLAQIAGNRYASYPVGKALSDACMGTIASFLSKYQDIIIEHQKVVKGNQKRLESLRELAGKENLEYPSVTLPPQPHTKEGVDAYNEVIARVRMWVNLNLWQKLKLSRDDAKPLLRLKGFPSFPLVERQANEVDWWDMVCNVKKLINEKKEDGKVFWQNLAGYKRQEALRPYLSSEEDRKKGKKFARYQLGDLLLHLEKKHGEDWGKVYGEAWERIDKKVEGLSKHIKLEEERRSEDAQSKAALTDWLRAKASFVIEGLKEADKDEFCRCELKLQKWYGDLRGKPFAIEAENSILDISGFSKQYNCAFIWQKDGVKKLNLYLIINYFKGGKLRFKKIKPEAFEANRFYTVINKKSGEIVPMEVNFNFDDPNLIILPLAFGKRQGREFIWNDLLSLETGSLKLANGRVIEKTLYNRRTRQDEPALFVALTFERREVLDSSNIKPMNLIGVDRGENIPAVIALTDPEGCPLSRFKDSLGNPTHILRIGESYKEKQRTIQAKKEVEQRRAGGYSRKYASKAKNLADDMVRNTARDLLYYAVTQDAMLIFENLSRGFGRQGKRTFMAERQYTRMEDWLTAKLAYEGLPSKTYLSKTLAQYTSKTCSNCGFTITSADYDRVLEKLKKTATGWMTTINGKELKVEGQITYYNRYKRQNVVKDLSVELDRLSEESVNNDISSWTKGRSGEALSLLKKRFSHRPVQEKFVCLNCGFETHADEQAALNIARSWLFLRSQEYKKYQTNKTTGNTDKRAFVETWQSFYRKKLKEVWKPAV

SEQ ID NO: 43332 - protein, 978 aa, synthetic construct
  REGION 1..978: note = engineered CasX variant
QEIKRINKIRRRLVKDSNTKKAGKTGPMKTLLVRVMTPDLRERLENLRKKPENIPQPISNTSRANLNKLLTDYTEMKKAILHVYWEEFQKDPVGLMSRVAQPASKKIDQNKLKPEMDEKGNLTTAGFACSQCGQPLFVYKLEQVSEKGKAYTNYFGRCNVAEHEKLILLAQLKPEKDSDEAVTYSLGKFGQRALDFYSIHVTKESTHPVKPLAQIAGNRYASHPVGKALSDACMGTIASFLSKYQDIIIEHQKVVKGNQKRLESLRELAGKENLEYPSVTLPPQPHTKEGVDAYNEVIARVRMWVNLNLWQKLKLSRDDAKPLLRLKGFPSFPLVERQANEVDWWDMVCNVKKLINEKKEDGKVFWQNLAGYKRQEALRPYLSSEEDRKKGKKFARYQLGDLLLHLEKKHGEDWGKVYGEAWERIDKKVEGLSKHIKLEEERRSEDAQSKAALTDWLRAKASFVIEGLKEADKDEFCRCELKLQKWYGDLRGKPFAIEAENSILDISGFSKQYNCAFIWQKDGVKKLNLYLIINYFKGGKLRFKKIKPEAFEANRFYTVINKKSGEIVPMEVNFNFDDPNLIILPLAFGKRQGREFIWNDLLSLETGSLKLANGRVIEKTLYNRRTRQDEPALFVALTFERREVLDSSNIKPMNLIGVDRGENIPAVIALTDPEGCPLSRFKDSLGNPTHILRIGESYKEKQRTIQAKKEVEQRRAGGYSRKYASKAKNLADDMVRNTARDLLYYAVTQDAMLIFENLSRGFGRQGKRTFMAERQYTRMEDWLTAKLAYEGLPSKTYLSKTLAQYTSKTCSNCGFTITSADYDRVLEKLKKTATGWMTTINGKELKVEGQITYYNRYKRQNVVKDLSVELDRLSEESVNNDISSWTKGRSGEALSLLKKRFSHRPVQEKFVCLNCGFETHADEQAALNIARSWLFLRSQEYKKYQTNKTTGNTDKRAFVETWQSFYRKKLKEVWKPAV

SEQ ID NO: 43333 - protein, 978 aa, synthetic construct
  REGION 1..978: note = engineered CasX variant
QEIKRINKIRRRLVKDSNTKKAGKTGPMKTLLVRVMTPDLRERLENLRKKPENIPQPISNTSRANLNKLLTDYTEMKKAILHVYWEEFQKDPVGLMSRVAQPASKKIDQNKLKPEMDEKGNLTTAGFACSQCGQPLFVYKLEQVSEKGKAYTNYFGRCNVAEHEKLILLAQLKPEKDSDEAVTYSLGKFGQRALDFYSIHVTKESTHPVKPLAQIAGNRYASTPVGKALSDACMGTIASFLSKYQDIIIEHQKVVKGNQKRLESLRELAGKENLEYPSVTLPPQPHTKEGVDAYNEVIARVRMWVNLNLWQKLKLSRDDAKPLLRLKGFPSFPLVERQANEVDWWDMVCNVKKLINEKKEDGKVFWQNLAGYKRQEALRPYLSSEEDRKKGKKFARYQLGDLLLHLEKKHGEDWGKVYGEAWERIDKKVEGLSKHIKLEEERRSEDAQSKAALTDWLRAKASFVIEGLKEADKDEFCRCELKLQKWYGDLRGKPFAIEAENSILDISGFSKQYNCAFIWQKDGVKKLNLYLIINYFKGGKLRFKKIKPEAFEANRFYTVINKKSGEIVPMEVNFNFDDPNLIILPLAFGKRQGREFIWNDLLSLETGSLKLANGRVIEKTLYNRRTRQDEPALFVALTFERREVLDSSNIKPMNLIGVDRGENIPAVIALTDPEGCPLSRFKDSLGNPTHILRIGESYKEKQRTIQAKKEVEQRRAGGYSRKYASKAKNLADDMVRNTARDLLYYAVTQDAMLIFENLSRGFGRQGKRTFMAERQYTRMEDWLTAKLAYEGLPSKTYLSKTLAQYTSKTCSNCGFTITSADYDRVLEKLKKTATGWMTTINGKELKVEGQITYYNRYKRQNVVKDLSVELDRLSEESVNNDISSWTKGRSGEALSLLKKRFSHRPVQEKFVCLNCGFETHADEQAALNIARSWLFLRSQEYKKYQTNKTTGNTDKRAFVETWQSFYRKKLKEVWKPAV

SEQ ID NO: 43334 - protein, 978 aa, synthetic construct
  REGION 1..978: note = engineered CasX variant
QEIKRINKIRRRLVKDSNTKKAGKTGPMKTLLVRVMTPDLRERLENLRKKPENIPQPISNTSRANLNKLLTDYTEMKKAILHVYWEEFQKDPVGLMSRVAQPASKKIDQNKLKPEMDEKGNLTTAGFACSQCGQPLFVYKLEQVSEKGKAYTNYFGRCNVAEHEKLILLAQLKPEKDSDEAVTYSLGKFGQRALDFYSIHVTKESTHPVKPLAQIAGNRYASAPVGKALSDACMGTIASFLSKYQDIIIEHQKVVKGNQKRLESLRELAGKENLEYPSVTLPPQPHTKEGVDAYNEVIARVRMWVNLNLWQKLKLSRDDAKPLLRLKGFPSFPLVERQANEVDWWDMVCNVKKLINEKKEDGKVFWQNLAGYKRQEALRPYLSSEEDRKKGKKFARYQLGDLLLHLEKKHGEDWGKVYGEAWERIDKKVEGLSKHIKLEEERRSEDAQSKAALTDWLRAKASFVIEGLKEADKDEFCRCELKLQKWYGDLRGKPFAIEAENSILDISGFSKQYNCAFIWQKDGVKKLNLYLIINYFKGGKLRFKKIKPEAFEANRFYTVINKKSGEIVPMEVNFNFDDPNLIILPLAFGKRQGREFIWNDLLSLETGSLKLANGRVIEKTLYNRRTRQDEPALFVALTFERREVLDSSNIKPMNLIGVDRGENIPAVIALTDPEGCPLSRFKDSLGNPTHILRIGESYKEKQRTIQAKKEVEQRRAGGYSRKYASKAKNLADDMVRNTARDLLYYAVTQDAMLIFENLSRGFGRQGKRTFMAERQYTRMEDWLTAKLAYEGLPSKTYLSKTLAQYTSKTCSNCGFTITSADYDRVLEKLKKTATGWMTTINGKELKVEGQITYYNRYKRQNVVKDLSVELDRLSEESVNNDISSWTKGRSGEALSLLKKRFSHRPVQEKFVCLNCGFETHADEQAALNIARSWLFLRSQEYKKYQTNKTTGNTDKRAFVETWQSFYRKKLKEVWKPAV

SEQ ID NO: 43335 - protein, 978 aa, synthetic construct
  REGION 1..978: note = engineered CasX variant
QEIKRINKIRRRLVKDSNTKKAGKTGPMKTLLVRVMTPDLRERLENLRKKPENIPQPISNTSRANLNKLLTDYTEMKKAILHVYWEEFQKDPVGLMSRVAQPASKKIDQNKLKPEMDEKGNLTTAGFACSQCGQPLFVYKLEQVSEKGKAYTNYFGRCNVAEHEKLILLAQLKPEKDSDEAVTYSLGKFGQRALDFYSIHVTKESTHPVKPLAQIAGNRYASVPVGKALSDACMGTIASFLSKYQDIIIEHQKVVKGNQKRLESLRELAGKENLEYPSVTLPPQPHTKEGVDAYNEVIARVRMWVNLNLWQKLKLSRDDAKPLLRLKGFPSFPLVERQANEVDWWDMVCNVKKLINEKKEDGKVFWQNLAGYKRQEALRPYLSSEEDRKKGKKFARYQLGDLLLHLEKKHGEDWGKVYGEAWERIDKKVEGLSKHIKLEEERRSEDAQSKAALTDWLRAKASFVIEGLKEADKDEFCRCELKLQKWYGDLRGKPFAIEAENSILDISGFSKQYNCAFIWQKDGVKKLNLYLIINYFKGGKLRFKKIKPEAFEANRFYTVINKKSGEIVPMEVNFNFDDPNLIILPLAFGKRQGREFIWNDLLSLETGSLKLANGRVIEKTLYNRRTRQDEPALFVALTFERREVLDSSNIKPMNLIGVDRGENIPAVIALTDPEGCPLSRFKDSLGNPTHILRIGESYKEKQRTIQAKKEVEQRRAGGYSRKYASKAKNLADDMVRNTARDLLYYAVTQDAMLIFENLSRGFGRQGKRTFMAERQYTRMEDWLTAKLAYEGLPSKTYLSKTLAQYTSKTCSNCGFTITSADYDRVLEKLKKTATGWMTTINGKELKVEGQITYYNRYKRQNVVKDLSVELDRLSEESVNNDISSWTKGRSGEALSLLKKRFSHRPVQEKFVCLNCGFETHADEQAALNIARSWLFLRSQEYKKYQTNKTTGNTDKRAFVETWQSFYRKKLKEVWKPAV

SEQ ID NO: 43336 - protein, 978 aa, synthetic construct
  REGION 1..978: note = engineered CasX variant
QEIKRINKIRRRLVKDSNTKKAGKTGPMKTLLVRVMTPDLRERLENLRKKPENIPQPISNTSRANLNKLLTDYTEMKKAILHVYWEEFQKDPVGLMSRVAQPASKKIDQNKLKPEMDEKGNLTTAGFACSQCGQPLFVYKLEQVSEKGKAYTNYFGRCNVAEHEKLILLAQLKPEKDSDEAVTYSLGKFGQRALDFYSIHVTKESTHPVKPLAQIAGNRYASYPVGKALSDACMGTIASFLSKYQDIIIEHQKVVKGNQKRLESLRELAGKENLEYPSVTLPPQPHTKEGVDAYNEVIARVRMWVNLNLWQKLKLSRDDAKPLLRLKGFPSFPLVERQANEVDWWDMVCNVKKLINEKKEDGKVFWQNLAGYKRQEALRPYLSSEEDRKKGKKFARYQLGDLLLHLEKKHGEDWGKVYDEAWERIDKKVEGLSKHIKLEEERRSEDAQSKAALTDWLRAKASFVIEGKKEADKDEFCRCELKLQKWYGDLRGKPFAIEAENSILDISGFSKQYNCAFIWQKDGVKKLNLYLIINYFKGGKLRFKKIKPEAFEANRFYTVINKKSGEIVPMEVNFNFDDPNLIILPLAFGKRQGREFIWNDLLSLETGSLKLANGRVIEKTLYNRRTRQDEPALFVALTFERREVLDSSNIKPMNLIGVDRGENIPAVIALTDPEGCPLSRFKDSLGNPTHILRIGESYKEKQRTIQAKKEVEQRRAGGYSRKYASKAKNLADDMVRNTARDLLYYAVTQDAMLIFENLSRGFGRQGKRTFMAERQYTRMEDWLTAKLAYEGLPSKTYLSKTLAQYTSKTCSNCGFTITSADYDRVLEKLKKTATGWMTTINGKELKVEGQITYYNRYKRQNVVKDLSVELDRLSEESVNNDISSWTKGRSGEALSLLKKRFSHRPVQEKFVCLNCGFETHADEQAALNIARSWLFLRSQEYKKYQTNKTTGNTDKRAFVETWQSFYRKKLKEVWKPAV

SEQ ID NO: 43337 - protein, 978 aa, synthetic construct
  REGION 1..978: note = engineered CasX variant
QEIKRINKIRRRLVKDSNTKKAGKTGPMKTLLVRVMTPDLRERLENLRKKPENIPQPISNTSRANLNKLLTDYTEMKKAILHVYWEEFQKDPVGLMSRVAQPASKKIDQNKLKPEMDEKGNLTTAGFACSQCGQPLFVYKLEQVSEKGKAYTNYFGRCNVAEHEKLILLAQLKPEKDSDEAVTYSLGKFGQRALDFYSIHVTKESTHPVKPLAQIAGNRYASHPVGKALSDACMGTIASFLSKYQDIIIEHQKVVKGNQKRLESLRELAGKENLEYPSVTLPPQPHTKEGVDAYNEVIARVRMWVNLNLWQKLKLSRDDAKPLLRLKGFPSFPLVERQANEVDWWDMVCNVKKLINEKKEDGKVFWQNLAGYKRQEALRPYLSSEEDRKKGKKFARYQLGDLLLHLEKKHGEDWGKVYDEAWERIDKKVEGLSKHIKLEEERRSEDAQSKAALTDWLRAKASFVIEGKKEADKDEFCRCELKLQKWYGDLRGKPFAIEAENSILDISGFSKQYNCAFIWQKDGVKKLNLYLIINYFKGGKLRFKKIKPEAFEANRFYTVINKKSGEIVPMEVNFNFDDPNLIILPLAFGKRQGREFIWNDLLSLETGSLKLANGRVIEKTLYNRRTRQDEPALFVALTFERREVLDSSNIKPMNLIGVDRGENIPAVIALTDPEGCPLSRFKDSLGNPTHILRIGESYKEKQRTIQAKKEVEQRRAGGYSRKYASKAKNLADDMVRNTARDLLYYAVTQDAMLIFENLSRGFGRQGKRTFMAERQYTRMEDWLTAKLAYEGLPSKTYLSKTLAQYTSKTCSNCGFTITSADYDRVLEKLKKTATGWMTTINGKELKVEGQITYYNRYKRQNVVKDLSVELDRLSEESVNNDISSWTKGRSGEALSLLKKRFSHRPVQEKFVCLNCGFETHADEQAALNIARSWLFLRSQEYKKYQTNKTTGNTDKRAFVETWQSFYRKKLKEVWKPAV

SEQ ID NO: 43338 - protein, 978 aa, synthetic construct
  REGION 1..978: note = engineered CasX variant
QEIKRINKIRRRLVKDSNTKKAGKTGPMKTLLVRVMTPDLRERLENLRKKPENIPQPISNTSRANLNKLLTDYTEMKKAILHVYWEEFQKDPVGLMSRVAQPASKKIDQNKLKPEMDEKGNLTTAGFACSQCGQPLFVYKLEQVSEKGKAYTNYFGRCNVAEHEKLILLAQLKPEKDSDEAVTYSLGKFGQRALDFYSIHVTKESTHPVKPLAQIAGNRYASTPVGKALSDACMGTIASFLSKYQDIIIEHQKVVKGNQKRLESLRELAGKENLEYPSVTLPPQPHTKEGVDAYNEVIARVRMWVNLNLWQKLKLSRDDAKPLLRLKGFPSFPLVERQANEVDWWDMVCNVKKLINEKKEDGKVFWQNLAGYKRQEALRPYLSSEEDRKKGKKFARYQLGDLLLHLEKKHGEDWGKVYDEAWERIDKKVEGLSKHIKLEEERRSEDAQSKAALTDWLRAKASFVIEGKKEADKDEFCRCELKLQKWYGDLRGKPFAIEAENSILDISGFSKQYNCAFIWQKDGVKKLNLYLIINYFKGGKLRFKKIKPEAFEANRFYTVINKKSGEIVPMEVNFNFDDPNLIILPLAFGKRQGREFIWNDLLSLETGSLKLANGRVIEKTLYNRRTRQDEPALFVALTFERREVLDSSNIKPMNLIGVDRGENIPAVIALTDPEGCPLSRFKDSLGNPTHILRIGESYKEKQRTIQAKKEVEQRRAGGYSRKYASKAKNLADDMVRNTARDLLYYAVTQDAMLIFENLSRGFGRQGKRTFMAERQYTRMEDWLTAKLAYEGLPSKTYLSKTLAQYTSKTCSNCGFTITSADYDRVLEKLKKTATGWMTTINGKELKVEGQITYYNRYKRQNVVKDLSVELDRLSEESVNNDISSWTKGRSGEALSLLKKRFSHRPVQEKFVCLNCGFETHADEQAALNIARSWLFLRSQEYKKYQTNKTTGNTDKRAFVETWQSFYRKKLKEVWKPAV

SEQ ID NO: 43339 - protein, 978 aa, synthetic construct
  REGION 1..978: note = engineered CasX variant
QEIKRINKIRRRLVKDSNTKKAGKTGPMKTLLVRVMTPDLRERLENLRKKPENIPQPISNTSRANLNKLLTDYTEMKKAILHVYWEEFQKDPVGLMSRVAQPASKKIDQNKLKPEMDEKGNLTTAGFACSQCGQPLFVYKLEQVSEKGKAYTNYFGRCNVAEHEKLILLAQLKPEKDSDEAVTYSLGKFGQRALDFYSIHVTKESTHPVKPLAQIAGNRYASAPVGKALSDACMGTIASFLSKYQDIIIEHQKVVKGNQKRLESLRELAGKENLEYPSVTLPPQPHTKEGVDAYNEVIARVRMWVNLNLWQKLKLSRDDAKPLLRLKGFPSFPLVERQANEVDWWDMVCNVKKLINEKKEDGKVFWQNLAGYKRQEALRPYLSSEEDRKKGKKFARYQLGDLLLHLEKKHGEDWGKVYDEAWERIDKKVEGLSKHIKLEEERRSEDAQSKAALTDWLRAKASFVIEGKKEADKDEFCRCELKLQKWYGDLRGKPFAIEAENSILDISGFSKQYNCAFIWQKDGVKKLNLYLIINYFKGGKLRFKKIKPEAFEANRFYTVINKKSGEIVPMEVNFNFDDPNLIILPLAFGKRQGREFIWNDLLSLETGSLKLANGRVIEKTLYNRRTRQDEPALFVALTFERREVLDSSNIKPMNLIGVDRGENIPAVIALTDPEGCPLSRFKDSLGNPTHILRIGESYKEKQRTIQAKKEVEQRRAGGYSRKYASKAKNLADDMVRNTARDLLYYAVTQDAMLIFENLSRGFGRQGKRTFMAERQYTRMEDWLTAKLAYEGLPSKTYLSKTLAQYTSKTCSNCGFTITSADYDRVLEKLKKTATGWMTTINGKELKVEGQITYYNRYKRQNVVKDLSVELDRLSEESVNNDISSWTKGRSGEALSLLKKRFSHRPVQEKFVCLNCGFETHADEQAALNIARSWLFLRSQEYKKYQTNKTTGNTDKRAFVETWQSFYRKKLKEVWKPAV

SEQ ID NO: 43340 - protein, 978 aa, synthetic construct
  REGION 1..978: note = engineered CasX variant
QEIKRINKIRRRLVKDSNTKKAGKTGPMKTLLVRVMTPDLRERLENLRKKPENIPQPISNTSRANLNKLLTDYTEMKKAILHVYWEEFQKDPVGLMSRVAQPASKKIDQNKLKPEMDEKGNLTTAGFACSQCGQPLFVYKLEQVSEKGKAYTNYFGRCNVAEHEKLILLAQLKPEKDSDEAVTYSLGKFGQRALDFYSIHVTKESTHPVKPLAQIAGNRYASVPVGKALSDACMGTIASFLSKYQDIIIEHQKVVKGNQKRLESLRELAGKENLEYPSVTLPPQPHTKEGVDAYNEVIARVRMWVNLNLWQKLKLSRDDAKPLLRLKGFPSFPLVERQANEVDWWDMVCNVKKLINEKKEDGKVFWQNLAGYKRQEALRPYLSSEEDRKKGKKFARYQLGDLLLHLEKKHGEDWGKVYDEAWERIDKKVEGLSKHIKLEEERRSEDAQSKAALTDWLRAKASFVIEGKKEADKDEFCRCELKLQKWYGDLRGKPFAIEAENSILDISGFSKQYNCAFIWQKDGVKKLNLYLIINYFKGGKLRFKKIKPEAFEANRFYTVINKKSGEIVPMEVNFNFDDPNLIILPLAFGKRQGREFIWNDLLSLETGSLKLANGRVIEKTLYNRRTRQDEPALFVALTFERREVLDSSNIKPMNLIGVDRGENIPAVIALTDPEGCPLSRFKDSLGNPTHILRIGESYKEKQRTIQAKKEVEQRRAGGYSRKYASKAKNLADDMVRNTARDLLYYAVTQDAMLIFENLSRGFGRQGKRTFMAERQYTRMEDWLTAKLAYEGLPSKTYLSKTLAQYTSKTCSNCGFTITSADYDRVLEKLKKTATGWMTTINGKELKVEGQITYYNRYKRQNVVKDLSVELDRLSEESVNNDISSWTKGRSGEALSLLKKRFSHRPVQEKFVCLNCGFETHADEQAALNIARSWLFLRSQEYKKYQTNKTTGNTDKRAFVETWQSFYRKKLKEVWKPAV

SEQ ID NO: 43341 - protein, 978 aa, synthetic construct
  REGION 1..978: note = engineered CasX variant
QEIKRINKIRRRLVKDSNTKKAGKTGPMKTLLVRVMTPDLRERLENLRKKPENIPQPISNTSRANLNKLLTDYTEMKKAILHVYWEEFQKDPVGLMSRVAQPASKKIDQNKLKPEMDEKGNLTTAGFACSQCGQPLFVYKLEQVSEKGKAYTNYFGRCNVAEHEKLILLAQLKPEKDSDEAVTYSLGKFGQRALDFYSIHVTKESTHPVKPLAQIAGNRYASYPVGKALSDACMGTIASFLSKYQDIIIEHQKVVKGNQKRLESLRELAGKENLEYPSVTLPPQPHTKEGVDAYNEVIARVRMWVNLNLWQKLKLSRDDAKPLLRLKGFPSFPLVERQANEVDWWDMVCNVKKLINEKKEDGKVFWQNLAGYKRQEALRPYLSSEEDRKKGKKFARYQLGDLLLHLEKKHGEDWGKVYDEAWERIDKKVEGLSKHIKLEEERRSEDAQSKAALTDWLRAKASFVIEGSKEADKDEFCRCELKLQKWYGDLRGKPFAIEAENSILDISGFSKQYNCAFIWQKDGVKKLNLYLIINYFKGGKLRFKKIKPEAFEANRFYTVINKKSGEIVPMEVNFNFDDPNLIILPLAFGKRQGREFIWNDLLSLETGSLKLANGRVIEKTLYNRRTRQDEPALFVALTFERREVLDSSNIKPMNLIGVDRGENIPAVIALTDPEGCPLSRFKDSLGNPTHILRIGESYKEKQRTIQAKKEVEQRRAGGYSRKYASKAKNLADDMVRNTARDLLYYAVTQDAMLIFENLSRGFGRQGKRTFMAERQYTRMEDWLTAKLAYEGLPSKTYLSKTLAQYTSKTCSNCGFTITSADYDRVLEKLKKTATGWMTTINGKELKVEGQITYYNRYKRQNVVKDLSVELDRLSEESVNNDISSWTKGRSGEALSLLKKRFSHRPVQEKFVCLNCGFETHADEQAALNIARSWLFLRSQEYKKYQTNKTTGNTDKRAFVETWQSFYRKKLKEVWKPAV

SEQ ID NO: 43342 - protein, 978 aa, synthetic construct
  REGION 1..978: note = engineered CasX variant
QEIKRINKIRRRLVKDSNTKKAGKTGPMKTLLVRVMTPDLRERLENLRKKPENIPQPISNTSRANLNKLLTDYTEMKKAILHVYWEEFQKDPVGLMSRVAQPASKKIDQNKLKPEMDEKGNLTTAGFACSQCGQPLFVYKLEQVSEKGKAYTNYFGRCNVAEHEKLILLAQLKPEKDSDEAVTYSLGKFGQRALDFYSIHVTKESTHPVKPLAQIAGNRYASHPVGKALSDACMGTIASFLSKYQDIIIEHQKVVKGNQKRLESLRELAGKENLEYPSVTLPPQPHTKEGVDAYNEVIARVRMWVNLNLWQKLKLSRDDAKPLLRLKGFPSFPLVERQANEVDWWDMVCNVKKLINEKKEDGKVFWQNLAGYKRQEALRPYLSSEEDRKKGKKFARYQLGDLLLHLEKKHGEDWGKVYDEAWERIDKKVEGLSKHIKLEEERRSEDAQSKAALTDWLRAKASFVIEGSKEADKDEFCRCELKLQKWYGDLRGKPFAIEAENSILDISGFSKQYNCAFIWQKDGVKKLNLYLIINYFKGGKLRFKKIKPEAFEANRFYTVINKKSGEIVPMEVNFNFDDPNLIILPLAFGKRQGREFIWNDLLSLETGSLKLANGRVIEKTLYNRRTRQDEPALFVALTFERREVLDSSNIKPMNLIGVDRGENIPAVIALTDPEGCPLSRFKDSLGNPTHILRIGESYKEKQRTIQAKKEVEQRRAGGYSRKYASKAKNLADDMVRNTARDLLYYAVTQDAMLIFENLSRGFGRQGKRTFMAERQYTRMEDWLTAKLAYEGLPSKTYLSKTLAQYTSKTCSNCGFTITSADYDRVLEKLKKTATGWMTTINGKELKVEGQITYYNRYKRQNVVKDLSVELDRLSEESVNNDISSWTKGRSGEALSLLKKRFSHRPVQEKFVCLNCGFETHADEQAALNIARSWLFLRSQEYKKYQTNKTTGNTDKRAFVETWQSFYRKKLKEVWKPAV

SEQ ID NO: 43343 - protein, 978 aa, synthetic construct
  REGION 1..978: note = engineered CasX variant
QEIKRINKIRRRLVKDSNTKKAGKTGPMKTLLVRVMTPDLRERLENLRKKPENIPQPISNTSRANLNKLLTDYTEMKKAILHVYWEEFQKDPVGLMSRVAQPASKKIDQNKLKPEMDEKGNLTTAGFACSQCGQPLFVYKLEQVSEKGKAYTNYFGRCNVAEHEKLILLAQLKPEKDSDEAVTYSLGKFGQRALDFYSIHVTKESTHPVKPLAQIAGNRYASTPVGKALSDACMGTIASFLSKYQDIIIEHQKVVKGNQKRLESLRELAGKENLEYPSVTLPPQPHTKEGVDAYNEVIARVRMWVNLNLWQKLKLSRDDAKPLLRLKGFPSFPLVERQANEVDWWDMVCNVKKLINEKKEDGKVFWQNLAGYKRQEALRPYLSSEEDRKKGKKFARYQLGDLLLHLEKKHGEDWGKVYDEAWERIDKKVEGLSKHIKLEEERRSEDAQSKAALTDWLRAKASFVIEGSKEADKDEFCRCELKLQKWYGDLRGKPFAIEAENSILDISGFSKQYNCAFIWQKDGVKKLNLYLIINYFKGGKLRFKKIKPEAFEANRFYTVINKKSGEIVPMEVNFNFDDPNLIILPLAFGKRQGREFIWNDLLSLETGSLKLANGRVIEKTLYNRRTRQDEPALFVALTFERREVLDSSNIKPMNLIGVDRGENIPAVIALTDPEGCPLSRFKDSLGNPTHILRIGESYKEKQRTIQAKKEVEQRRAGGYSRKYASKAKNLADDMVRNTARDLLYYAVTQDAMLIFENLSRGFGRQGKRTFMAERQYTRMEDWLTAKLAYEGLPSKTYLSKTLAQYTSKTCSNCGFTITSADYDRVLEKLKKTATGWMTTINGKELKVEGQITYYNRYKRQNVVKDLSVELDRLSEESVNNDISSWTKGRSGEALSLLKKRFSHRPVQEKFVCLNCGFETHADEQAALNIARSWLFLRSQEYKKYQTNKTTGNTDKRAFVETWQSFYRKKLKEVWKPAV

SEQ ID NO: 43344 - protein, 978 aa, synthetic construct
  REGION 1..978: note = engineered CasX variant
QEIKRINKIRRRLVKDSNTKKAGKTGPMKTLLVRVMTPDLRERLENLRKKPENIPQPISNTSRANLNKLLTDYTEMKKAILHVYWEEFQKDPVGLMSRVAQPASKKIDQNKLKPEMDEKGNLTTAGFACSQCGQPLFVYKLEQVSEKGKAYTNYFGRCNVAEHEKLILLAQLKPEKDSDEAVTYSLGKFGQRALDFYSIHVTKESTHPVKPLAQIAGNRYASAPVGKALSDACMGTIASFLSKYQDIIIEHQKVVKGNQKRLESLRELAGKENLEYPSVTLPPQPHTKEGVDAYNEVIARVRMWVNLNLWQKLKLSRDDAKPLLRLKGFPSFPLVERQANEVDWWDMVCNVKKLINEKKEDGKVFWQNLAGYKRQEALRPYLSSEEDRKKGKKFARYQLGDLLLHLEKKHGEDWGKVYDEAWERIDKKVEGLSKHIKLEEERRSEDAQSKAALTDWLRAKASFVIEGSKEADKDEFCRCELKLQKWYGDLRGKPFAIEAENSILDISGFSKQYNCAFIWQKDGVKKLNLYLIINYFKGGKLRFKKIKPEAFEANRFYTVINKKSGEIVPMEVNFNFDDPNLIILPLAFGKRQGREFIWNDLLSLETGSLKLANGRVIEKTLYNRRTRQDEPALFVALTFERREVLDSSNIKPMNLIGVDRGENIPAVIALTDPEGCPLSRFKDSLGNPTHILRIGESYKEKQRTIQAKKEVEQRRAGGYSRKYASKAKNLADDMVRNTARDLLYYAVTQDAMLIFENLSRGFGRQGKRTFMAERQYTRMEDWLTAKLAYEGLPSKTYLSKTLAQYTSKTCSNCGFTITSADYDRVLEKLKKTATGWMTTINGKELKVEGQITYYNRYKRQNVVKDLSVELDRLSEESVNNDISSWTKGRSGEALSLLKKRFSHRPVQEKFVCLNCGFETHADEQAALNIARSWLFLRSQEYKKYQTNKTTGNTDKRAFVETWQSFYRKKLKEVWKPAV

SEQ ID NO: 43345 - protein, 978 aa, synthetic construct
  REGION 1..978: note = engineered CasX variant
QEIKRINKIRRRLVKDSNTKKAGKTGPMKTLLVRVMTPDLRERLENLRKKPENIPQPISNTSRANLNKLLTDYTEMKKAILHVYWEEFQKDPVGLMSRVAQPASKKIDQNKLKPEMDEKGNLTTAGFACSQCGQPLFVYKLEQVSEKGKAYTNYFGRCNVAEHEKLILLAQLKPEKDSDEAVTYSLGKFGQRALDFYSIHVTKESTHPVKPLAQIAGNRYASVPVGKALSDACMGTIASFLSKYQDIIIEHQKVVKGNQKRLESLRELAGKENLEYPSVTLPPQPHTKEGVDAYNEVIARVRMWVNLNLWQKLKLSRDDAKPLLRLKGFPSFPLVERQANEVDWWDMVCNVKKLINEKKEDGKVFWQNLAGYKRQEALRPYLSSEEDRKKGKKFARYQLGDLLLHLEKKHGEDWGKVYDEAWERIDKKVEGLSKHIKLEEERRSEDAQSKAALTDWLRAKASFVIEGSKEADKDEFCRCELKLQKWYGDLRGKPFAIEAENSILDISGFSKQYNCAFIWQKDGVKKLNLYLIINYFKGGKLRFKKIKPEAFEANRFYTVINKKSGEIVPMEVNFNFDDPNLIILPLAFGKRQGREFIWNDLLSLETGSLKLANGRVIEKTLYNRRTRQDEPALFVALTFERREVLDSSNIKPMNLIGVDRGENIPAVIALTDPEGCPLSRFKDSLGNPTHILRIGESYKEKQRTIQAKKEVEQRRAGGYSRKYASKAKNLADDMVRNTARDLLYYAVTQDAMLIFENLSRGFGRQGKRTFMAERQYTRMEDWLTAKLAYEGLPSKTYLSKTLAQYTSKTCSNCGFTITSADYDRVLEKLKKTATGWMTTINGKELKVEGQITYYNRYKRQNVVKDLSVELDRLSEESVNNDISSWTKGRSGEALSLLKKRFSHRPVQEKFVCLNCGFETHADEQAALNIARSWLFLRSQEYKKYQTNKTTGNTDKRAFVETWQSFYRKKLKEVWKPAV

SEQ ID NO: 43346 - protein, 979 aa, synthetic construct
  REGION 1..979: note = engineered CasX variant
QEIKRINKIRRRLVKDSNTKKAGKTGPMKTLLVRVMTPDLRERLENLRKKPENIPQPISNTSRANLNKLLTDYTEMKKAILHVYWEEFQKDPVGLMSRVAQPASKKIDQNKLKPEMDEKGNLTTAGFACSQCGQPLFVYKLEQVSEKGKAYTNYFGRCNVAEHEKLILLAQLKPEKDSDEAVTYSLGKFGQRALDFYSIHVTKESTHPVKPLAQIAGNRYASYPVGKALSDACMGTIASFLSKYQDIIIEHQKVVKGNQKRLESLRELAGKENLEYPSVTLPPQPHTKEGVDAYNEVIARVRMWVNLNLWQKLKLSRDDAKPLLRLKGFPSFPLVERQANEVDWWDMVCNVKKLINEKKEDGKVFWQNLAGYKRQEALRPYLSSEEDRKKGKKFARYQLGDLLLHLEKKHGEDWGKVYDEAWERIDKKVEGLSKHIKLEEERRSEDAQSKAALTDWLRAKASFVIEGLKEADDKDEFCRCELKLQKWYGDLRGKPFAIEAENSILDISGFSKQYNCAFIWQKDGVKKLNLYLIINYFKGGKLRFKKIKPEAFEANRFYTVINKKSGEIVPMEVNFNFDDPNLIILPLAFGKRQGREFIWNDLLSLETGSLKLANGRVIEKTLYNRRTRQDEPALFVALTFERREVLDSSNIKPMNLIGVDRGENIPAVIALTDPEGCPLSRFKDSLGNPTHILRIGESYKEKQRTIQAKKEVEQRRAGGYSRKYASKAKNLADDMVRNTARDLLYYAVTQDAMLIFENLSRGFGRQGKRTFMAERQYTRMEDWLTAKLAYEGLPSKTYLSKTLAQYTSKTCSNCGFTITSADYDRVLEKLKKTATGWMTTINGKELKVEGQITYYNRYKRQNVVKDLSVELDRLSEESVNNDISSWTKGRSGEALSLLKKRFSHRPVQEKFVCLNCGFETHADEQAALNIARSWLFLRSQEYKKYQTNKTTGNTDKRAFVETWQSFYRKKLKEVWKPAV

SEQ ID NO: 43347 - protein, 979 aa, synthetic construct
  REGION 1..979: note = engineered CasX variant
QEIKRINKIRRRLVKDSNTKKAGKTGPMKTLLVRVMTPDLRERLENLRKKPENIPQPISNTSRANLNKLLTDYTEMKKAILHVYWEEFQKDPVGLMSRVAQPASKKIDQNKLKPEMDEKGNLTTAGFACSQCGQPLFVYKLEQVSEKGKAYTNYFGRCNVAEHEKLILLAQLKPEKDSDEAVTYSLGKFGQRALDFYSIHVTKESTHPVKPLAQIAGNRYASHPVGKALSDACMGTIASFLSKYQDIIIEHQKVVKGNQKRLESLRELAGKENLEYPSVTLPPQPHTKEGVDAYNEVIARVRMWVNLNLWQKLKLSRDDAKPLLRLKGFPSFPLVERQANEVDWWDMVCNVKKLINEKKEDGKVFWQNLAGYKRQEALRPYLSSEEDRKKGKKFARYQLGDLLLHLEKKHGEDWGKVYDEAWERIDKKVEGLSKHIKLEEERRSEDAQSKAALTDWLRAKASFVIEGLKEADDKDEFCRCELKLQKWYGDLRGKPFAIEAENSILDISGFSKQYNCAFIWQKDGVKKLNLYLIINYFKGGKLRFKKIKPEAFEANRFYTVINKKSGEIVPMEVNFNFDDPNLIILPLAFGKRQGREFIWNDLLSLETGSLKLANGRVIEKTLYNRRTRQDEPALFVALTFERREVLDSSNIKPMNLIGVDRGENIPAVIALTDPEGCPLSRFKDSLGNPTHILRIGESYKEKQRTIQAKKEVEQRRAGGYSRKYASKAKNLADDMVRNTARDLLYYAVTQDAMLIFENLSRGFGRQGKRTFMAERQYTRMEDWLTAKLAYEGLPSKTYLSKTLAQYTSKTCSNCGFTITSADYDRVLEKLKKTATGWMTTINGKELKVEGQITYYNRYKRQNVVKDLSVELDRLSEESVNNDISSWTKGRSGEALSLLKKRFSHRPVQEKFVCLNCGFETHADEQAALNIARSWLFLRSQEYKKYQTNKTTGNTDKRAFVETWQSFYRKKLKEVWKPAV

SEQ ID NO: 43348 - protein, 979 aa, synthetic construct
  REGION 1..979: note = engineered CasX variant
QEIKRINKIRRRLVKDSNTKKAGKTGPMKTLLVRVMTPDLRERLENLRKKPENIPQPISNTSRANLNKLLTDYTEMKKAILHVYWEEFQKDPVGLMSRVAQPASKKIDQNKLKPEMDEKGNLTTAGFACSQCGQPLFVYKLEQVSEKGKAYTNYFGRCNVAEHEKLILLAQLKPEKDSDEAVTYSLGKFGQRALDFYSIHVTKESTHPVKPLAQIAGNRYASTPVGKALSDACMGTIASFLSKYQDIIIEHQKVVKGNQKRLESLRELAGKENLEYPSVTLPPQPHTKEGVDAYNEVIARVRMWVNLNLWQKLKLSRDDAKPLLRLKGFPSFPLVERQANEVDWWDMVCNVKKLINEKKEDGKVFWQNLAGYKRQEALRPYLSSEEDRKKGKKFARYQLGDLLLHLEKKHGEDWGKVYDEAWERIDKKVEGLSKHIKLEEERRSEDAQSKAALTDWLRAKASFVIEGLKEADDKDEFCRCELKLQKWYGDLRGKPFAIEAENSILDISGFSKQYNCAFIWQKDGVKKLNLYLIINYFKGGKLRFKKIKPEAFEANRFYTVINKKSGEIVPMEVNFNFDDPNLIILPLAFGKRQGREFIWNDLLSLETGSLKLANGRVIEKTLYNRRTRQDEPALFVALTFERREVLDSSNIKPMNLIGVDRGENIPAVIALTDPEGCPLSRFKDSLGNPTHILRIGESYKEKQRTIQAKKEVEQRRAGGYSRKYASKAKNLADDMVRNTARDLLYYAVTQDAMLIFENLSRGFGRQGKRTFMAERQYTRMEDWLTAKLAYEGLPSKTYLSKTLAQYTSKTCSNCGFTITSADYDRVLEKLKKTATGWMTTINGKELKVEGQITYYNRYKRQNVVKDLSVELDRLSEESVNNDISSWTKGRSGEALSLLKKRFSHRPVQEKFVCLNCGFETHADEQAALNIARSWLFLRSQEYKKYQTNKTTGNTDKRAFVETWQSFYRKKLKEVWKPAV

SEQ ID NO: 43349 - protein, 979 aa, synthetic construct
  REGION 1..979: note = engineered CasX variant
QEIKRINKIRRRLVKDSNTKKAGKTGPMKTLLVRVMTPDLRERLENLRKKPENIPQPISNTSRANLNKLLTDYTEMKKAILHVYWEEFQKDPVGLMSRVAQPASKKIDQNKLKPEMDEKGNLTTAGFACSQCGQPLFVYKLEQVSEKGKAYTNYFGRCNVAEHEKLILLAQLKPEKDSDEAVTYSLGKFGQRALDFYSIHVTKESTHPVKPLAQIAGNRYASAPVGKALSDACMGTIASFLSKYQDIIIEHQKVVKGNQKRLESLRELAGKENLEYPSVTLPPQPHTKEGVDAYNEVIARVRMWVNLNLWQKLKLSRDDAKPLLRLKGFPSFPLVERQANEVDWWDMVCNVKKLINEKKEDGKVFWQNLAGYKRQEALRPYLSSEEDRKKGKKFARYQLGDLLLHLEKKHGEDWGKVYDEAWERIDKKVEGLSKHIKLEEERRSEDAQSKAALTDWLRAKASFVIEGLKEADDKDEFCRCELKLQKWYGDLRGKPFAIEAENSILDISGFSKQYNCAFIWQKDGVKKLNLYLIINYFKGGKLRFKKIKPEAFEANRFYTVINKKSGEIVPMEVNFNFDDPNLIILPLAFGKRQGREFIWNDLLSLETGSLKLANGRVIEKTLYNRRTRQDEPALFVALTFERREVLDSSNIKPMNLIGVDRGENIPAVIALTDPEGCPLSRFKDSLGNPTHILRIGESYKEKQRTIQAKKEVEQRRAGGYSRKYASKAKNLADDMVRNTARDLLYYAVTQDAMLIFENLSRGFGRQGKRTFMAERQYTRMEDWLTAKLAYEGLPSKTYLSKTLAQYTSKTCSNCGFTITSADYDRVLEKLKKTATGWMTTINGKELKVEGQITYYNRYKRQNVVKDLSVELDRLSEESVNNDISSWTKGRSGEALSLLKKRFSHRPVQEKFVCLNCGFETHADEQAALNIARSWLFLRSQEYKKYQTNKTTGNTDKRAFVETWQSFYRKKLKEVWKPAV

SEQ ID NO: 43350 - protein, 979 aa, synthetic construct
  REGION 1..979: note = engineered CasX variant
QEIKRINKIRRRLVKDSNTKKAGKTGPMKTLLVRVMTPDLRERLENLRKKPENIPQPISNTSRANLNKLLTDYTEMKKAILHVYWEEFQKDPVGLMSRVAQPASKKIDQNKLKPEMDEKGNLTTAGFACSQCGQPLFVYKLEQVSEKGKAYTNYFGRCNVAEHEKLILLAQLKPEKDSDEAVTYSLGKFGQRALDFYSIHVTKESTHPVKPLAQIAGNRYASVPVGKALSDACMGTIASFLSKYQDIIIEHQKVVKGNQKRLESLRELAGKENLEYPSVTLPPQPHTKEGVDAYNEVIARVRMWVNLNLWQKLKLSRDDAKPLLRLKGFPSFPLVERQANEVDWWDMVCNVKKLINEKKEDGKVFWQNLAGYKRQEALRPYLSSEEDRKKGKKFARYQLGDLLLHLEKKHGEDWGKVYDEAWERIDKKVEGLSKHIKLEEERRSEDAQSKAALTDWLRAKASFVIEGLKEADDKDEFCRCELKLQKWYGDLRGKPFAIEAENSILDISGFSKQYNCAFIWQKDGVKKLNLYLIINYFKGGKLRFKKIKPEAFEANRFYTVINKKSGEIVPMEVNFNFDDPNLIILPLAFGKRQGREFIWNDLLSLETGSLKLANGRVIEKTLYNRRTRQDEPALFVALTFERREVLDSSNIKPMNLIGVDRGENIPAVIALTDPEGCPLSRFKDSLGNPTHILRIGESYKEKQRTIQAKKEVEQRRAGGYSRKYASKAKNLADDMVRNTARDLLYYAVTQDAMLIFENLSRGFGRQGKRTFMAERQYTRMEDWLTAKLAYEGLPSKTYLSKTLAQYTSKTCSNCGFTITSADYDRVLEKLKKTATGWMTTINGKELKVEGQITYYNRYKRQNVVKDLSVELDRLSEESVNNDISSWTKGRSGEALSLLKKRFSHRPVQEKFVCLNCGFETHADEQAALNIARSWLFLRSQEYKKYQTNKTTGNTDKRAFVETWQSFYRKKLKEVWKPAV

SEQ ID NO: 43351 - protein, 979 aa, synthetic construct
  REGION 1..979: note = engineered CasX variant
QEIKRINKIRRRLVKDSNTKKAGKTGPMKTLLVRVMTPDLRERLENLRKKPENIPQPISNTSRANLNKLLTDYTEMKKAILHVYWEEFQKDPVGLMSRVAQPASKKIDQNKLKPEMDEKGNLTTAGFACSQCGQPLFVYKLEQVSEKGKAYTNYFGRCNVAEHEKLILLAQLKPEKDSDEAVTYSLGKFGQRALDFYSIHVTKESTHPVKPLAQIAGNRYASYPVGKALSDACMGTIASFLSKYQDIIIEHQKVVKGNQKRLESLRELAGKENLEYPSVTLPPQPHTKEGVDAYNEVIARVRMWVNLNLWQKLKLSRDDAKPLLRLKGFPSFPLVERQANEVDWWDMVCNVKKLINEKKEDGKVFWQNLAGYKRQEALRPYLSSEEDRKKGKKFARYQLGDLLLHLEKKHGEDWGKVYDEAWERIDKKVEGLSKHIKLEEERRSEDAQSKAALTDWLRAKASFVIEGLKEADKDEFCRCELKLQKWYGDLRGKPFAIEAENSILDISGFSKQYNCAFIWQKDGVKKLNLYLIINYFKGGKLRFKKIKPEAFEANRFYTVINKKSGEIVPMEVNFNFDDPNLIILPLAFGKRQGREFIWNDLLSLETGSLKLANGRVIEKTLYNRRTRQDEPALFVALTFERREVLDSSNIKPMNLIGVDRGENIPAVIALTDPEGCPLSRFKDSLGNPTHILRIGESYKEKQRTIQAKKEVEQRRAGGYSRKYASKAKNLADDMVRNTARDLLYYAVTQDAMLIFENLSRGFGRQGKRTFMAERQYTRMEDWLTAKLAYEGLPSKTYLSKTLAQYTSKTCSNCGFTITSADYDRVLEKLKKTATGWMTTINGKELKVEGQITYYNRYKRQNVVKDLSVELDRLSEESVNNDISSWTKGRSGNEALSLLKKRFSHRPVQEKFVCLNCGFETHADEQAALNIARSWLFLRSQEYKKYQTNKTTGNTDKRAFVETWQSFYRKKLKEVWKPAV

SEQ ID NO: 43352 - protein, 979 aa, synthetic construct
  REGION 1..979: note = engineered CasX variant
QEIKRINKIRRRLVKDSNTKKAGKTGPMKTLLVRVMTPDLRERLENLRKKPENIPQPISNTSRANLNKLLTDYTEMKKAILHVYWEEFQKDPVGLMSRVAQPASKKIDQNKLKPEMDEKGNLTTAGFACSQCGQPLFVYKLEQVSEKGKAYTNYFGRCNVAEHEKLILLAQLKPEKDSDEAVTYSLGKFGQRALDFYSIHVTKESTHPVKPLAQIAGNRYASHPVGKALSDACMGTIASFLSKYQDIIIEHQKVVKGNQKRLESLRELAGKENLEYPSVTLPPQPHTKEGVDAYNEVIARVRMWVNLNLWQKLKLSRDDAKPLLRLKGFPSFPLVERQANEVDWWDMVCNVKKLINEKKEDGKVFWQNLAGYKRQEALRPYLSSEEDRKKGKKFARYQLGDLLLHLEKKHGEDWGKVYDEAWERIDKKVEGLSKHIKLEEERRSEDAQSKAALTDWLRAKASFVIEGLKEADKDEFCRCELKLQKWYGDLRGKPFAIEAENSILDISGFSKQYNCAFIWQKDGVKKLNLYLIINYFKGGKLRFKKIKPEAFEANRFYTVINKKSGEIVPMEVNFNFDDPNLIILPLAFGKRQGREFIWNDLLSLETGSLKLANGRVIEKTLYNRRTRQDEPALFVALTFERREVLDSSNIKPMNLIGVDRGENIPAVIALTDPEGCPLSRFKDSLGNPTHILRIGESYKEKQRTIQAKKEVEQRRAGGYSRKYASKAKNLADDMVRNTARDLLYYAVTQDAMLIFENLSRGFGRQGKRTFMAERQYTRMEDWLTAKLAYEGLPSKTYLSKTLAQYTSKTCSNCGFTITSADYDRVLEKLKKTATGWMTTINGKELKVEGQITYYNRYKRQNVVKDLSVELDRLSEESVNNDISSWTKGRSGNEALSLLKKRFSHRPVQEKFVCLNCGFETHADEQAALNIARSWLFLRSQEYKKYQTNKTTGNTDKRAFVETWQSFYRKKLKEVWKPAV

SEQ ID NO: 43353 - protein, 979 aa, synthetic construct
  REGION 1..979: note = engineered CasX variant
QEIKRINKIRRRLVKDSNTKKAGKTGPMKTLLVRVMTPDLRERLENLRKKPENIPQPISNTSRANLNKLLTDYTEMKKAILHVYWEEFQKDPVGLMSRVAQPASKKIDQNKLKPEMDEKGNLTTAGFACSQCGQPLFVYKLEQVSEKGKAYTNYFGRCNVAEHEKLILLAQLKPEKDSDEAVTYSLGKFGQRALDFYSIHVTKESTHPVKPLAQIAGNRYASTPVGKALSDACMGTIASFLSKYQDIIIEHQKVVKGNQKRLESLRELAGKENLEYPSVTLPPQPHTKEGVDAYNEVIARVRMWVNLNLWQKLKLSRDDAKPLLRLKGFPSFPLVERQANEVDWWDMVCNVKKLINEKKEDGKVFWQNLAGYKRQEALRPYLSSEEDRKKGKKFARYQLGDLLLHLEKKHGEDWGKVYDEAWERIDKKVEGLSKHIKLEEERRSEDAQSKAALTDWLRAKASFVIEGLKEADKDEFCRCELKLQKWYGDLRGKPFAIEAENSILDISGFSKQYNCAFIWQKDGVKKLNLYLIINYFKGGKLRFKKIKPEAFEANRFYTVINKKSGEIVPMEVNFNFDDPNLIILPLAFGKRQGREFIWNDLLSLETGSLKLANGRVIEKTLYNRRTRQDEPALFVALTFERREVLDSSNIKPMNLIGVDRGENIPAVIALTDPEGCPLSRFKDSLGNPTHILRIGESYKEKQRTIQAKKEVEQRRAGGYSRKYASKAKNLADDMVRNTARDLLYYAVTQDAMLIFENLSRGFGRQGKRTFMAERQYTRMEDWLTAKLAYEGLPSKTYLSKTLAQYTSKTCSNCGFTITSADYDRVLEKLKKTATGWMTTINGKELKVEGQITYYNRYKRQNVVKDLSVELDRLSEESVNNDISSWTKGRSGNEALSLLKKRFSHRPVQEKFVCLNCGFETHADEQAALNIARSWLFLRSQEYKKYQTNKTTGNTDKRAFVETWQSFYRKKLKEVWKPAV

SEQ ID NO: 43354 - protein, 979 aa, synthetic construct
  REGION 1..979: note = engineered CasX variant
QEIKRINKIRRRLVKDSNTKKAGKTGPMKTLLVRVMTPDLRERLENLRKKPENIPQPISNTSRANLNKLLTDYTEMKKAILHVYWEEFQKDPVGLMSRVAQPASKKIDQNKLKPEMDEKGNLTTAGFACSQCGQPLFVYKLEQVSEKGKAYTNYFGRCNVAEHEKLILLAQLKPEKDSDEAVTYSLGKFGQRALDFYSIHVTKESTHPVKPLAQIAGNRYASAPVGKALSDACMGTIASFLSKYQDIIIEHQKVVKGNQKRLESLRELAGKENLEYPSVTLPPQPHTKEGVDAYNEVIARVRMWVNLNLWQKLKLSRDDAKPLLRLKGFPSFPLVERQANEVDWWDMVCNVKKLINEKKEDGKVFWQNLAGYKRQEALRPYLSSEEDRKKGKKFARYQLGDLLLHLEKKHGEDWGKVYDEAWERIDKKVEGLSKHIKLEEERRSEDAQSKAALTDWLRAKASFVIEGLKEADKDEFCRCELKLQKWYGDLRGKPFAIEAENSILDISGFSKQYNCAFIWQKDGVKKLNLYLIINYFKGGKLRFKKIKPEAFEANRFYTVINKKSGEIVPMEVNFNFDDPNLIILPLAFGKRQGREFIWNDLLSLETGSLKLANGRVIEKTLYNRRTRQDEPALFVALTFERREVLDSSNIKPMNLIGVDRGENIPAVIALTDPEGCPLSRFKDSLGNPTHILRIGESYKEKQRTIQAKKEVEQRRAGGYSRKYASKAKNLADDMVRNTARDLLYYAVTQDAMLIFENLSRGFGRQGKRTFMAERQYTRMEDWLTAKLAYEGLPSKTYLSKTLAQYTSKTCSNCGFTITSADYDRVLEKLKKTATGWMTTINGKELKVEGQITYYNRYKRQNVVKDLSVELDRLSEESVNNDISSWTKGRSGNEALSLLKKRFSHRPVQEKFVCLNCGFETHADEQAALNIARSWLFLRSQEYKKYQTNKTTGNTDKRAFVETWQSFYRKKLKEVWKPAV

SEQ ID NO: 43355 - protein, 979 aa, synthetic construct
  REGION 1..979: note = engineered CasX variant
QEIKRINKIRRRLVKDSNTKKAGKTGPMKTLLVRVMTPDLRERLENLRKKPENIPQPISNTSRANLNKLLTDYTEMKKAILHVYWEEFQKDPVGLMSRVAQPASKKIDQNKLKPEMDEKGNLTTAGFACSQCGQPLFVYKLEQVSEKGKAYTNYFGRCNVAEHEKLILLAQLKPEKDSDEAVTYSLGKFGQRALDFYSIHVTKESTHPVKPLAQIAGNRYASVPVGKALSDACMGTIASFLSKYQDIIIEHQKVVKGNQKRLESLRELAGKENLEYPSVTLPPQPHTKEGVDAYNEVIARVRMWVNLNLWQKLKLSRDDAKPLLRLKGFPSFPLVERQANEVDWWDMVCNVKKLINEKKEDGKVFWQNLAGYKRQEALRPYLSSEEDRKKGKKFARYQLGDLLLHLEKKHGEDWGKVYDEAWERIDKKVEGLSKHIKLEEERRSEDAQSKAALTDWLRAKASFVIEGLKEADKDEFCRCELKLQKWYGDLRGKPFAIEAENSILDISGFSKQYNCAFIWQKDGVKKLNLYLIINYFKGGKLRFKKIKPEAFEANRFYTVINKKSGEIVPMEVNFNFDDPNLIILPLAFGKRQGREFIWNDLLSLETGSLKLANGRVIEKTLYNRRTRQDEPALFVALTFERREVLDSSNIKPMNLIGVDRGENIPAVIALTDPEGCPLSRFKDSLGNPTHILRIGESYKEKQRTIQAKKEVEQRRAGGYSRKYASKAKNLADDMVRNTARDLLYYAVTQDAMLIFENLSRGFGRQGKRTFMAERQYTRMEDWLTAKLAYEGLPSKTYLSKTLAQYTSKTCSNCGFTITSADYDRVLEKLKKTATGWMTTINGKELKVEGQITYYNRYKRQNVVKDLSVELDRLSEESVNNDISSWTKGRSGNEALSLLKKRFSHRPVQEKFVCLNCGFETHADEQAALNIARSWLFLRSQEYKKYQTNKTTGNTDKRAFVETWQSFYRKKLKEVWKPAV

SEQ ID NO: 43356 - protein, 978 aa, synthetic construct
  REGION 1..978: note = engineered CasX variant
QEIKRINKIRRRLVKDSNTKKAGKTGPMKTLLVRVMTPDLRERLENLRKKPENIPQPISNTSRANLNKLLTDYTEMKKAILHVYWEEFQKDPVGLMSRVAQPASKKIDQNKLKPEMDEKGNLTTAGFACSQCGQPLFVYKLEQVSEKGKAYTNYFGRCNVAEHEKLILLAQLKPEKDSDEAVTYSLGKFGQRALDFYSIHVTKESTHPVKPLAQIAGNRYASYPVGKALSDACMGTIASFLSKYQDIIIEHQKVVKGNQKRLESLRELAGKENLEYPSVTLPPQPHTKEGVDAYNEVIARVRMWVNLNLWQKLKLSRDDAKPLLRLKGFPSFPLVERQANEVDWWDMVCNVKKLINEKKEDGKVFWQNLAGYKRQEALRPYLSSEEDRQKGKKFARYQLGDLLLHLEKKHGEDWGKVYDEAWERIDKKVEGLSKHIKLEEERRSEDAQSKAALTDWLRAKASFVIEGLKEADKDEFCRCELKLQKWYGDLRGKPFAIEAENSILDISGFSKQYNCAFIWQKDGVKKLNLYLIINYFKGGKLRFKKIKPEAFEANRFYTVINKKSGEIVPMEVNFNFDDPNLIILPLAFGKRQGREFIWNDLLSLETGSLKLANGRVIEKTLYNRRTRQDEPALFVALTFERREVLDSSNIKPMNLIGVDRGENIPAVIALTDPEGCPLSRFKDSLGNPTHILRIGESYKEKQRTIQAKKEVEQRRAGGYSRKYASKAKNLADDMVRNTARDLLYYAVTQDAMLIFENLSRGFGRQGKRTFMAERQYTRMEDWLTAKLAYEGLPSKTYLSKTLAQYTSKTCSNCGFTITSADYDRVLEKLKKTATGWMTTINGKELKVEGQITYYNRYKRQNVVKDLSVELDRLSEESVNNDISSWTKGRSGEALSLLKKRFSHRPVQEKFVCLNCGFETHADEQAALNIARSWLFLRSQEYKKYQTNKTTGNTDKRAFVETWQSFYRKKLKEVWKPAV

SEQ ID NO: 43357 - protein, 978 aa, synthetic construct
  REGION 1..978: note = engineered CasX variant
QEIKRINKIRRRLVKDSNTKKAGKTGPMKTLLVRVMTPDLRERLENLRKKPENIPQPISNTSRANLNKLLTDYTEMKKAILHVYWEEFQKDPVGLMSRVAQPASKKIDQNKLKPEMDEKGNLTTAGFACSQCGQPLFVYKLEQVSEKGKAYTNYFGRCNVAEHEKLILLAQLKPEKDSDEAVTYSLGKFGQRALDFYSIHVTKESTHPVKPLAQIAGNRYASHPVGKALSDACMGTIASFLSKYQDIIIEHQKVVKGNQKRLESLRELAGKENLEYPSVTLPPQPHTKEGVDAYNEVIARVRMWVNLNLWQKLKLSRDDAKPLLRLKGFPSFPLVERQANEVDWWDMVCNVKKLINEKKEDGKVFWQNLAGYKRQEALRPYLSSEEDRQKGKKFARYQLGDLLLHLEKKHGEDWGKVYDEAWERIDKKVEGLSKHIKLEEERRSEDAQSKAALTDWLRAKASFVIEGLKEADKDEFCRCELKLQKWYGDLRGKPFAIEAENSILDISGFSKQYNCAFIWQKDGVKKLNLYLIINYFKGGKLRFKKIKPEAFEANRFYTVINKKSGEIVPMEVNFNFDDPNLIILPLAFGKRQGREFIWNDLLSLETGSLKLANGRVIEKTLYNRRTRQDEPALFVALTFERREVLDSSNIKPMNLIGVDRGENIPAVIALTDPEGCPLSRFKDSLGNPTHILRIGESYKEKQRTIQAKKEVEQRRAGGYSRKYASKAKNLADDMVRNTARDLLYYAVTQDAMLIFENLSRGFGRQGKRTFMAERQYTRMEDWLTAKLAYEGLPSKTYLSKTLAQYTSKTCSNCGFTITSADYDRVLEKLKKTATGWMTTINGKELKVEGQITYYNRYKRQNVVKDLSVELDRLSEESVNNDISSWTKGRSGEALSLLKKRFSHRPVQEKFVCLNCGFETHADEQAALNIARSWLFLRSQEYKKYQTNKTTGNTDKRAFVETWQSFYRKKLKEVWKPAV

SEQ ID NO: 43358 - protein, 978 aa, synthetic construct
  REGION 1..978: note = engineered CasX variant
QEIKRINKIRRRLVKDSNTKKAGKTGPMKTLLVRVMTPDLRERLENLRKKPENIPQPISNTSRANLNKLLTDYTEMKKAILHVYWEEFQKDPVGLMSRVAQPASKKIDQNKLKPEMDEKGNLTTAGFACSQCGQPLFVYKLEQVSEKGKAYTNYFGRCNVAEHEKLILLAQLKPEKDSDEAVTYSLGKFGQRALDFYSIHVTKESTHPVKPLAQIAGNRYASTPVGKALSDACMGTIASFLSKYQDIIIEHQKVVKGNQKRLESLRELAGKENLEYPSVTLPPQPHTKEGVDAYNEVIARVRMWVNLNLWQKLKLSRDDAKPLLRLKGFPSFPLVERQANEVDWWDMVCNVKKLINEKKEDGKVFWQNLAGYKRQEALRPYLSSEEDRQKGKKFARYQLGDLLLHLEKKHGEDWGKVYDEAWERIDKKVEGLSKHIKLEEERRSEDAQSKAALTDWLRAKASFVIEGLKEADKDEFCRCELKLQKWYGDLRGKPFAIEAENSILDISGFSKQYNCAFIWQKDGVKKLNLYLIINYFKGGKLRFKKIKPEAFEANRFYTVINKKSGEIVPMEVNFNFDDPNLIILPLAFGKRQGREFIWNDLLSLETGSLKLANGRVIEKTLYNRRTRQDEPALFVALTFERREVLDSSNIKPMNLIGVDRGENIPAVIALTDPEGCPLSRFKDSLGNPTHILRIGESYKEKQRTIQAKKEVEQRRAGGYSRKYASKAKNLADDMVRNTARDLLYYAVTQDAMLIFENLSRGFGRQGKRTFMAERQYTRMEDWLTAKLAYEGLPSKTYLSKTLAQYTSKTCSNCGFTITSADYDRVLEKLKKTATGWMTTINGKELKVEGQITYYNRYKRQNVVKDLSVELDRLSEESVNNDISSWTKGRSGEALSLLKKRFSHRPVQEKFVCLNCGFETHADEQAALNIARSWLFLRSQEYKKYQTNKTTGNTDKRAFVETWQSFYRKKLKEVWKPAV

SEQ ID NO: 43359 - protein, 978 aa, synthetic construct
  REGION 1..978: note = engineered CasX variant
QEIKRINKIRRRLVKDSNTKKAGKTGPMKTLLVRVMTPDLRERLENLRKKPENIPQPISNTSRANLNKLLTDYTEMKKAILHVYWEEFQKDPVGLMSRVAQPASKKIDQNKLKPEMDEKGNLTTAGFACSQCGQPLFVYKLEQVSEKGKAYTNYFGRCNVAEHEKLILLAQLKPEKDSDEAVTYSLGKFGQRALDFYSIHVTKESTHPVKPLAQIAGNRYASAPVGKALSDACMGTIASFLSKYQDIIIEHQKVVKGNQKRLESLRELAGKENLEYPSVTLPPQPHTKEGVDAYNEVIARVRMWVNLNLWQKLKLSRDDAKPLLRLKGFPSFPLVERQANEVDWWDMVCNVKKLINEKKEDGKVFWQNLAGYKRQEALRPYLSSEEDRQKGKKFARYQLGDLLLHLEKKHGEDWGKVYDEAWERIDKKVEGLSKHIKLEEERRSEDAQSKAALTDWLRAKASFVIEGLKEADKDEFCRCELKLQKWYGDLRGKPFAIEAENSILDISGFSKQYNCAFIWQKDGVKKLNLYLIINYFKGGKLRFKKIKPEAFEANRFYTVINKKSGEIVPMEVNFNFDDPNLIILPLAFGKRQGREFIWNDLLSLETGSLKLANGRVIEKTLYNRRTRQDEPALFVALTFERREVLDSSNIKPMNLIGVDRGENIPAVIALTDPEGCPLSRFKDSLGNPTHILRIGESYKEKQRTIQAKKEVEQRRAGGYSRKYASKAKNLADDMVRNTARDLLYYAVTQDAMLIFENLSRGFGRQGKRTFMAERQYTRMEDWLTAKLAYEGLPSKTYLSKTLAQYTSKTCSNCGFTITSADYDRVLEKLKKTATGWMTTINGKELKVEGQITYYNRYKRQNVVKDLSVELDRLSEESVNNDISSWTKGRSGEALSLLKKRFSHRPVQEKFVCLNCGFETHADEQAALNIARSWLFLRSQEYKKYQTNKTTGNTDKRAFVETWQSFYRKKLKEVWKPAV

SEQ ID NO: 43360 - protein, 978 aa, synthetic construct
  REGION 1..978: note = engineered CasX variant
QEIKRINKIRRRLVKDSNTKKAGKTGPMKTLLVRVMTPDLRERLENLRKKPENIPQPISNTSRANLNKLLTDYTEMKKAILHVYWEEFQKDPVGLMSRVAQPASKKIDQNKLKPEMDEKGNLTTAGFACSQCGQPLFVYKLEQVSEKGKAYTNYFGRCNVAEHEKLILLAQLKPEKDSDEAVTYSLGKFGQRALDFYSIHVTKESTHPVKPLAQIAGNRYASVPVGKALSDACMGTIASFLSKYQDIIIEHQKVVKGNQKRLESLRELAGKENLEYPSVTLPPQPHTKEGVDAYNEVIARVRMWVNLNLWQKLKLSRDDAKPLLRLKGFPSFPLVERQANEVDWWDMVCNVKKLINEKKEDGKVFWQNLAGYKRQEALRPYLSSEEDRQKGKKFARYQLGDLLLHLEKKHGEDWGKVYDEAWERIDKKVEGLSKHIKLEEERRSEDAQSKAALTDWLRAKASFVIEGLKEADKDEFCRCELKLQKWYGDLRGKPFAIEAENSILDISGFSKQYNCAFIWQKDGVKKLNLYLIINYFKGGKLRFKKIKPEAFEANRFYTVINKKSGEIVPMEVNFNFDDPNLIILPLAFGKRQGREFIWNDLLSLETGSLKLANGRVIEKTLYNRRTRQDEPALFVALTFERREVLDSSNIKPMNLIGVDRGENIPAVIALTDPEGCPLSRFKDSLGNPTHILRIGESYKEKQRTIQAKKEVEQRRAGGYSRKYASKAKNLADDMVRNTARDLLYYAVTQDAMLIFENLSRGFGRQGKRTFMAERQYTRMEDWLTAKLAYEGLPSKTYLSKTLAQYTSKTCSNCGFTITSADYDRVLEKLKKTATGWMTTINGKELKVEGQITYYNRYKRQNVVKDLSVELDRLSEESVNNDISSWTKGRSGEALSLLKKRFSHRPVQEKFVCLNCGFETHADEQAALNIARSWLFLRSQEYKKYQTNKTTGNTDKRAFVETWQSFYRKKLKEVWKPAV

SEQ ID NO: 43361 - protein, 978 aa, synthetic construct
  REGION 1..978: note = engineered CasX variant
QEIKRINKIRRRLVKDSNTKKAGKTGPMKTLLVRVMTPDLRERLENLRKKPENIPQPISNTSRANLNKLLTDYTEMKKAILHVYWEEFQKDPVGLMSRVAQPASKKIDQNKLKPEMDEKGNLTTAGFACSQCGQPLFVYKLEQVSEKGKAYTNYFGRCNVAEHEKLILLAQLKPEKDSDEAVTYSLGKFGQRALDFYSIHVTKESTHPVKPLAQIAGNRYASYPVGKALSDACMGTIASFLSKYQDIIIEHQKVVKGNQKRLESLRELAGKENLEYPSVTLPPQPHTKEGVDAYNEVIARVRMWVNLNLWQKLKLSRDDAKPLLRLKGFPSFPLVERQANEVDWWDMVCNVKKLINEKKEDGKVFWQNLAGYKRQEALRPYLSSEEDRKKGKKFARYQLGDLLLHLEKKHGEDWGKVYDEAWERIDKKVEGLSKHIKLEEERRSEDAQSKAALTDWLRAKASFVIEGLKEADKDEFCRCELKLQKWYGDLRGKPFAIEAENSILDISGFSKQYNCAFIWQKDGVKKLNLYLIINYFKGGKLRFKKIKPEAFEANRFYTVINKKSGEIVPMEVNFNFDDPNLIILPLAFGKRQGREFIWNDLLSLETGSLKLANGRVIEKTLYNRRTRQDEPALFVALTFERREVLDSSNIKPMNLIGVDRGENIPAVIALTDPEGCPLSRFKDSLGNPTHILRIGESYKEKQRTIQAKKEVEQRRAGGYSRKYASKAKNLADDMVRNTARDLLYYAVTQDAMLIFENLSRGFGRQGKRTFMAERQYTRMEDWLTAKLAYEGLPSQTYLSKTLAQYTSKTCSNCGFTITSADYDRVLEKLKKTATGWMTTINGKELKVEGQITYYNRYKRQNVVKDLSVELDRLSEESVNNDISSWTKGRSGEALSLLKKRFSHRPVQEKFVCLNCGFETHADEQAALNIARSWLFLRSQEYKKYQTNKTTGNTDKRAFVETWQSFYRKKLKEVWKPAV

SEQ ID NO: 43362 - protein, 978 aa, synthetic construct
  REGION 1..978: note = engineered CasX variant
QEIKRINKIRRRLVKDSNTKKAGKTGPMKTLLVRVMTPDLRERLENLRKKPENIPQPISNTSRANLNKLLTDYTEMKKAILHVYWEEFQKDPVGLMSRVAQPASKKIDQNKLKPEMDEKGNLTTAGFACSQCGQPLFVYKLEQVSEKGKAYTNYFGRCNVAEHEKLILLAQLKPEKDSDEAVTYSLGKFGQRALDFYSIHVTKESTHPVKPLAQIAGNRYASHPVGKALSDACMGTIASFLSKYQDIIIEHQKVVKGNQKRLESLRELAGKENLEYPSVTLPPQPHTKEGVDAYNEVIARVRMWVNLNLWQKLKLSRDDAKPLLRLKGFPSFPLVERQANEVDWWDMVCNVKKLINEKKEDGKVFWQNLAGYKRQEALRPYLSSEEDRKKGKKFARYQLGDLLLHLEKKHGEDWGKVYDEAWERIDKKVEGLSKHIKLEEERRSEDAQSKAALTDWLRAKASFVIEGLKEADKDEFCRCELKLQKWYGDLRGKPFAIEAENSILDISGFSKQYNCAFIWQKDGVKKLNLYLIINYFKGGKLRFKKIKPEAFEANRFYTVINKKSGEIVPMEVNFNFDDPNLIILPLAFGKRQGREFIWNDLLSLETGSLKLANGRVIEKTLYNRRTRQDEPALFVALTFERREVLDSSNIKPMNLIGVDRGENIPAVIALTDPEGCPLSRFKDSLGNPTHILRIGESYKEKQRTIQAKKEVEQRRAGGYSRKYASKAKNLADDMVRNTARDLLYYAVTQDAMLIFENLSRGFGRQGKRTFMAERQYTRMEDWLTAKLAYEGLPSQTYLSKTLAQYTSKTCSNCGFTITSADYDRVLEKLKKTATGWMTTINGKELKVEGQITYYNRYKRQNVVKDLSVELDRLSEESVNNDISSWTKGRSGEALSLLKKRFSHRPVQEKFVCLNCGFETHADEQAALNIARSWLFLRSQEYKKYQTNKTTGNTDKRAFVETWQSFYRKKLKEVWKPAV

SEQ ID NO: 43363 - protein, 978 aa, synthetic construct
  REGION 1..978: note = engineered CasX variant
QEIKRINKIRRRLVKDSNTKKAGKTGPMKTLLVRVMTPDLRERLENLRKKPENIPQPISNTSRANLNKLLTDYTEMKKAILHVYWEEFQKDPVGLMSRVAQPASKKIDQNKLKPEMDEKGNLTTAGFACSQCGQPLFVYKLEQVSEKGKAYTNYFGRCNVAEHEKLILLAQLKPEKDSDEAVTYSLGKFGQRALDFYSIHVTKESTHPVKPLAQIAGNRYASTPVGKALSDACMGTIASFLSKYQDIIIEHQKVVKGNQKRLESLRELAGKENLEYPSVTLPPQPHTKEGVDAYNEVIARVRMWVNLNLWQKLKLSRDDAKPLLRLKGFPSFPLVERQANEVDWWDMVCNVKKLINEKKEDGKVFWQNLAGYKRQEALRPYLSSEEDRKKGKKFARYQLGDLLLHLEKKHGEDWGKVYDEAWERIDKKVEGLSKHIKLEEERRSEDAQSKAALTDWLRAKASFVIEGLKEADKDEFCRCELKLQKWYGDLRGKPFAIEAENSILDISGFSKQYNCAFIWQKDGVKKLNLYLIINYFKGGKLRFKKIKPEAFEANRFYTVINKKSGEIVPMEVNFNFDDPNLIILPLAFGKRQGREFIWNDLLSLETGSLKLANGRVIEKTLYNRRTRQDEPALFVALTFERREVLDSSNIKPMNLIGVDRGENIPAVIALTDPEGCPLSRFKDSLGNPTHILRIGESYKEKQRTIQAKKEVEQRRAGGYSRKYASKAKNLADDMVRNTARDLLYYAVTQDAMLIFENLSRGFGRQGKRTFMAERQYTRMEDWLTAKLAYEGLPSQTYLSKTLAQYTSKTCSNCGFTITSADYDRVLEKLKKTATGWMTTINGKELKVEGQITYYNRYKRQNVVKDLSVELDRLSEESVNNDISSWTKGRSGEALSLLKKRFSHRPVQEKFVCLNCGFETHADEQAALNIARSWLFLRSQEYKKYQTNKTTGNTDKRAFVETWQSFYRKKLKEVWKPAV

SEQ ID NO: 43364 - protein, 978 aa, synthetic construct
  REGION 1..978: note = engineered CasX variant
QEIKRINKIRRRLVKDSNTKKAGKTGPMKTLLVRVMTPDLRERLENLRKKPENIPQPISNTSRANLNKLLTDYTEMKKAILHVYWEEFQKDPVGLMSRVAQPASKKIDQNKLKPEMDEKGNLTTAGFACSQCGQPLFVYKLEQVSEKGKAYTNYFGRCNVAEHEKLILLAQLKPEKDSDEAVTYSLGKFGQRALDFYSIHVTKESTHPVKPLAQIAGNRYASAPVGKALSDACMGTIASFLSKYQDIIIEHQKVVKGNQKRLESLRELAGKENLEYPSVTLPPQPHTKEGVDAYNEVIARVRMWVNLNLWQKLKLSRDDAKPLLRLKGFPSFPLVERQANEVDWWDMVCNVKKLINEKKEDGKVFWQNLAGYKRQEALRPYLSSEEDRKKGKKFARYQLGDLLLHLEKKHGEDWGKVYDEAWERIDKKVEGLSKHIKLEEERRSEDAQSKAALTDWLRAKASFVIEGLKEADKDEFCRCELKLQKWYGDLRGKPFAIEAENSILDISGFSKQYNCAFIWQKDGVKKLNLYLIINYFKGGKLRFKKIKPEAFEANRFYTVINKKSGEIVPMEVNFNFDDPNLIILPLAFGKRQGREFIWNDLLSLETGSLKLANGRVIEKTLYNRRTRQDEPALFVALTFERREVLDSSNIKPMNLIGVDRGENIPAVIALTDPEGCPLSRFKDSLGNPTHILRIGESYKEKQRTIQAKKEVEQRRAGGYSRKYASKAKNLADDMVRNTARDLLYYAVTQDAMLIFENLSRGFGRQGKRTFMAERQYTRMEDWLTAKLAYEGLPSQTYLSKTLAQYTSKTCSNCGFTITSADYDRVLEKLKKTATGWMTTINGKELKVEGQITYYNRYKRQNVVKDLSVELDRLSEESVNNDISSWTKGRSGEALSLLKKRFSHRPVQEKFVCLNCGFETHADEQAALNIARSWLFLRSQEYKKYQTNKTTGNTDKRAFVETWQSFYRKKLKEVWKPAV

SEQ ID NO: 43365 - protein, 978 aa, synthetic construct
  REGION 1..978: note = engineered CasX variant
QEIKRINKIRRRLVKDSNTKKAGKTGPMKTLLVRVMTPDLRERLENLRKKPENIPQPISNTSRANLNKLLTDYTEMKKAILHVYWEEFQKDPVGLMSRVAQPASKKIDQNKLKPEMDEKGNLTTAGFACSQCGQPLFVYKLEQVSEKGKAYTNYFGRCNVAEHEKLILLAQLKPEKDSDEAVTYSLGKFGQRALDFYSIHVTKESTHPVKPLAQIAGNRYASVPVGKALSDACMGTIASFLSKYQDIIIEHQKVVKGNQKRLESLRELAGKENLEYPSVTLPPQPHTKEGVDAYNEVIARVRMWVNLNLWQKLKLSRDDAKPLLRLKGFPSFPLVERQANEVDWWDMVCNVKKLINEKKEDGKVFWQNLAGYKRQEALRPYLSSEEDRKKGKKFARYQLGDLLLHLEKKHGEDWGKVYDEAWERIDKKVEGLSKHIKLEEERRSEDAQSKAALTDWLRAKASFVIEGLKEADKDEFCRCELKLQKWYGDLRGKPFAIEAENSILDISGFSKQYNCAFIWQKDGVKKLNLYLIINYFKGGKLRFKKIKPEAFEANRFYTVINKKSGEIVPMEVNFNFDDPNLIILPLAFGKRQGREFIWNDLLSLETGSLKLANGRVIEKTLYNRRTRQDEPALFVALTFERREVLDSSNIKPMNLIGVDRGENIPAVIALTDPEGCPLSRFKDSLGNPTHILRIGESYKEKQRTIQAKKEVEQRRAGGYSRKYASKAKNLADDMVRNTARDLLYYAVTQDAMLIFENLSRGFGRQGKRTFMAERQYTRMEDWLTAKLAYEGLPSQTYLSKTLAQYTSKTCSNCGFTITSADYDRVLEKLKKTATGWMTTINGKELKVEGQITYYNRYKRQNVVKDLSVELDRLSEESVNNDISSWTKGRSGEALSLLKKRFSHRPVQEKFVCLNCGFETHADEQAALNIARSWLFLRSQEYKKYQTNKTTGNTDKRAFVETWQSFYRKKLKEVWKPAV

SEQ ID NO: 43366 - protein, 978 aa, synthetic construct
  REGION 1..978: note = engineered CasX variant
QEIKRINKIRRRLVKDSNTKKAGKTGPMKTLLVRVMTPDLRERLENLRKKPENIPQPISNTSRANLNKLLTDYTEMKKAILHVYWEEFQKDPVGLMSRVAQPASKKIDQNKLKPEMDEKGNLTTAGFACSQCGQPLFVYKLEQVSEKGKAYTNYFGRCNVAEHEKLILLAQLKPEKDSDEAVTYSLGKFGQRALDFYSIHVTKESTHPVKPLAQIAGNRYASYPVGKALSDACMGTIASFLSKYQDIIIEHQKVVKGNQKRLESLRELAGKENLEYPSVTLPPQPHTKEGVDAYNEVIARVRMWVNLNLWQKLKLSRDDAKPLLRLKGFPSFPLVERQANEVDWWDMVCNVKKLINEKKEDGKVFWQNLAGYKRQEALRPYLSSEEDRKKGKKFARYQLGDLLLHLEKKHGEDWGKVYDEAWERIDKKVEGLSKHIKLEEERRSEDAQSKAALTDWLRAKASFVIEGLKEADKDEFCRCELKLQKWYGDLRGKPFAIEAENSILDISGFSKQYNCAFIWQKDGVKKLNLYLIINYFKGGKLRFKKIKPEAFEANRFYTVINKKSGEIVPMEVNFNFDDPNLIILPLAFGKRQGREFIWNDLLSLETGSLKLANGRVIEKTLYNRRTRQDEPALFVALTFERREVLDSSNIKPMNLIGVDRGENIPAVIALTDPEGCPLSRFKDSLGNPTHILRIGESYKEKQRTIQAKKEVEQRRAGGYSRKYASKAKNLADDMVRNTARDLLYYAVTQDAMLIFENLSRGFGRQGKRTFMAERQYTRMEDWLTAKLAYNGLPSKTYLSKTLAQYTSKTCSNCGFTITSADYDRVLEKLKKTATGWMTTINGKELKVEGQITYYNRYKRQNVVKDLSVELDRLSEESVNNDISSWTKGRSGEALSLLKKRFSHRPVQEKFVCLNCGFETHADEQAALNIARSWLFLRSQEYKKYQTNKTTGNTDKRAFVETWQSFYRKKLKEVWKPAV

SEQ ID NO: 43367 - protein, 978 aa, synthetic construct
  REGION 1..978: note = engineered CasX variant
QEIKRINKIRRRLVKDSNTKKAGKTGPMKTLLVRVMTPDLRERLENLRKKPENIPQPISNTSRANLNKLLTDYTEMKKAILHVYWEEFQKDPVGLMSRVAQPASKKIDQNKLKPEMDEKGNLTTAGFACSQCGQPLFVYKLEQVSEKGKAYTNYFGRCNVAEHEKLILLAQLKPEKDSDEAVTYSLGKFGQRALDFYSIHVTKESTHPVKPLAQIAGNRYASHPVGKALSDACMGTIASFLSKYQDIIIEHQKVVKGNQKRLESLRELAGKENLEYPSVTLPPQPHTKEGVDAYNEVIARVRMWVNLNLWQKLKLSRDDAKPLLRLKGFPSFPLVERQANEVDWWDMVCNVKKLINEKKEDGKVFWQNLAGYKRQEALRPYLSSEEDRKKGKKFARYQLGDLLLHLEKKHGEDWGKVYDEAWERIDKKVEGLSKHIKLEEERRSEDAQSKAALTDWLRAKASFVIEGLKEADKDEFCRCELKLQKWYGDLRGKPFAIEAENSILDISGFSKQYNCAFIWQKDGVKKLNLYLIINYFKGGKLRFKKIKPEAFEANRFYTVINKKSGEIVPMEVNFNFDDPNLIILPLAFGKRQGREFIWNDLLSLETGSLKLANGRVIEKTLYNRRTRQDEPALFVALTFERREVLDSSNIKPMNLIGVDRGENIPAVIALTDPEGCPLSRFKDSLGNPTHILRIGESYKEKQRTIQAKKEVEQRRAGGYSRKYASKAKNLADDMVRNTARDLLYYAVTQDAMLIFENLSRGFGRQGKRTFMAERQYTRMEDWLTAKLAYNGLPSKTYLSKTLAQYTSKTCSNCGFTITSADYDRVLEKLKKTATGWMTTINGKELKVEGQITYYNRYKRQNVVKDLSVELDRLSEESVNNDISSWTKGRSGEALSLLKKRFSHRPVQEKFVCLNCGFETHADEQAALNIARSWLFLRSQEYKKYQTNKTTGNTDKRAFVETWQSFYRKKLKEVWKPAV

SEQ ID NO: 43368 - protein, 978 aa, synthetic construct
  REGION 1..978: note = engineered CasX variant
QEIKRINKIRRRLVKDSNTKKAGKTGPMKTLLVRVMTPDLRERLENLRKKPENIPQPISNTSRANLNKLLTDYTEMKKAILHVYWEEFQKDPVGLMSRVAQPASKKIDQNKLKPEMDEKGNLTTAGFACSQCGQPLFVYKLEQVSEKGKAYTNYFGRCNVAEHEKLILLAQLKPEKDSDEAVTYSLGKFGQRALDFYSIHVTKESTHPVKPLAQIAGNRYASTPVGKALSDACMGTIASFLSKYQDIIIEHQKVVKGNQKRLESLRELAGKENLEYPSVTLPPQPHTKEGVDAYNEVIARVRMWVNLNLWQKLKLSRDDAKPLLRLKGFPSFPLVERQANEVDWWDMVCNVKKLINEKKEDGKVFWQNLAGYKRQEALRPYLSSEEDRKKGKKFARYQLGDLLLHLEKKHGEDWGKVYDEAWERIDKKVEGLSKHIKLEEERRSEDAQSKAALTDWLRAKASFVIEGLKEADKDEFCRCELKLQKWYGDLRGKPFAIEAENSILDISGFSKQYNCAFIWQKDGVKKLNLYLIINYFKGGKLRFKKIKPEAFEANRFYTVINKKSGEIVPMEVNFNFDDPNLIILPLAFGKRQGREFIWNDLLSLETGSLKLANGRVIEKTLYNRRTRQDEPALFVALTFERREVLDSSNIKPMNLIGVDRGENIPAVIALTDPEGCPLSRFKDSLGNPTHILRIGESYKEKQRTIQAKKEVEQRRAGGYSRKYASKAKNLADDMVRNTARDLLYYAVTQDAMLIFENLSRGFGRQGKRTFMAERQYTRMEDWLTAKLAYNGLPSKTYLSKTLAQYTSKTCSNCGFTITSADYDRVLEKLKKTATGWMTTINGKELKVEGQITYYNRYKRQNVVKDLSVELDRLSEESVNNDISSWTKGRSGEALSLLKKRFSHRPVQEKFVCLNCGFETHADEQAALNIARSWLFLRSQEYKKYQTNKTTGNTDKRAFVETWQSFYRKKLKEVWKPAV

SEQ ID NO: 43369 - protein, 978 aa, synthetic construct
  REGION 1..978: note = engineered CasX variant
QEIKRINKIRRRLVKDSNTKKAGKTGPMKTLLVRVMTPDLRERLENLRKKPENIPQPISNTSRANLNKLLTDYTEMKKAILHVYWEEFQKDPVGLMSRVAQPASKKIDQNKLKPEMDEKGNLTTAGFACSQCGQPLFVYKLEQVSEKGKAYTNYFGRCNVAEHEKLILLAQLKPEKDSDEAVTYSLGKFGQRALDFYSIHVTKESTHPVKPLAQIAGNRYASAPVGKALSDACMGTIASFLSKYQDIIIEHQKVVKGNQKRLESLRELAGKENLEYPSVTLPPQPHTKEGVDAYNEVIARVRMWVNLNLWQKLKLSRDDAKPLLRLKGFPSFPLVERQANEVDWWDMVCNVKKLINEKKEDGKVFWQNLAGYKRQEALRPYLSSEEDRKKGKKFARYQLGDLLLHLEKKHGEDWGKVYDEAWERIDKKVEGLSKHIKLEEERRSEDAQSKAALTDWLRAKASFVIEGLKEADKDEFCRCELKLQKWYGDLRGKPFAIEAENSILDISGFSKQYNCAFIWQKDGVKKLNLYLIINYFKGGKLRFKKIKPEAFEANRFYTVINKKSGEIVPMEVNFNFDDPNLIILPLAFGKRQGREFIWNDLLSLETGSLKLANGRVIEKTLYNRRTRQDEPALFVALTFERREVLDSSNIKPMNLIGVDRGENIPAVIALTDPEGCPLSRFKDSLGNPTHILRIGESYKEKQRTIQAKKEVEQRRAGGYSRKYASKAKNLADDMVRNTARDLLYYAVTQDAMLIFENLSRGFGRQGKRTFMAERQYTRMEDWLTAKLAYNGLPSKTYLSKTLAQYTSKTCSNCGFTITSADYDRVLEKLKKTATGWMTTINGKELKVEGQITYYNRYKRQNVVKDLSVELDRLSEESVNNDISSWTKGRSGEALSLLKKRFSHRPVQEKFVCLNCGFETHADEQAALNIARSWLFLRSQEYKKYQTNKTTGNTDKRAFVETWQSFYRKKLKEVWKPAV

SEQ ID NO: 43370 - protein, 978 aa, synthetic construct
  REGION 1..978: note = engineered CasX variant
QEIKRINKIRRRLVKDSNTKKAGKTGPMKTLLVRVMTPDLRERLENLRKKPENIPQPISNTSRANLNKLLTDYTEMKKAILHVYWEEFQKDPVGLMSRVAQPASKKIDQNKLKPEMDEKGNLTTAGFACSQCGQPLFVYKLEQVSEKGKAYTNYFGRCNVAEHEKLILLAQLKPEKDSDEAVTYSLGKFGQRALDFYSIHVTKESTHPVKPLAQIAGNRYASVPVGKALSDACMGTIASFLSKYQDIIIEHQKVVKGNQKRLESLRELAGKENLEYPSVTLPPQPHTKEGVDAYNEVIARVRMWVNLNLWQKLKLSRDDAKPLLRLKGFPSFPLVERQANEVDWWDMVCNVKKLINEKKEDGKVFWQNLAGYKRQEALRPYLSSEEDRKKGKKFARYQLGDLLLHLEKKHGEDWGKVYDEAWERIDKKVEGLSKHIKLEEERRSEDAQSKAALTDWLRAKASFVIEGLKEADKDEFCRCELKLQKWYGDLRGKPFAIEAENSILDISGFSKQYNCAFIWQKDGVKKLNLYLIINYFKGGKLRFKKIKPEAFEANRFYTVINKKSGEIVPMEVNFNFDDPNLIILPLAFGKRQGREFIWNDLLSLETGSLKLANGRVIEKTLYNRRTRQDEPALFVALTFERREVLDSSNIKPMNLIGVDRGENIPAVIALTDPEGCPLSRFKDSLGNPTHILRIGESYKEKQRTIQAKKEVEQRRAGGYSRKYASKAKNLADDMVRNTARDLLYYAVTQDAMLIFENLSRGFGRQGKRTFMAERQYTRMEDWLTAKLAYNGLPSKTYLSKTLAQYTSKTCSNCGFTITSADYDRVLEKLKKTATGWMTTINGKELKVEGQITYYNRYKRQNVVKDLSVELDRLSEESVNNDISSWTKGRSGEALSLLKKRFSHRPVQEKFVCLNCGFETHADEQAALNIARSWLFLRSQEYKKYQTNKTTGNTDKRAFVETWQSFYRKKLKEVWKPAV

SEQ ID NO: 43371 - protein, 978 aa, synthetic construct
  REGION 1..978: note = engineered CasX variant
QEIKRINKIRRRLVKDSNTKKAGKTGPMKTLLVRVMTPDLRERLENLRKKPENIPQPISNTSRANLNKLLTDYTEMKKAILHVYWEEFQKDPVGLMSRVAQPASKKIDQNKLKPEMDEKGNLTTAGFACSQCGQPLFVYKLEQVSEKGKAYTNYFGRCNVAEHEKLIQLAQLKPEKDSDEAVTYSLGKFGQRALDFYSIHVTKESTHPVKPLAQIAGNRYASYPVGKALSDACMGTIASFLSKYQDIIIEHQKVVKGNQKRLESLRELAGKENLEYPSVTLPPQPHTKEGVDAYNEVIARVRMWVNLNLWQKLKLSRDDAKPLLRLKGFPSFPLVERQANEVDWWDMVCNVKKLINEKKEDGKVFWQNLAGYKRQEALRPYLSSEEDRKKGKKFARYQLGDLLLHLEKKHGEDWGKVYDEAWERIDKKVEGLSKHIKLEEERRSEDAQSKAALTDWLRAKASFVIEGLKEADKDEFCRCELKLQKWYGDLRGKPFAIEAENSILDISGFSKQYNCAFIWQKDGVKKLNLYLIINYFKGGKLRFKKIKPEAFEANRFYTVINKKSGEIVPMEVNFNFDDPNLIILPLAFGKRQGREFIWNDLLSLETGSLKLANGRVIEKTLYNRRTRQDEPALFVALTFERREVLDSSNIKPMNLIGVDRGENIPAVIALTDPEGCPLSRFKDSLGNPTHILRIGESYKEKQRTIQAKKEVEQRRAGGYSRKYASKAKNLADDMVRNTARDLLYYAVTQDAMLIFENLSRGFGRQGKRTFMAERQYTRMEDWLTAKLAYEGLPSKTYLSKTLAQYTSKTCSNCGFTITSADYDRVLEKLKKTATGWMTTINGKELKVEGQITYYNRYKRQNVVKDLSVELDRLSEESVNNDISSWTKGRSGEALSLLKKRFSHRPVQEKFVCLNCGFETHADEQAALNIARSWLFLRSQEYKKYQTNKTTGNTDKRAFVETWQSFYRKKLKEVWKPAV

SEQ ID NO: 43372 - protein, 978 aa, synthetic construct
  REGION 1..978: note = engineered CasX variant
QEIKRINKIRRRLVKDSNTKKAGKTGPMKTLLVRVMTPDLRERLENLRKKPENIPQPISNTSRANLNKLLTDYTEMKKAILHVYWEEFQKDPVGLMSRVAQPASKKIDQNKLKPEMDEKGNLTTAGFACSQCGQPLFVYKLEQVSEKGKAYTNYFGRCNVAEHEKLIQLAQLKPEKDSDEAVTYSLGKFGQRALDFYSIHVTKESTHPVKPLAQIAGNRYASHPVGKALSDACMGTIASFLSKYQDIIIEHQKVVKGNQKRLESLRELAGKENLEYPSVTLPPQPHTKEGVDAYNEVIARVRMWVNLNLWQKLKLSRDDAKPLLRLKGFPSFPLVERQANEVDWWDMVCNVKKLINEKKEDGKVFWQNLAGYKRQEALRPYLSSEEDRKKGKKFARYQLGDLLLHLEKKHGEDWGKVYDEAWERIDKKVEGLSKHIKLEEERRSEDAQSKAALTDWLRAKASFVIEGLKEADKDEFCRCELKLQKWYGDLRGKPFAIEAENSILDISGFSKQYNCAFIWQKDGVKKLNLYLIINYFKGGKLRFKKIKPEAFEANRFYTVINKKSGEIVPMEVNFNFDDPNLIILPLAFGKRQGREFIWNDLLSLETGSLKLANGRVIEKTLYNRRTRQDEPALFVALTFERREVLDSSNIKPMNLIGVDRGENIPAVIALTDPEGCPLSRFKDSLGNPTHILRIGESYKEKQRTIQAKKEVEQRRAGGYSRKYASKAKNLADDMVRNTARDLLYYAVTQDAMLIFENLSRGFGRQGKRTFMAERQYTRMEDWLTAKLAYEGLPSKTYLSKTLAQYTSKTCSNCGFTITSADYDRVLEKLKKTATGWMTTINGKELKVEGQITYYNRYKRQNVVKDLSVELDRLSEESVNNDISSWTKGRSGEALSLLKKRFSHRPVQEKFVCLNCGFETHADEQAALNIARSWLFLRSQEYKKYQTNKTTGNTDKRAFVETWQSFYRKKLKEVWKPAV

SEQ ID NO: 43373 - protein, 978 aa, synthetic construct
  REGION 1..978: note = engineered CasX variant
QEIKRINKIRRRLVKDSNTKKAGKTGPMKTLLVRVMTPDLRERLENLRKKPENIPQPISNTSRANLNKLLTDYTEMKKAILHVYWEEFQKDPVGLMSRVAQPASKKIDQNKLKPEMDEKGNLTTAGFACSQCGQPLFVYKLEQVSEKGKAYTNYFGRCNVAEHEKLIQLAQLKPEKDSDEAVTYSLGKFGQRALDFYSIHVTKESTHPVKPLAQIAGNRYASTPVGKALSDACMGTIASFLSKYQDIIIEHQKVVKGNQKRLESLRELAGKENLEYPSVTLPPQPHTKEGVDAYNEVIARVRMWVNLNLWQKLKLSRDDAKPLLRLKGFPSFPLVERQANEVDWWDMVCNVKKLINEKKEDGKVFWQNLAGYKRQEALRPYLSSEEDRKKGKKFARYQLGDLLLHLEKKHGEDWGKVYDEAWERIDKKVEGLSKHIKLEEERRSEDAQSKAALTDWLRAKASFVIEGLKEADKDEFCRCELKLQKWYGDLRGKPFAIEAENSILDISGFSKQYNCAFIWQKDGVKKLNLYLIINYFKGGKLRFKKIKPEAFEANRFYTVINKKSGEIVPMEVNFNFDDPNLIILPLAFGKRQGREFIWNDLLSLETGSLKLANGRVIEKTLYNRRTRQDEPALFVALTFERREVLDSSNIKPMNLIGVDRGENIPAVIALTDPEGCPLSRFKDSLGNPTHILRIGESYKEKQRTIQAKKEVEQRRAGGYSRKYASKAKNLADDMVRNTARDLLYYAVTQDAMLIFENLSRGFGRQGKRTFMAERQYTRMEDWLTAKLAYEGLPSKTYLSKTLAQYTSKTCSNCGFTITSADYDRVLEKLKKTATGWMTTINGKELKVEGQITYYNRYKRQNVVKDLSVELDRLSEESVNNDISSWTKGRSGEALSLLKKRFSHRPVQEKFVCLNCGFETHADEQAALNIARSWLFLRSQEYKKYQTNKTTGNTDKRAFVETWQSFYRKKLKEVWKPAV

SEQ ID NO: 43374 - protein, 978 aa, synthetic construct
  REGION 1..978: note = engineered CasX variant
QEIKRINKIRRRLVKDSNTKKAGKTGPMKTLLVRVMTPDLRERLENLRKKPENIPQPISNTSRANLNKLLTDYTEMKKAILHVYWEEFQKDPVGLMSRVAQPASKKIDQNKLKPEMDEKGNLTTAGFACSQCGQPLFVYKLEQVSEKGKAYTNYFGRCNVAEHEKLIQLAQLKPEKDSDEAVTYSLGKFGQRALDFYSIHVTKESTHPVKPLAQIAGNRYASAPVGKALSDACMGTIASFLSKYQDIIIEHQKVVKGNQKRLESLRELAGKENLEYPSVTLPPQPHTKEGVDAYNEVIARVRMWVNLNLWQKLKLSRDDAKPLLRLKGFPSFPLVERQANEVDWWDMVCNVKKLINEKKEDGKVFWQNLAGYKRQEALRPYLSSEEDRKKGKKFARYQLGDLLLHLEKKHGEDWGKVYDEAWERIDKKVEGLSKHIKLEEERRSEDAQSKAALTDWLRAKASFVIEGLKEADKDEFCRCELKLQKWYGDLRGKPFAIEAENSILDISGFSKQYNCAFIWQKDGVKKLNLYLIINYFKGGKLRFKKIKPEAFEANRFYTVINKKSGEIVPMEVNFNFDDPNLIILPLAFGKRQGREFIWNDLLSLETGSLKLANGRVIEKTLYNRRTRQDEPALFVALTFERREVLDSSNIKPMNLIGVDRGENIPAVIALTDPEGCPLSRFKDSLGNPTHILRIGESYKEKQRTIQAKKEVEQRRAGGYSRKYASKAKNLADDMVRNTARDLLYYAVTQDAMLIFENLSRGFGRQGKRTFMAERQYTRMEDWLTAKLAYEGLPSKTYLSKTLAQYTSKTCSNCGFTITSADYDRVLEKLKKTATGWMTTINGKELKVEGQITYYNRYKRQNVVKDLSVELDRLSEESVNNDISSWTKGRSGEALSLLKKRFSHRPVQEKFVCLNCGFETHADEQAALNIARSWLFLRSQEYKKYQTNKTTGNTDKRAFVETWQSFYRKKLKEVWKPAV

SEQ ID NO: 43375 - protein, 978 aa, synthetic construct
  REGION 1..978: note = engineered CasX variant
QEIKRINKIRRRLVKDSNTKKAGKTGPMKTLLVRVMTPDLRERLENLRKKPENIPQPISNTSRANLNKLLTDYTEMKKAILHVYWEEFQKDPVGLMSRVAQPASKKIDQNKLKPEMDEKGNLTTAGFACSQCGQPLFVYKLEQVSEKGKAYTNYFGRCNVAEHEKLIQLAQLKPEKDSDEAVTYSLGKFGQRALDFYSIHVTKESTHPVKPLAQIAGNRYASVPVGKALSDACMGTIASFLSKYQDIIIEHQKVVKGNQKRLESLRELAGKENLEYPSVTLPPQPHTKEGVDAYNEVIARVRMWVNLNLWQKLKLSRDDAKPLLRLKGFPSFPLVERQANEVDWWDMVCNVKKLINEKKEDGKVFWQNLAGYKRQEALRPYLSSEEDRKKGKKFARYQLGDLLLHLEKKHGEDWGKVYDEAWERIDKKVEGLSKHIKLEEERRSEDAQSKAALTDWLRAKASFVIEGLKEADKDEFCRCELKLQKWYGDLRGKPFAIEAENSILDISGFSKQYNCAFIWQKDGVKKLNLYLIINYFKGGKLRFKKIKPEAFEANRFYTVINKKSGEIVPMEVNFNFDDPNLIILPLAFGKRQGREFIWNDLLSLETGSLKLANGRVIEKTLYNRRTRQDEPALFVALTFERREVLDSSNIKPMNLIGVDRGENIPAVIALTDPEGCPLSRFKDSLGNPTHILRIGESYKEKQRTIQAKKEVEQRRAGGYSRKYASKAKNLADDMVRNTARDLLYYAVTQDAMLIFENLSRGFGRQGKRTFMAERQYTRMEDWLTAKLAYEGLPSKTYLSKTLAQYTSKTCSNCGFTITSADYDRVLEKLKKTATGWMTTINGKELKVEGQITYYNRYKRQNVVKDLSVELDRLSEESVNNDISSWTKGRSGEALSLLKKRFSHRPVQEKFVCLNCGFETHADEQAALNIARSWLFLRSQEYKKYQTNKTTGNTDKRAFVETWQSFYRKKLKEVWKPAV

SEQ ID NO: 43376 - protein, 978 aa, synthetic construct
  REGION 1..978: note = engineered CasX variant
QEIKRINKIRRRLVKDSNTKKAGKTGPMKTLLVRVMTPDLRERLENLRKKPENIPQPISNTSRANLNKLLTDYTEMKKAILHVYWEEFQKDPVGLMSRVAQPASKKIDQNKLKPEMDEKGNLTTAGFACSQCGQPLFVYKLEQVSEKGKAYTNYFGRCNVAEHEKLIQKLAQLKPEKDSDEAVTYSLGKFGQRALDFYSIHVTKESTHPVKPLAQIAGNRYASPVGKALSDACMGTIASFLSKYQDIIIEHQKVVKGNQKRLESLRELAGKENLEYPSVTLPPQPHTKEGVDAYNEVIARVRMWVNLNLWQKLKLSRDDAKPLLRLKGFPSFPLVERQANEVDWWDMVCNVKKLINEKKEDGKVFWQNLAGYKRQEALRPYLSSEEDRKKGKKFARYQLGDLLLHLEKKHGEDWGKVYDEAWERIDKKVEGLSKHIKLEEERRSEDAQSKAALTDWLRAKASFVIEGLKEADKDEFCRCELKLQKWYGDLRGKPFAIEAENSILDISGFSKQYNCAFIWQKDGVKKLNLYLIINYFKGGKLRFKKIKPEAFEANRFYTVINKKSGEIVPMEVNFNFDDPNLIILPLAFGKRQGREFIWNDLLSLETGSLKLANGRVIEKTLYNRRTRQDEPALFVALTFERREVLDSSNIKPMNLIGVDRGENIPAVIALTDPEGCPLSRFKDSLGNPTHILRIGESYKEKQRTIQAKKEVEQRRAGGYSRKYASKAKNLADDMVRNTARDLLYYAVTQDAMLIFENLSRGFGRQGKRTFMAERQYTRMEDWLTAKLAYEGLPSKTYLSKTLAQYTSKTCSNCGFTITSADYDRVLEKLKKTATGWMTTINGKELKVEGQITYYNRYKRQNVVKDLSVELDRLSEESVNNDISSWTKGRSGEALSLLKKRFSHRPVQEKFVCLNCGFETHADEQAALNIARSWLFLRSQEYKKYQTNKTTGNTDKRAFVETWQSFYRKKLKEVWKPAV

SEQ ID NO: 43377 - protein, 978 aa, synthetic construct
  REGION 1..978: note = engineered CasX variant
QEIKRINKIRRRLVKDSNTKKAGKTGPMKTLLVRVMTPDLRERLENLRKKPENIPQPISNTSRANLNKLLTDYTEMKKAILHVYWEEFQKDPVGLMSRVAQPASKKIDQNKLKPEMDEKGNLTTAGFACSQCGQPLFVYKLEQVSEKGKAYTNYFGRCNVAEHEKLILLAQLKPEKDSDEAVTYSLGKFGQRALDFYSIHVTKESTHPVKPLAQIAGNRYASYPVGKALSDACMGTIASFLSKYQDIIIEHQKVVKGNQKRLESLRELAGKENLEYPSVTLPPQPHTKEGVDAYNEVIARVRMWVNLNLWQKLKLSRDDAKPLLRLKGFPSFPLVERQANEVDWWDMVCNVKKLINEKKEDGKVFWQNLAIYKRQEALRPYLSSEEDRKKGKKFARYQLGDLLLHLEKKHGEDWGKVYDEAWERIDKKVEGLSKHIKLEEERRSEDAQSKAALTDWLRAKASFVIEGLKEADKDEFCRCELKLQKWYGDLRGKPFAIEAENSILDISGFSKQYNCAFIWQKDGVKKLNLYLIINYFKGGKLRFKKIKPEAFEANRFYTVINKKSGEIVPMEVNFNFDDPNLIILPLAFGKRQGREFIWNDLLSLETGSLKLANGRVIEKTLYNRRTRQDEPALFVALTFERREVLDSSNIKPMNLIGVDRGENIPAVIALTDPEGCPLSRFKDSLGNPTHILRIGESYKEKQRTIQAKKEVEQRRAGGYSRKYASKAKNLADDMVRNTARDLLYYAVTQDAMLIFENLSRGFGRQGKRTFMAERQYTRMEDWLTAKLAYEGLPSKTYLSKTLAQYTSKTCSNCGFTITSADYDRVLEKLKKTATGWMTTINGKELKVEGQITYYNRYKRQNVVKDLSVELDRLSEESVNNDISSWTKGRSGEALSLLKKRFSHRPVQEKFVCLNCGFETHADEQAALNIARSWLFLRSQEYKKYQTNKTTGNTDKRAFVETWQSFYRKKLKEVWKPAV

SEQ ID NO: 43378 - protein, 978 aa, synthetic construct
  REGION 1..978: note = engineered CasX variant
QEIKRINKIRRRLVKDSNTKKAGKTGPMKTLLVRVMTPDLRERLENLRKKPENIPQPISNTSRANLNKLLTDYTEMKKAILHVYWEEFQKDPVGLMSRVAQPASKKIDQNKLKPEMDEKGNLTTAGFACSQCGQPLFVYKLEQVSEKGKAYTNYFGRCNVAEHEKLILLAQLKPEKDSDEAVTYSLGKFGQRALDFYSIHVTKESTHPVKPLAQIAGNRYASHPVGKALSDACMGTIASFLSKYQDIIIEHQKVVKGNQKRLESLRELAGKENLEYPSVTLPPQPHTKEGVDAYNEVIARVRMWVNLNLWQKLKLSRDDAKPLLRLKGFPSFPLVERQANEVDWWDMVCNVKKLINEKKEDGKVFWQNLAIYKRQEALRPYLSSEEDRKKGKKFARYQLGDLLLHLEKKHGEDWGKVYDEAWERIDKKVEGLSKHIKLEEERRSEDAQSKAALTDWLRAKASFVIEGLKEADKDEFCRCELKLQKWYGDLRGKPFAIEAENSILDISGFSKQYNCAFIWQKDGVKKLNLYLIINYFKGGKLRFKKIKPEAFEANRFYTVINKKSGEIVPMEVNFNFDDPNLIILPLAFGKRQGREFIWNDLLSLETGSLKLANGRVIEKTLYNRRTRQDEPALFVALTFERREVLDSSNIKPMNLIGVDRGENIPAVIALTDPEGCPLSRFKDSLGNPTHILRIGESYKEKQRTIQAKKEVEQRRAGGYSRKYASKAKNLADDMVRNTARDLLYYAVTQDAMLIFENLSRGFGRQGKRTFMAERQYTRMEDWLTAKLAYEGLPSKTYLSKTLAQYTSKTCSNCGFTITSADYDRVLEKLKKTATGWMTTINGKELKVEGQITYYNRYKRQNVVKDLSVELDRLSEESVNNDISSWTKGRSGEALSLLKKRFSHRPVQEKFVCLNCGFETHADEQAALNIARSWLFLRSQEYKKYQTNKTTGNTDKRAFVETWQSFYRKKLKEVWKPAV

SEQ ID NO: 43379 - protein, 978 aa, synthetic construct
  REGION 1..978: note = engineered CasX variant
QEIKRINKIRRRLVKDSNTKKAGKTGPMKTLLVRVMTPDLRERLENLRKKPENIPQPISNTSRANLNKLLTDYTEMKKAILHVYWEEFQKDPVGLMSRVAQPASKKIDQNKLKPEMDEKGNLTTAGFACSQCGQPLFVYKLEQVSEKGKAYTNYFGRCNVAEHEKLILLAQLKPEKDSDEAVTYSLGKFGQRALDFYSIHVTKESTHPVKPLAQIAGNRYASTPVGKALSDACMGTIASFLSKYQDIIIEHQKVVKGNQKRLESLRELAGKENLEYPSVTLPPQPHTKEGVDAYNEVIARVRMWVNLNLWQKLKLSRDDAKPLLRLKGFPSFPLVERQANEVDWWDMVCNVKKLINEKKEDGKVFWQNLAIYKRQEALRPYLSSEEDRKKGKKFARYQLGDLLLHLEKKHGEDWGKVYDEAWERIDKKVEGLSKHIKLEEERRSEDAQSKAALTDWLRAKASFVIEGLKEADKDEFCRCELKLQKWYGDLRGKPFAIEAENSILDISGFSKQYNCAFIWQKDGVKKLNLYLIINYFKGGKLRFKKIKPEAFEANRFYTVINKKSGEIVPMEVNFNFDDPNLIILPLAFGKRQGREFIWNDLLSLETGSLKLANGRVIEKTLYNRRTRQDEPALFVALTFERREVLDSSNIKPMNLIGVDRGENIPAVIALTDPEGCPLSRFKDSLGNPTHILRIGESYKEKQRTIQAKKEVEQRRAGGYSRKYASKAKNLADDMVRNTARDLLYYAVTQDAMLIFENLSRGFGRQGKRTFMAERQYTRMEDWLTAKLAYEGLPSKTYLSKTLAQYTSKTCSNCGFTITSADYDRVLEKLKKTATGWMTTINGKELKVEGQITYYNRYKRQNVVKDLSVELDRLSEESVNNDISSWTKGRSGEALSLLKKRFSHRPVQEKFVCLNCGFETHADEQAALNIARSWLFLRSQEYKKYQTNKTTGNTDKRAFVETWQSFYRKKLKEVWKPAV

SEQ ID NO: 43380 - protein, 978 aa, synthetic construct
  REGION 1..978: note = engineered CasX variant
QEIKRINKIRRRLVKDSNTKKAGKTGPMKTLLVRVMTPDLRERLENLRKKPENIPQPISNTSRANLNKLLTDYTEMKKAILHVYWEEFQKDPVGLMSRVAQPASKKIDQNKLKPEMDEKGNLTTAGFACSQCGQPLFVYKLEQVSEKGKAYTNYFGRCNVAEHEKLILLAQLKPEKDSDEAVTYSLGKFGQRALDFYSIHVTKESTHPVKPLAQIAGNRYASAPVGKALSDACMGTIASFLSKYQDIIIEHQKVVKGNQKRLESLRELAGKENLEYPSVTLPPQPHTKEGVDAYNEVIARVRMWVNLNLWQKLKLSRDDAKPLLRLKGFPSFPLVERQANEVDWWDMVCNVKKLINEKKEDGKVFWQNLAIYKRQEALRPYLSSEEDRKKGKKFARYQLGDLLLHLEKKHGEDWGKVYDEAWERIDKKVEGLSKHIKLEEERRSEDAQSKAALTDWLRAKASFVIEGLKEADKDEFCRCELKLQKWYGDLRGKPFAIEAENSILDISGFSKQYNCAFIWQKDGVKKLNLYLIINYFKGGKLRFKKIKPEAFEANRFYTVINKKSGEIVPMEVNFNFDDPNLIILPLAFGKRQGREFIWNDLLSLETGSLKLANGRVIEKTLYNRRTRQDEPALFVALTFERREVLDSSNIKPMNLIGVDRGENIPAVIALTDPEGCPLSRFKDSLGNPTHILRIGESYKEKQRTIQAKKEVEQRRAGGYSRKYASKAKNLADDMVRNTARDLLYYAVTQDAMLIFENLSRGFGRQGKRTFMAERQYTRMEDWLTAKLAYEGLPSKTYLSKTLAQYTSKTCSNCGFTITSADYDRVLEKLKKTATGWMTTINGKELKVEGQITYYNRYKRQNVVKDLSVELDRLSEESVNNDISSWTKGRSGEALSLLKKRFSHRPVQEKFVCLNCGFETHADEQAALNIARSWLFLRSQEYKKYQTNKTTGNTDKRAFVETWQSFYRKKLKEVWKPAV

SEQ ID NO: 43381 - protein, 978 aa, synthetic construct
  REGION 1..978: note = engineered CasX variant
QEIKRINKIRRRLVKDSNTKKAGKTGPMKTLLVRVMTPDLRERLENLRKKPENIPQPISNTSRANLNKLLTDYTEMKKAILHVYWEEFQKDPVGLMSRVAQPASKKIDQNKLKPEMDEKGNLTTAGFACSQCGQPLFVYKLEQVSEKGKAYTNYFGRCNVAEHEKLILLAQLKPEKDSDEAVTYSLGKFGQRALDFYSIHVTKESTHPVKPLAQIAGNRYASVPVGKALSDACMGTIASFLSKYQDIIIEHQKVVKGNQKRLESLRELAGKENLEYPSVTLPPQPHTKEGVDAYNEVIARVRMWVNLNLWQKLKLSRDDAKPLLRLKGFPSFPLVERQANEVDWWDMVCNVKKLINEKKEDGKVFWQNLAIYKRQEALRPYLSSEEDRKKGKKFARYQLGDLLLHLEKKHGEDWGKVYDEAWERIDKKVEGLSKHIKLEEERRSEDAQSKAALTDWLRAKASFVIEGLKEADKDEFCRCELKLQKWYGDLRGKPFAIEAENSILDISGFSKQYNCAFIWQKDGVKKLNLYLIINYFKGGKLRFKKIKPEAFEANRFYTVINKKSGEIVPMEVNFNFDDPNLIILPLAFGKRQGREFIWNDLLSLETGSLKLANGRVIEKTLYNRRTRQDEPALFVALTFERREVLDSSNIKPMNLIGVDRGENIPAVIALTDPEGCPLSRFKDSLGNPTHILRIGESYKEKQRTIQAKKEVEQRRAGGYSRKYASKAKNLADDMVRNTARDLLYYAVTQDAMLIFENLSRGFGRQGKRTFMAERQYTRMEDWLTAKLAYEGLPSKTYLSKTLAQYTSKTCSNCGFTITSADYDRVLEKLKKTATGWMTTINGKELKVEGQITYYNRYKRQNVVKDLSVELDRLSEESVNNDISSWTKGRSGEALSLLKKRFSHRPVQEKFVCLNCGFETHADEQAALNIARSWLFLRSQEYKKYQTNKTTGNTDKRAFVETWQSFYRKKLKEVWKPAV

SEQ ID NO: 43382 - protein, 978 aa, synthetic construct
  REGION 1..978: note = engineered CasX variant
QEIKRINKIRRRLVKDSNTKKAGKTGPMKTLLVRVMTPDLRERLENLRKKPENIPQPISNTSRANLNKLLTDYTEMKKAILHVYWEEFQKDPVGLMSRVAQPASKKIDQNKLKPEMDEKGNLTTAGFACSQCGQPLFVYKLEQVSEKGKAYTNYFGRCNVAEHEKLILLAQLKPEKDSDEAVTYSLGKFGQRALDFYSIHVTKESTHPVKPLAQIAGNRYASYPVGKALSDACMGTIASFLSKYQDIIIEHQKVVKGNQKRLESLRELAGKENLEYPSVTLPPQPHTKEGVDAYNEVIARVRMWVNLNLWQKLKLSRDDAKPLLRLKGFPSFPLVERQANEVDWWDMVCNVKKLINEKKEDGKVFWQNLAGYKRQEALRPYLSSEEDREKGKKFARYQLGDLLLHLEKKHGEDWGKVYDEAWERIDKKVEGLSKHIKLEEERRSEDAQSKAALTDWLRAKASFVIEGLKEADKDEFCRCELKLQKWYGDLRGKPFAIEAENSILDISGFSKQYNCAFIWQKDGVKKLNLYLIINYFKGGKLRFKKIKPEAFEANRFYTVINKKSGEIVPMEVNFNFDDPNLIILPLAFGKRQGREFIWNDLLSLETGSLKLANGRVIEKTLYNRRTRQDEPALFVALTFERREVLDSSNIKPMNLIGVDRGENIPAVIALTDPEGCPLSRFKDSLGNPTHILRIGESYKEKQRTIQAKKEVEQRRAGGYSRKYASKAKNLADDMVRNTARDLLYYAVTQDAMLIFENLSRGFGRQGKRTFMAERQYTRMEDWLTAKLAYEGLPSKTYLSKTLAQYTSKTCSNCGFTITSADYDRVLEKLKKTATGWMTTINGKELKVEGQITYYNRYKRQNVVKDLSVELDRLSEESVNNDISSWTKGRSGEALSLLKKRFSHRPVQEKFVCLNCGFETHADEQAALNIARSWLFLRSQEYKKYQTNKTTGNTDKRAFVETWQSFYRKKLKEVWKPAV

SEQ ID NO: 43383 - protein, 978 aa, synthetic construct
  REGION 1..978: note = engineered CasX variant
QEIKRINKIRRRLVKDSNTKKAGKTGPMKTLLVRVMTPDLRERLENLRKKPENIPQPISNTSRANLNKLLTDYTEMKKAILHVYWEEFQKDPVGLMSRVAQPASKKIDQNKLKPEMDEKGNLTTAGFACSQCGQPLFVYKLEQVSEKGKAYTNYFGRCNVAEHEKLILLAQLKPEKDSDEAVTYSLGKFGQRALDFYSIHVTKESTHPVKPLAQIAGNRYASHPVGKALSDACMGTIASFLSKYQDIIIEHQKVVKGNQKRLESLRELAGKENLEYPSVTLPPQPHTKEGVDAYNEVIARVRMWVNLNLWQKLKLSRDDAKPLLRLKGFPSFPLVERQANEVDWWDMVCNVKKLINEKKEDGKVFWQNLAGYKRQEALRPYLSSEEDREKGKKFARYQLGDLLLHLEKKHGEDWGKVYDEAWERIDKKVEGLSKHIKLEEERRSEDAQSKAALTDWLRAKASFVIEGLKEADKDEFCRCELKLQKWYGDLRGKPFAIEAENSILDISGFSKQYNCAFIWQKDGVKKLNLYLIINYFKGGKLRFKKIKPEAFEANRFYTVINKKSGEIVPMEVNFNFDDPNLIILPLAFGKRQGREFIWNDLLSLETGSLKLANGRVIEKTLYNRRTRQDEPALFVALTFERREVLDSSNIKPMNLIGVDRGENIPAVIALTDPEGCPLSRFKDSLGNPTHILRIGESYKEKQRTIQAKKEVEQRRAGGYSRKYASKAKNLADDMVRNTARDLLYYAVTQDAMLIFENLSRGFGRQGKRTFMAERQYTRMEDWLTAKLAYEGLPSKTYLSKTLAQYTSKTCSNCGFTITSADYDRVLEKLKKTATGWMTTINGKELKVEGQITYYNRYKRQNVVKDLSVELDRLSEESVNNDISSWTKGRSGEALSLLKKRFSHRPVQEKFVCLNCGFETHADEQAALNIARSWLFLRSQEYKKYQTNKTTGNTDKRAFVETWQSFYRKKLKEVWKPAV

SEQ ID NO: 43384 - protein, 978 aa, synthetic construct
  REGION 1..978: note = engineered CasX variant
QEIKRINKIRRRLVKDSNTKKAGKTGPMKTLLVRVMTPDLRERLENLRKKPENIPQPISNTSRANLNKLLTDYTEMKKAILHVYWEEFQKDPVGLMSRVAQPASKKIDQNKLKPEMDEKGNLTTAGFACSQCGQPLFVYKLEQVSEKGKAYTNYFGRCNVAEHEKLILLAQLKPEKDSDEAVTYSLGKFGQRALDFYSIHVTKESTHPVKPLAQIAGNRYASTPVGKALSDACMGTIASFLSKYQDIIIEHQKVVKGNQKRLESLRELAGKENLEYPSVTLPPQPHTKEGVDAYNEVIARVRMWVNLNLWQKLKLSRDDAKPLLRLKGFPSFPLVERQANEVDWWDMVCNVKKLINEKKEDGKVFWQNLAGYKRQEALRPYLSSEEDREKGKKFARYQLGDLLLHLEKKHGEDWGKVYDEAWERIDKKVEGLSKHIKLEEERRSEDAQSKAALTDWLRAKASFVIEGLKEADKDEFCRCELKLQKWYGDLRGKPFAIEAENSILDISGFSKQYNCAFIWQKDGVKKLNLYLIINYFKGGKLRFKKIKPEAFEANRFYTVINKKSGEIVPMEVNFNFDDPNLIILPLAFGKRQGREFIWNDLLSLETGSLKLANGRVIEKTLYNRRTRQDEPALFVALTFERREVLDSSNIKPMNLIGVDRGENIPAVIALTDPEGCPLSRFKDSLGNPTHILRIGESYKEKQRTIQAKKEVEQRRAGGYSRKYASKAKNLADDMVRNTARDLLYYAVTQDAMLIFENLSRGFGRQGKRTFMAERQYTRMEDWLTAKLAYEGLPSKTYLSKTLAQYTSKTCSNCGFTITSADYDRVLEKLKKTATGWMTTINGKELKVEGQITYYNRYKRQNVVKDLSVELDRLSEESVNNDISSWTKGRSGEALSLLKKRFSHRPVQEKFVCLNCGFETHADEQAALNIARSWLFLRSQEYKKYQTNKTTGNTDKRAFVETWQSFYRKKLKEVWKPAV

SEQ ID NO: 43385 - protein, 978 aa, synthetic construct
  REGION 1..978: note = engineered CasX variant
QEIKRINKIRRRLVKDSNTKKAGKTGPMKTLLVRVMTPDLRERLENLRKKPENIPQPISNTSRANLNKLLTDYTEMKKAILHVYWEEFQKDPVGLMSRVAQPASKKIDQNKLKPEMDEKGNLTTAGFACSQCGQPLFVYKLEQVSEKGKAYTNYFGRCNVAEHEKLILLAQLKPEKDSDEAVTYSLGKFGQRALDFYSIHVTKESTHPVKPLAQIAGNRYASAPVGKALSDACMGTIASFLSKYQDIIIEHQKVVKGNQKRLESLRELAGKENLEYPSVTLPPQPHTKEGVDAYNEVIARVRMWVNLNLWQKLKLSRDDAKPLLRLKGFPSFPLVERQANEVDWWDMVCNVKKLINEKKEDGKVFWQNLAGYKRQEALRPYLSSEEDREKGKKFARYQLGDLLLHLEKKHGEDWGKVYDEAWERIDKKVEGLSKHIKLEEERRSEDAQSKAALTDWLRAKASFVIEGLKEADKDEFCRCELKLQKWYGDLRGKPFAIEAENSILDISGFSKQYNCAFIWQKDGVKKLNLYLIINYFKGGKLRFKKIKPEAFEANRFYTVINKKSGEIVPMEVNFNFDDPNLIILPLAFGKRQGREFIWNDLLSLETGSLKLANGRVIEKTLYNRRTRQDEPALFVALTFERREVLDSSNIKPMNLIGVDRGENIPAVIALTDPEGCPLSRFKDSLGNPTHILRIGESYKEKQRTIQAKKEVEQRRAGGYSRKYASKAKNLADDMVRNTARDLLYYAVTQDAMLIFENLSRGFGRQGKRTFMAERQYTRMEDWLTAKLAYEGLPSKTYLSKTLAQYTSKTCSNCGFTITSADYDRVLEKLKKTATGWMTTINGKELKVEGQITYYNRYKRQNVVKDLSVELDRLSEESVNNDISSWTKGRSGEALSLLKKRFSHRPVQEKFVCLNCGFETHADEQAALNIARSWLFLRSQEYKKYQTNKTTGNTDKRAFVETWQSFYRKKLKEVWKPAV

SEQ ID NO: 43386 - protein, 978 aa, synthetic construct
  REGION 1..978: note = engineered CasX variant
QEIKRINKIRRRLVKDSNTKKAGKTGPMKTLLVRVMTPDLRERLENLRKKPENIPQPISNTSRANLNKLLTDYTEMKKAILHVYWEEFQKDPVGLMSRVAQPASKKIDQNKLKPEMDEKGNLTTAGFACSQCGQPLFVYKLEQVSEKGKAYTNYFGRCNVAEHEKLILLAQLKPEKDSDEAVTYSLGKFGQRALDFYSIHVTKESTHPVKPLAQIAGNRYASVPVGKALSDACMGTIASFLSKYQDIIIEHQKVVKGNQKRLESLRELAGKENLEYPSVTLPPQPHTKEGVDAYNEVIARVRMWVNLNLWQKLKLSRDDAKPLLRLKGFPSFPLVERQANEVDWWDMVCNVKKLINEKKEDGKVFWQNLAGYKRQEALRPYLSSEEDREKGKKFARYQLGDLLLHLEKKHGEDWGKVYDEAWERIDKKVEGLSKHIKLEEERRSEDAQSKAALTDWLRAKASFVIEGLKEADKDEFCRCELKLQKWYGDLRGKPFAIEAENSILDISGFSKQYNCAFIWQKDGVKKLNLYLIINYFKGGKLRFKKIKPEAFEANRFYTVINKKSGEIVPMEVNFNFDDPNLIILPLAFGKRQGREFIWNDLLSLETGSLKLANGRVIEKTLYNRRTRQDEPALFVALTFERREVLDSSNIKPMNLIGVDRGENIPAVIALTDPEGCPLSRFKDSLGNPTHILRIGESYKEKQRTIQAKKEVEQRRAGGYSRKYASKAKNLADDMVRNTARDLLYYAVTQDAMLIFENLSRGFGRQGKRTFMAERQYTRMEDWLTAKLAYEGLPSKTYLSKTLAQYTSKTCSNCGFTITSADYDRVLEKLKKTATGWMTTINGKELKVEGQITYYNRYKRQNVVKDLSVELDRLSEESVNNDISSWTKGRSGEALSLLKKRFSHRPVQEKFVCLNCGFETHADEQAALNIARSWLFLRSQEYKKYQTNKTTGNTDKRAFVETWQSFYRKKLKEVWKPAV

SEQ ID NO: 43387 - protein, 978 aa, synthetic construct
  REGION 1..978: note = engineered CasX variant
QEIKRINKIRRRLVKDSNTKKAGKTGPMKTLLVRVMTPDLRERLENLRKKPENIPQPISNTSRANLNKLLTDYTEMKKAILHVYWEEFQKDPVGLMSRVAQPASKKIDQNKLKPEMDEKGNLTTAGFACSQCGQPLFVYKLEQVSEKGKAYTNYFGRCNVAEHEKLILLAQLKPEKDSDEAVTYSLGKFGQRALDFYSIHVTKESTHPVKPLAQIAGNRYASYPVGKALSDACMGTIASFLSKYQDIIIEHQKVVKGNQKRLESLRELAGKENLEYPSVTLPPQPHTKEGVDAYNEVIARVRMWVNLNLWQKLKLSRDDAKPLLRLKGFPSFPLVERQANEVDWWDMVCNVKKLINEKKEDGKVFWQNLAGYKRQEALRPYLSSEEDRKKGKKFARYQLGDLLLHLEKKHGEDWGKVYDEAWERIDKKVEGLSKHIKLEEERRSEDAQSKAALTDWLRAKASFVIEGLKEADKDEFCRCELKLQKWYGDLRGKPFAIEAENSILDISGFSKQYNCAFIWQKDGVKKLNLYLIINYFKGGKLRFKKIKPEAFEANRFYTVINKKSGEIVIMEVNFNFDDPNLIILPLAFGKRQGREFIWNDLLSLETGSLKLANGRVIEKTLYNRRTRQDEPALFVALTFERREVLDSSNIKPMNLIGVDRGENIPAVIALTDPEGCPLSRFKDSLGNPTHILRIGESYKEKQRTIQAKKEVEQRRAGGYSRKYASKAKNLADDMVRNTARDLLYYAVTQDAMLIFENLSRGFGRQGKRTFMAERQYTRMEDWLTAKLAYEGLPSKTYLSKTLAQYTSKTCSNCGFTITSADYDRVLEKLKKTATGWMTTINGKELKVEGQITYYNRYKRQNVVKDLSVELDRLSEESVNNDISSWTKGRSGEALSLLKKRFSHRPVQEKFVCLNCGFETHADEQAALNIARSWLFLRSQEYKKYQTNKTTGNTDKRAFVETWQSFYRKKLKEVWKPAV

SEQ ID NO: 43388 - protein, 978 aa, synthetic construct
  REGION 1..978: note = engineered CasX variant
QEIKRINKIRRRLVKDSNTKKAGKTGPMKTLLVRVMTPDLRERLENLRKKPENIPQPISNTSRANLNKLLTDYTEMKKAILHVYWEEFQKDPVGLMSRVAQPASKKIDQNKLKPEMDEKGNLTTAGFACSQCGQPLFVYKLEQVSEKGKAYTNYFGRCNVAEHEKLILLAQLKPEKDSDEAVTYSLGKFGQRALDFYSIHVTKESTHPVKPLAQIAGNRYASHPVGKALSDACMGTIASFLSKYQDIIIEHQKVVKGNQKRLESLRELAGKENLEYPSVTLPPQPHTKEGVDAYNEVIARVRMWVNLNLWQKLKLSRDDAKPLLRLKGFPSFPLVERQANEVDWWDMVCNVKKLINEKKEDGKVFWQNLAGYKRQEALRPYLSSEEDRKKGKKFARYQLGDLLLHLEKKHGEDWGKVYDEAWERIDKKVEGLSKHIKLEEERRSEDAQSKAALTDWLRAKASFVIEGLKEADKDEFCRCELKLQKWYGDLRGKPFAIEAENSILDISGFSKQYNCAFIWQKDGVKKLNLYLIINYFKGGKLRFKKIKPEAFEANRFYTVINKKSGEIVIMEVNFNFDDPNLIILPLAFGKRQGREFIWNDLLSLETGSLKLANGRVIEKTLYNRRTRQDEPALFVALTFERREVLDSSNIKPMNLIGVDRGENIPAVIALTDPEGCPLSRFKDSLGNPTHILRIGESYKEKQRTIQAKKEVEQRRAGGYSRKYASKAKNLADDMVRNTARDLLYYAVTQDAMLIFENLSRGFGRQGKRTFMAERQYTRMEDWLTAKLAYEGLPSKTYLSKTLAQYTSKTCSNCGFTITSADYDRVLEKLKKTATGWMTTINGKELKVEGQITYYNRYKRQNVVKDLSVELDRLSEESVNNDISSWTKGRSGEALSLLKKRFSHRPVQEKFVCLNCGFETHADEQAALNIARSWLFLRSQEYKKYQTNKTTGNTDKRAFVETWQSFYRKKLKEVWKPAV

SEQ ID NO: 43389 - protein, 978 aa, synthetic construct
  REGION 1..978: note = engineered CasX variant
QEIKRINKIRRRLVKDSNTKKAGKTGPMKTLLVRVMTPDLRERLENLRKKPENIPQPISNTSRANLNKLLTDYTEMKKAILHVYWEEFQKDPVGLMSRVAQPASKKIDQNKLKPEMDEKGNLTTAGFACSQCGQPLFVYKLEQVSEKGKAYTNYFGRCNVAEHEKLILLAQLKPEKDSDEAVTYSLGKFGQRALDFYSIHVTKESTHPVKPLAQIAGNRYASTPVGKALSDACMGTIASFLSKYQDIIIEHQKVVKGNQKRLESLRELAGKENLEYPSVTLPPQPHTKEGVDAYNEVIARVRMWVNLNLWQKLKLSRDDAKPLLRLKGFPSFPLVERQANEVDWWDMVCNVKKLINEKKEDGKVFWQNLAGYKRQEALRPYLSSEEDRKKGKKFARYQLGDLLLHLEKKHGEDWGKVYDEAWERIDKKVEGLSKHIKLEEERRSEDAQSKAALTDWLRAKASFVIEGLKEADKDEFCRCELKLQKWYGDLRGKPFAIEAENSILDISGFSKQYNCAFIWQKDGVKKLNLYLIINYFKGGKLRFKKIKPEAFEANRFYTVINKKSGEIVIMEVNFNFDDPNLIILPLAFGKRQGREFIWNDLLSLETGSLKLANGRVIEKTLYNRRTRQDEPALFVALTFERREVLDSSNIKPMNLIGVDRGENIPAVIALTDPEGCPLSRFKDSLGNPTHILRIGESYKEKQRTIQAKKEVEQRRAGGYSRKYASKAKNLADDMVRNTARDLLYYAVTQDAMLIFENLSRGFGRQGKRTFMAERQYTRMEDWLTAKLAYEGLPSKTYLSKTLAQYTSKTCSNCGFTITSADYDRVLEKLKKTATGWMTTINGKELKVEGQITYYNRYKRQNVVKDLSVELDRLSEESVNNDISSWTKGRSGEALSLLKKRFSHRPVQEKFVCLNCGFETHADEQAALNIARSWLFLRSQEYKKYQTNKTTGNTDKRAFVETWQSFYRKKLKEVWKPAV

SEQ ID NO: 43390 - protein, 978 aa, synthetic construct
  REGION 1..978: note = engineered CasX variant
QEIKRINKIRRRLVKDSNTKKAGKTGPMKTLLVRVMTPDLRERLENLRKKPENIPQPISNTSRANLNKLLTDYTEMKKAILHVYWEEFQKDPVGLMSRVAQPASKKIDQNKLKPEMDEKGNLTTAGFACSQCGQPLFVYKLEQVSEKGKAYTNYFGRCNVAEHEKLILLAQLKPEKDSDEAVTYSLGKFGQRALDFYSIHVTKESTHPVKPLAQIAGNRYASAPVGKALSDACMGTIASFLSKYQDIIIEHQKVVKGNQKRLESLRELAGKENLEYPSVTLPPQPHTKEGVDAYNEVIARVRMWVNLNLWQKLKLSRDDAKPLLRLKGFPSFPLVERQANEVDWWDMVCNVKKLINEKKEDGKVFWQNLAGYKRQEALRPYLSSEEDRKKGKKFARYQLGDLLLHLEKKHGEDWGKVYDEAWERIDKKVEGLSKHIKLEEERRSEDAQSKAALTDWLRAKASFVIEGLKEADKDEFCRCELKLQKWYGDLRGKPFAIEAENSILDISGFSKQYNCAFIWQKDGVKKLNLYLIINYFKGGKLRFKKIKPEAFEANRFYTVINKKSGEIVIMEVNFNFDDPNLIILPLAFGKRQGREFIWNDLLSLETGSLKLANGRVIEKTLYNRRTRQDEPALFVALTFERREVLDSSNIKPMNLIGVDRGENIPAVIALTDPEGCPLSRFKDSLGNPTHILRIGESYKEKQRTIQAKKEVEQRRAGGYSRKYASKAKNLADDMVRNTARDLLYYAVTQDAMLIFENLSRGFGRQGKRTFMAERQYTRMEDWLTAKLAYEGLPSKTYLSKTLAQYTSKTCSNCGFTITSADYDRVLEKLKKTATGWMTTINGKELKVEGQITYYNRYKRQNVVKDLSVELDRLSEESVNNDISSWTKGRSGEALSLLKKRFSHRPVQEKFVCLNCGFETHADEQAALNIARSWLFLRSQEYKKYQTNKTTGNTDKRAFVETWQSFYRKKLKEVWKPAV

SEQ ID NO: 43391 - protein, 978 aa, synthetic construct
  REGION 1..978: note = engineered CasX variant
QEIKRINKIRRRLVKDSNTKKAGKTGPMKTLLVRVMTPDLRERLENLRKKPENIPQPISNTSRANLNKLLTDYTEMKKAILHVYWEEFQKDPVGLMSRVAQPASKKIDQNKLKPEMDEKGNLTTAGFACSQCGQPLFVYKLEQVSEKGKAYTNYFGRCNVAEHEKLILLAQLKPEKDSDEAVTYSLGKFGQRALDFYSIHVTKESTHPVKPLAQIAGNRYASVPVGKALSDACMGTIASFLSKYQDIIIEHQKVVKGNQKRLESLRELAGKENLEYPSVTLPPQPHTKEGVDAYNEVIARVRMWVNLNLWQKLKLSRDDAKPLLRLKGFPSFPLVERQANEVDWWDMVCNVKKLINEKKEDGKVFWQNLAGYKRQEALRPYLSSEEDRKKGKKFARYQLGDLLLHLEKKHGEDWGKVYDEAWERIDKKVEGLSKHIKLEEERRSEDAQSKAALTDWLRAKASFVIEGLKEADKDEFCRCELKLQKWYGDLRGKPFAIEAENSILDISGFSKQYNCAFIWQKDGVKKLNLYLIINYFKGGKLRFKKIKPEAFEANRFYTVINKKSGEIVIMEVNFNFDDPNLIILPLAFGKRQGREFIWNDLLSLETGSLKLANGRVIEKTLYNRRTRQDEPALFVALTFERREVLDSSNIKPMNLIGVDRGENIPAVIALTDPEGCPLSRFKDSLGNPTHILRIGESYKEKQRTIQAKKEVEQRRAGGYSRKYASKAKNLADDMVRNTARDLLYYAVTQDAMLIFENLSRGFGRQGKRTFMAERQYTRMEDWLTAKLAYEGLPSKTYLSKTLAQYTSKTCSNCGFTITSADYDRVLEKLKKTATGWMTTINGKELKVEGQITYYNRYKRQNVVKDLSVELDRLSEESVNNDISSWTKGRSGEALSLLKKRFSHRPVQEKFVCLNCGFETHADEQAALNIARSWLFLRSQEYKKYQTNKTTGNTDKRAFVETWQSFYRKKLKEVWKPAV

SEQ ID NO: 43392 - protein, 978 aa, synthetic construct
  REGION 1..978: note = engineered CasX variant
QEIKRINKIRRRLVKDSNTKKAGKTGPMKTLLVRVMTPDLRERLENLRKKPENIPQPISNTSRANLNKLLTDYTEMKKAILHVYWEEFQKDPVGLMSRVAQPASKKIDQNKLKPEMDEKGNLTTAGFACSQCGQPLFVYKLEQVSEKGKAYTNYFGRCNVAEHEKLILLAQLKPEKDSDEAVTYSLGKFGQRALDFYSIHVTKESTHPVKPLAQIAGNRYASYPVGKALSGACMGTIASFLSKYQDIIIEHQKVVKGNQKRLESLRELAGKENLEYPSVTLPPQPHTSEGVDAYNEVIARVRMWVNLNLWQKLKLSRDDAKPLLRLKGFPSFPLVERQANEVDWWDMVCNVKKLINEKKEDGKVFWQNLAGYKRQEALRPYLSSEEDRKKGKKFARYQLGDLLLHLEKKHGEDWGKVYDEAWERIDKKVEGLSKHIKLEEERRSEDAQSKAALTDWLRAKASFVIEGLKEADKDEFCRCELKLQKWYGDLRGKPFAIEAENSILDISGFSKQYNCAFIWQKDGVKKLNLYLIINYFKGGKLRFKKIKPEAFEANRFYTVINKKSGEIVPMEVNFNFDDPNLIILPLAFGKRQGREFIWNDLLSLETGSLKLANGRVIEKTLYNRRTRQDEPALFVALTFERREVLDSSNIKPMNLIGVDRGENIPAVIALTDPEGCPLSRFKDSLGNPTHILRIGESYKEKQRTIQAKKEVEQRRAGGYSRKYASKAKNLADDMVRNTARDLLYYAVTQDAMLIFENLSRGFGRQGKRTFMAERQYTRMEDWLTAKLAYEGLPSKTYLSKTLAQYTSKTCSNCGFTITSADYDRVLEKLKKTATGWMTTINGKELKVEGQITYYNRYKRQNVVKDLSVELDRLSEESVNNDISSWTKGRSGEALSLLKKRFSHRPVQEKFVCLNCGFETHADEQAALNIARSWLFLRSQEYKKYQTNKTTGNTDKRAFVETWQSFYRKKLKEVWKPAV

SEQ ID NO: 43393 - protein, 978 aa, synthetic construct
  REGION 1..978: note = engineered CasX variant
QEIKRINKIRRRLVKDSNTKKAGKTGPMKTLLVRVMTPDLRERLENLRKKPENIPQPISNTSRANLNKLLTDYTEMKKAILHVYWEEFQKDPVGLMSRVAQPASKKIDQNKLKPEMDEKGNLTTAGFACSQCGQPLFVYKLEQVSEKGKAYTNYFGRCNVAEHEKLILLAQLKPEKDSDEAVTYSLGKFGQRALDFYSIHVTKESTHPVKPLAQIAGNRYASHPVGKALSGACMGTIASFLSKYQDIIIEHQKVVKGNQKRLESLRELAGKENLEYPSVTLPPQPHTSEGVDAYNEVIARVRMWVNLNLWQKLKLSRDDAKPLLRLKGFPSFPLVERQANEVDWWDMVCNVKKLINEKKEDGKVFWQNLAGYKRQEALRPYLSSEEDRKKGKKFARYQLGDLLLHLEKKHGEDWGKVYDEAWERIDKKVEGLSKHIKLEEERRSEDAQSKAALTDWLRAKASFVIEGLKEADKDEFCRCELKLQKWYGDLRGKPFAIEAENSILDISGFSKQYNCAFIWQKDGVKKLNLYLIINYFKGGKLRFKKIKPEAFEANRFYTVINKKSGEIVPMEVNFNFDDPNLIILPLAFGKRQGREFIWNDLLSLETGSLKLANGRVIEKTLYNRRTRQDEPALFVALTFERREVLDSSNIKPMNLIGVDRGENIPAVIALTDPEGCPLSRFKDSLGNPTHILRIGESYKEKQRTIQAKKEVEQRRAGGYSRKYASKAKNLADDMVRNTARDLLYYAVTQDAMLIFENLSRGFGRQGKRTFMAERQYTRMEDWLTAKLAYEGLPSKTYLSKTLAQYTSKTCSNCGFTITSADYDRVLEKLKKTATGWMTTINGKELKVEGQITYYNRYKRQNVVKDLSVELDRLSEESVNNDISSWTKGRSGEALSLLKKRFSHRPVQEKFVCLNCGFETHADEQAALNIARSWLFLRSQEYKKYQTNKTTGNTDKRAFVETWQSFYRKKLKEVWKPAV

SEQ ID NO: 43394 - protein, 978 aa, synthetic construct
  REGION 1..978: note = engineered CasX variant
QEIKRINKIRRRLVKDSNTKKAGKTGPMKTLLVRVMTPDLRERLENLRKKPENIPQPISNTSRANLNKLLTDYTEMKKAILHVYWEEFQKDPVGLMSRVAQPASKKIDQNKLKPEMDEKGNLTTAGFACSQCGQPLFVYKLEQVSEKGKAYTNYFGRCNVAEHEKLILLAQLKPEKDSDEAVTYSLGKFGQRALDFYSIHVTKESTHPVKPLAQIAGNRYASSPVGKALSGACMGTIASFLSKYQDIIIEHQKVVKGNQKRLESLRELAGKENLEYPSVTLPPQPHTSEGVDAYNEVIARVRMWVNLNLWQKLKLSRDDAKPLLRLKGFPSFPLVERQANEVDWWDMVCNVKKLINEKKEDGKVFWQNLAGYKRQEALRPYLSSEEDRKKGKKFARYQLGDLLLHLEKKHGEDWGKVYDEAWERIDKKVEGLSKHIKLEEERRSEDAQSKAALTDWLRAKASFVIEGLKEADKDEFCRCELKLQKWYGDLRGKPFAIEAENSILDISGFSKQYNCAFIWQKDGVKKLNLYLIINYFKGGKLRFKKIKPEAFEANRFYTVINKKSGEIVPMEVNFNFDDPNLIILPLAFGKRQGREFIWNDLLSLETGSLKLANGRVIEKTLYNRRTRQDEPALFVALTFERREVLDSSNIKPMNLIGVDRGENIPAVIALTDPEGCPLSRFKDSLGNPTHILRIGESYKEKQRTIQAKKEVEQRRAGGYSRKYASKAKNLADDMVRNTARDLLYYAVTQDAMLIFENLSRGFGRQGKRTFMAERQYTRMEDWLTAKLAYEGLPSKTYLSKTLAQYTSKTCSNCGFTITSADYDRVLEKLKKTATGWMTTINGKELKVEGQITYYNRYKRQNVVKDLSVELDRLSEESVNNDISSWTKGRSGEALSLLKKRFSHRPVQEKFVCLNCGFETHADEQAALNIARSWLFLRSQEYKKYQTNKTTGNTDKRAFVETWQSFYRKKLKEVWKPAV

SEQ ID NO: 43395 - protein, 978 aa, synthetic construct
  REGION 1..978: note = engineered CasX variant
QEIKRINKIRRRLVKDSNTKKAGKTGPMKTLLVRVMTPDLRERLENLRKKPENIPQPISNTSRANLNKLLTDYTEMKKAILHVYWEEFQKDPVGLMSRVAQPASKKIDQNKLKPEMDEKGNLTTAGFACSQCGQPLFVYKLEQVSEKGKAYTNYFGRCNVAEHEKLILLAQLKPEKDSDEAVTYSLGKFGQRALDFYSIHVTKESTHPVKPLAQIAGNRYASTPVGKALSGACMGTIASFLSKYQDIIIEHQKVVKGNQKRLESLRELAGKENLEYPSVTLPPQPHTSEGVDAYNEVIARVRMWVNLNLWQKLKLSRDDAKPLLRLKGFPSFPLVERQANEVDWWDMVCNVKKLINEKKEDGKVFWQNLAGYKRQEALRPYLSSEEDRKKGKKFARYQLGDLLLHLEKKHGEDWGKVYDEAWERIDKKVEGLSKHIKLEEERRSEDAQSKAALTDWLRAKASFVIEGLKEADKDEFCRCELKLQKWYGDLRGKPFAIEAENSILDISGFSKQYNCAFIWQKDGVKKLNLYLIINYFKGGKLRFKKIKPEAFEANRFYTVINKKSGEIVPMEVNFNFDDPNLIILPLAFGKRQGREFIWNDLLSLETGSLKLANGRVIEKTLYNRRTRQDEPALFVALTFERREVLDSSNIKPMNLIGVDRGENIPAVIALTDPEGCPLSRFKDSLGNPTHILRIGESYKEKQRTIQAKKEVEQRRAGGYSRKYASKAKNLADDMVRNTARDLLYYAVTQDAMLIFENLSRGFGRQGKRTFMAERQYTRMEDWLTAKLAYEGLPSKTYLSKTLAQYTSKTCSNCGFTITSADYDRVLEKLKKTATGWMTTINGKELKVEGQITYYNRYKRQNVVKDLSVELDRLSEESVNNDISSWTKGRSGEALSLLKKRFSHRPVQEKFVCLNCGFETHADEQAALNIARSWLFLRSQEYKKYQTNKTTGNTDKRAFVETWQSFYRKKLKEVWKPAV

SEQ ID NO: 43396 - protein, 978 aa, synthetic construct
  REGION 1..978: note = engineered CasX variant
QEIKRINKIRRRLVKDSNTKKAGKTGPMKTLLVRVMTPDLRERLENLRKKPENIPQPISNTSRANLNKLLTDYTEMKKAILHVYWEEFQKDPVGLMSRVAQPASKKIDQNKLKPEMDEKGNLTTAGFACSQCGQPLFVYKLEQVSEKGKAYTNYFGRCNVAEHEKLILLAQLKPEKDSDEAVTYSLGKFGQRALDFYSIHVTKESTHPVKPLAQIAGNRYASAPVGKALSGACMGTIASFLSKYQDIIIEHQKVVKGNQKRLESLRELAGKENLEYPSVTLPPQPHTSEGVDAYNEVIARVRMWVNLNLWQKLKLSRDDAKPLLRLKGFPSFPLVERQANEVDWWDMVCNVKKLINEKKEDGKVFWQNLAGYKRQEALRPYLSSEEDRKKGKKFARYQLGDLLLHLEKKHGEDWGKVYDEAWERIDKKVEGLSKHIKLEEERRSEDAQSKAALTDWLRAKASFVIEGLKEADKDEFCRCELKLQKWYGDLRGKPFAIEAENSILDISGFSKQYNCAFIWQKDGVKKLNLYLIINYFKGGKLRFKKIKPEAFEANRFYTVINKKSGEIVPMEVNFNFDDPNLIILPLAFGKRQGREFIWNDLLSLETGSLKLANGRVIEKTLYNRRTRQDEPALFVALTFERREVLDSSNIKPMNLIGVDRGENIPAVIALTDPEGCPLSRFKDSLGNPTHILRIGESYKEKQRTIQAKKEVEQRRAGGYSRKYASKAKNLADDMVRNTARDLLYYAVTQDAMLIFENLSRGFGRQGKRTFMAERQYTRMEDWLTAKLAYEGLPSKTYLSKTLAQYTSKTCSNCGFTITSADYDRVLEKLKKTATGWMTTINGKELKVEGQITYYNRYKRQNVVKDLSVELDRLSEESVNNDISSWTKGRSGEALSLLKKRFSHRPVQEKFVCLNCGFETHADEQAALNIARSWLFLRSQEYKKYQTNKTTGNTDKRAFVETWQSFYRKKLKEVWKPAV

SEQ ID NO: 43397 - protein, 978 aa, synthetic construct
  REGION 1..978: note = engineered CasX variant
QEIKRINKIRRRLVKDSNTKKAGKTGPMKTLLVRVMTPDLRERLENLRKKPENIPQPISNTSRANLNKLLTDYTEMKKAILHVYWEEFQKDPVGLMSRVAQPASKKIDQNKLKPEMDEKGNLTTAGFACSQCGQPLFVYKLEQVSEKGKAYTNYFGRCNVAEHEKLILLAQLKPEKDSDEAVTYSLGKFGQRALDFYSIHVTKESTHPVKPLAQIAGNRYASVPVGKALSGACMGTIASFLSKYQDIIIEHQKVVKGNQKRLESLRELAGKENLEYPSVTLPPQPHTSEGVDAYNEVIARVRMWVNLNLWQKLKLSRDDAKPLLRLKGFPSFPLVERQANEVDWWDMVCNVKKLINEKKEDGKVFWQNLAGYKRQEALRPYLSSEEDRKKGKKFARYQLGDLLLHLEKKHGEDWGKVYDEAWERIDKKVEGLSKHIKLEEERRSEDAQSKAALTDWLRAKASFVIEGLKEADKDEFCRCELKLQKWYGDLRGKPFAIEAENSILDISGFSKQYNCAFIWQKDGVKKLNLYLIINYFKGGKLRFKKIKPEAFEANRFYTVINKKSGEIVPMEVNFNFDDPNLIILPLAFGKRQGREFIWNDLLSLETGSLKLANGRVIEKTLYNRRTRQDEPALFVALTFERREVLDSSNIKPMNLIGVDRGENIPAVIALTDPEGCPLSRFKDSLGNPTHILRIGESYKEKQRTIQAKKEVEQRRAGGYSRKYASKAKNLADDMVRNTARDLLYYAVTQDAMLIFENLSRGFGRQGKRTFMAERQYTRMEDWLTAKLAYEGLPSKTYLSKTLAQYTSKTCSNCGFTITSADYDRVLEKLKKTATGWMTTINGKELKVEGQITYYNRYKRQNVVKDLSVELDRLSEESVNNDISSWTKGRSGEALSLLKKRFSHRPVQEKFVCLNCGFETHADEQAALNIARSWLFLRSQEYKKYQTNKTTGNTDKRAFVETWQSFYRKKLKEVWKPAV

SEQ ID NO: 43398 - protein, 978 aa, synthetic construct
  REGION 1..978: note = engineered CasX variant
QEIKRINKIRRRLVKDSNTKKAGKTGPMKTLLVRVMTPDLRERLENLRKKPENIPQPISNTSRANLNKLLTDYTEMKKAILHVYWEEFQKDPVGLMSRVAQPASKKIDQNKLKPEMDEKGNLTTAGFACSQCGQPLFVYKLEQVSEKGKAYTNYFGRCNVAEHEKLIKLAQLKPEKDSDEAVTYSLGKFGQRALDFYSIHVTKESTHPVKPLAQIAGNRYASGPVGKALSGACMGTIASFLSKYQDIIIEHQKVVKGNQKRLESLRELAGKENLEYPSVTLPPQPHTSEGVDAYNEVIARVRMWVNLNLWQKLKLSRDDAKPLLRLKGFPSFPLVERQANEVDWWDMVCNVKKLINEKKEDGKVFWQNLAGYKRQEALRPYLSSEEDRKKGKKFARYQLGDLLLHLEKKHGEDWGKVYDEAWERIDKKVEGLSKHIKLEEERRSEDAQSKAALTDWLRAKASFVIEGLKEADKDEFCRCELKLQKWYGDLRGKPFAIEAENSILDISGFSKQYNCAFIWQKDGVKKLNLYLIINYFKGGKLRFKKIKPEAFEANRFYTVINKKSGEIVPMEVNFNFDDPNLIILPLAFGKRQGREFIWNDLLSLETGSLKLANGRVIEKTLYNRRTRQDEPALFVALTFERREVLDSSNIKPMNLIGVDRGENIPAVIALTDPEGCPLSRFKDSLGNPTHILRIGESYKEKQRTIQAKKEVEQRRAGGYSRKYASKAKNLADDMVRNTARDLLYYAVTQDAMLIFENLSRGFGRQGKRTFMAERQYTRMEDWLTAKLAYEGLPSKTYLSKTLAQYTSKTCSNCGFTITSADYDRVLEKLKKTATGWMTTINGKELKVEGQITYYNRYKRQNVVKDLSVELDRLSEESVNNDISSWTKGRSGEALSLLKKRFSHRPVQEKFVCLNCGFETHADEQAALNIARSWLFLRSQEYKKYQTNKTTGNTDKRAFVETWQSFYRKKLKEVWKPAV

SEQ ID NO: 43399 - protein, 977 aa, synthetic construct
  REGION 1..977: note = engineered CasX variant
QEIKRINKIRRRLVKDSNTKKAGKTGPMKTLLVRVMTPDLRERLENLRKKPENIPQPISNTSRANLNKLLTDYTEMKKAILHVYWEEFQKDPVGLMSRVAQPASKKIDQNKLKPEMDEKGNLTTAGFACSQCGQPLFVYKLEQVSEKGKAYTNYFGRCNVAEHEKLILLAQLKPEKDSDEAVTYSLGKFGQRALDFYSIHVTKESTHPVKPLAQIAGNRYASPVGKALSGACMGTIASFLSKYQDIIIEHQKVVKGNQKRLESLRELAGKENLEYPSVTLPPQPHTSEGVDAYNEVIARVRMWVNLNLWQKLKLSRDDAKPLLRLKGFPSFPLVERQANEVDWWDMVCNVKKLINEKKEDGKVFWQNLAGYKRQEALRPYLSSEEDRKKGKKFARYQLGDLLLHLEKKHGEDWGKVYDEAWERIDKKVEGLSKHIKLEEERRSEDAQSKAALTDWLRAKASFVIEGLKEADKDEFCRCELKLQKWYGDLRGKPFAIEAENSILDISGFSKQYNCAFIWQKDGVKKLNLYLIINYFKGGKLRFKKIKPEAFEANRFYTVINKKSGEIVPMEVNFNFDDPNLIILPLAFGKRQGREFIWNDLLSLETGSLKLANGRVIEKTLYNRRTRQDEPALFVALTFERREVLDSSNIKPMNLIGVDRGENIPAVIALTDPEGCPLSRFKDSLGNPTHILRIGESYKEKQRTIQAKKEVEQRRAGGYSRKYASKAKNLADDMVRNTARDLLYYAVTQDAMLIFENLSRGFGRQGKRTFMAERQYTRMEDWLTAKLAYEGLPSKTYLSKTLAQYTSKTCSNCGFTITSADYDRVLEKLKKTATGWMTTINGKELKVEGQITYYNRYKRQNVVKDLSVELDRLSEESVNNDISSWTKGRSGEALSLLKKRFSHRPVQEKFVCLNCGFETHADEQAALNIARSWLFLRSQEYKKYQTNKTTGNTDKRAFVETWQSFYRKKLKEVWKPAV

SEQ ID NO: 43400 - protein, 978 aa, synthetic construct
  REGION 1..978: note = engineered CasX variant
QEIKRINKIRRRLVKDSNTKKAGKTGPMKTLLVRVMTPDLRERLENLRKKPENIPQPISNTSRANLNKLLTDYTEMKKAILHVYWEEFQKDPVGLMSRVAQPASKKIDQNKLKPEMDEKGNLTTAGFACSQCGQPLFVYKLEQVSEKGKAYTNYFGRCNVAEHEKLILLAQLKPEKDSDEAVTYSLGKFGQRALDFYSIHVTKESTHPVKPLAQIAGNRYASYPVGKALSDACMGTIASFLSKYQDIIIEHQKVVKGNQKRLESLRELAGKENLEYPSVTLPPQPHTSEGVDAYNEVIARVRMWVNLNLWQKLKLSRDDAKPLLRLKNFPSFPLVERQANEVDWWDMVCNVKKLINEKKEDGKVFWQNLAGYKRQEALRPYLSSEEDRKKGKKFARYQLGDLLLHLEKKHGEDWGKVYDEAWERIDKKVEGLSKHIKLEEERRSEDAQSKAALTDWLRAKASFVIEGLKEADKDEFCRCELKLQKWYGDLRGKPFAIEAENSILDISGFSKQYNCAFIWQKDGVKKLNLYLIINYFKGGKLRFKKIKPEAFEANRFYTVINKKSGEIVPMEVNFNFDDPNLIILPLAFGKRQGREFIWNDLLSLETGSLKLANGRVIEKTLYNRRTRQDEPALFVALTFERREVLDSSNIKPMNLIGVDRGENIPAVIALTDPEGCPLSRFKDSLGNPTHILRIGESYKEKQRTIQAKKEVEQRRAGGYSRKYASKAKNLADDMVRNTARDLLYYAVTQDAMLIFENLSRGFGRQGKRTFMAERQYTRMEDWLTAKLAYEGLPSKTYLSKTLAQYTSKTCSNCGFTITSADYDRVLEKLKKTATGWMTTINGKELKVEGQITYYNRYKRQNVVKDLSVELDRLSEESVNNDISSWTKGRSGEALSLLKKRFSHRPVQEKFVCLNCGFETHADEQAALNIARSWLFLRSQEYKKYQTNKTTGNTDKRAFVETWQSFYRKKLKEVWKPAV

SEQ ID NO: 43401 - protein, 978 aa, synthetic construct
  REGION 1..978: note = engineered CasX variant
QEIKRINKIRRRLVKDSNTKKAGKTGPMKTLLVRVMTPDLRERLENLRKKPENIPQPISNTSRANLNKLLTDYTEMKKAILHVYWEEFQKDPVGLMSRVAQPASKKIDQNKLKPEMDEKGNLTTAGFACSQCGQPLFVYKLEQVSEKGKAYTNYFGRCNVAEHEKLILLAQLKPEKDSDEAVTYSLGKFGQRALDFYSIHVTKESTHPVKPLAQIAGNRYASHPVGKALSDACMGTIASFLSKYQDIIIEHQKVVKGNQKRLESLRELAGKENLEYPSVTLPPQPHTSEGVDAYNEVIARVRMWVNLNLWQKLKLSRDDAKPLLRLKNFPSFPLVERQANEVDWWDMVCNVKKLINEKKEDGKVFWQNLAGYKRQEALRPYLSSEEDRKKGKKFARYQLGDLLLHLEKKHGEDWGKVYDEAWERIDKKVEGLSKHIKLEEERRSEDAQSKAALTDWLRAKASFVIEGLKEADKDEFCRCELKLQKWYGDLRGKPFAIEAENSILDISGFSKQYNCAFIWQKDGVKKLNLYLIINYFKGGKLRFKKIKPEAFEANRFYTVINKKSGEIVPMEVNFNFDDPNLIILPLAFGKRQGREFIWNDLLSLETGSLKLANGRVIEKTLYNRRTRQDEPALFVALTFERREVLDSSNIKPMNLIGVDRGENIPAVIALTDPEGCPLSRFKDSLGNPTHILRIGESYKEKQRTIQAKKEVEQRRAGGYSRKYASKAKNLADDMVRNTARDLLYYAVTQDAMLIFENLSRGFGRQGKRTFMAERQYTRMEDWLTAKLAYEGLPSKTYLSKTLAQYTSKTCSNCGFTITSADYDRVLEKLKKTATGWMTTINGKELKVEGQITYYNRYKRQNVVKDLSVELDRLSEESVNNDISSWTKGRSGEALSLLKKRFSHRPVQEKFVCLNCGFETHADEQAALNIARSWLFLRSQEYKKYQTNKTTGNTDKRAFVETWQSFYRKKLKEVWKPAV

SEQ ID NO: 43402 - protein, 978 aa, synthetic construct
  REGION 1..978: note = engineered CasX variant
QEIKRINKIRRRLVKDSNTKKAGKTGPMKTLLVRVMTPDLRERLENLRKKPENIPQPISNTSRANLNKLLTDYTEMKKAILHVYWEEFQKDPVGLMSRVAQPASKKIDQNKLKPEMDEKGNLTTAGFACSQCGQPLFVYKLEQVSEKGKAYTNYFGRCNVAEHEKLILLAQLKPEKDSDEAVTYSLGKFGQRALDFYSIHVTKESTHPVKPLAQIAGNRYASSPVGKALSDACMGTIASFLSKYQDIIIEHQKVVKGNQKRLESLRELAGKENLEYPSVTLPPQPHTSEGVDAYNEVIARVRMWVNLNLWQKLKLSRDDAKPLLRLKNFPSFPLVERQANEVDWWDMVCNVKKLINEKKEDGKVFWQNLAGYKRQEALRPYLSSEEDRKKGKKFARYQLGDLLLHLEKKHGEDWGKVYDEAWERIDKKVEGLSKHIKLEEERRSEDAQSKAALTDWLRAKASFVIEGLKEADKDEFCRCELKLQKWYGDLRGKPFAIEAENSILDISGFSKQYNCAFIWQKDGVKKLNLYLIINYFKGGKLRFKKIKPEAFEANRFYTVINKKSGEIVPMEVNFNFDDPNLIILPLAFGKRQGREFIWNDLLSLETGSLKLANGRVIEKTLYNRRTRQDEPALFVALTFERREVLDSSNIKPMNLIGVDRGENIPAVIALTDPEGCPLSRFKDSLGNPTHILRIGESYKEKQRTIQAKKEVEQRRAGGYSRKYASKAKNLADDMVRNTARDLLYYAVTQDAMLIFENLSRGFGRQGKRTFMAERQYTRMEDWLTAKLAYEGLPSKTYLSKTLAQYTSKTCSNCGFTITSADYDRVLEKLKKTATGWMTTINGKELKVEGQITYYNRYKRQNVVKDLSVELDRLSEESVNNDISSWTKGRSGEALSLLKKRFSHRPVQEKFVCLNCGFETHADEQAALNIARSWLFLRSQEYKKYQTNKTTGNTDKRAFVETWQSFYRKKLKEVWKPAV

SEQ ID NO: 43403 - protein, 978 aa, synthetic construct
  REGION 1..978: note = engineered CasX variant
QEIKRINKIRRRLVKDSNTKKAGKTGPMKTLLVRVMTPDLRERLENLRKKPENIPQPISNTSRANLNKLLTDYTEMKKAILHVYWEEFQKDPVGLMSRVAQPASKKIDQNKLKPEMDEKGNLTTAGFACSQCGQPLFVYKLEQVSEKGKAYTNYFGRCNVAEHEKLILLAQLKPEKDSDEAVTYSLGKFGQRALDFYSIHVTKESTHPVKPLAQIAGNRYASTPVGKALSDACMGTIASFLSKYQDIIIEHQKVVKGNQKRLESLRELAGKENLEYPSVTLPPQPHTSEGVDAYNEVIARVRMWVNLNLWQKLKLSRDDAKPLLRLKNFPSFPLVERQANEVDWWDMVCNVKKLINEKKEDGKVFWQNLAGYKRQEALRPYLSSEEDRKKGKKFARYQLGDLLLHLEKKHGEDWGKVYDEAWERIDKKVEGLSKHIKLEEERRSEDAQSKAALTDWLRAKASFVIEGLKEADKDEFCRCELKLQKWYGDLRGKPFAIEAENSILDISGFSKQYNCAFIWQKDGVKKLNLYLIINYFKGGKLRFKKIKPEAFEANRFYTVINKKSGEIVPMEVNFNFDDPNLIILPLAFGKRQGREFIWNDLLSLETGSLKLANGRVIEKTLYNRRTRQDEPALFVALTFERREVLDSSNIKPMNLIGVDRGENIPAVIALTDPEGCPLSRFKDSLGNPTHILRIGESYKEKQRTIQAKKEVEQRRAGGYSRKYASKAKNLADDMVRNTARDLLYYAVTQDAMLIFENLSRGFGRQGKRTFMAERQYTRMEDWLTAKLAYEGLPSKTYLSKTLAQYTSKTCSNCGFTITSADYDRVLEKLKKTATGWMTTINGKELKVEGQITYYNRYKRQNVVKDLSVELDRLSEESVNNDISSWTKGRSGEALSLLKKRFSHRPVQEKFVCLNCGFETHADEQAALNIARSWLFLRSQEYKKYQTNKTTGNTDKRAFVETWQSFYRKKLKEVWKPAV

SEQ ID NO: 43404 - protein, 978 aa, synthetic construct
  REGION 1..978: note = engineered CasX variant
QEIKRINKIRRRLVKDSNTKKAGKTGPMKTLLVRVMTPDLRERLENLRKKPENIPQPISNTSRANLNKLLTDYTEMKKAILHVYWEEFQKDPVGLMSRVAQPASKKIDQNKLKPEMDEKGNLTTAGFACSQCGQPLFVYKLEQVSEKGKAYTNYFGRCNVAEHEKLILLAQLKPEKDSDEAVTYSLGKFGQRALDFYSIHVTKESTHPVKPLAQIAGNRYASAPVGKALSDACMGTIASFLSKYQDIIIEHQKVVKGNQKRLESLRELAGKENLEYPSVTLPPQPHTSEGVDAYNEVIARVRMWVNLNLWQKLKLSRDDAKPLLRLKNFPSFPLVERQANEVDWWDMVCNVKKLINEKKEDGKVFWQNLAGYKRQEALRPYLSSEEDRKKGKKFARYQLGDLLLHLEKKHGEDWGKVYDEAWERIDKKVEGLSKHIKLEEERRSEDAQSKAALTDWLRAKASFVIEGLKEADKDEFCRCELKLQKWYGDLRGKPFAIEAENSILDISGFSKQYNCAFIWQKDGVKKLNLYLIINYFKGGKLRFKKIKPEAFEANRFYTVINKKSGEIVPMEVNFNFDDPNLIILPLAFGKRQGREFIWNDLLSLETGSLKLANGRVIEKTLYNRRTRQDEPALFVALTFERREVLDSSNIKPMNLIGVDRGENIPAVIALTDPEGCPLSRFKDSLGNPTHILRIGESYKEKQRTIQAKKEVEQRRAGGYSRKYASKAKNLADDMVRNTARDLLYYAVTQDAMLIFENLSRGFGRQGKRTFMAERQYTRMEDWLTAKLAYEGLPSKTYLSKTLAQYTSKTCSNCGFTITSADYDRVLEKLKKTATGWMTTINGKELKVEGQITYYNRYKRQNVVKDLSVELDRLSEESVNNDISSWTKGRSGEALSLLKKRFSHRPVQEKFVCLNCGFETHADEQAALNIARSWLFLRSQEYKKYQTNKTTGNTDKRAFVETWQSFYRKKLKEVWKPAV

SEQ ID NO: 43405 - protein, 978 aa, synthetic construct
  REGION 1..978: note = engineered CasX variant
QEIKRINKIRRRLVKDSNTKKAGKTGPMKTLLVRVMTPDLRERLENLRKKPENIPQPISNTSRANLNKLLTDYTEMKKAILHVYWEEFQKDPVGLMSRVAQPASKKIDQNKLKPEMDEKGNLTTAGFACSQCGQPLFVYKLEQVSEKGKAYTNYFGRCNVAEHEKLILLAQLKPEKDSDEAVTYSLGKFGQRALDFYSIHVTKESTHPVKPLAQIAGNRYASVPVGKALSDACMGTIASFLSKYQDIIIEHQKVVKGNQKRLESLRELAGKENLEYPSVTLPPQPHTSEGVDAYNEVIARVRMWVNLNLWQKLKLSRDDAKPLLRLKNFPSFPLVERQANEVDWWDMVCNVKKLINEKKEDGKVFWQNLAGYKRQEALRPYLSSEEDRKKGKKFARYQLGDLLLHLEKKHGEDWGKVYDEAWERIDKKVEGLSKHIKLEEERRSEDAQSKAALTDWLRAKASFVIEGLKEADKDEFCRCELKLQKWYGDLRGKPFAIEAENSILDISGFSKQYNCAFIWQKDGVKKLNLYLIINYFKGGKLRFKKIKPEAFEANRFYTVINKKSGEIVPMEVNFNFDDPNLIILPLAFGKRQGREFIWNDLLSLETGSLKLANGRVIEKTLYNRRTRQDEPALFVALTFERREVLDSSNIKPMNLIGVDRGENIPAVIALTDPEGCPLSRFKDSLGNPTHILRIGESYKEKQRTIQAKKEVEQRRAGGYSRKYASKAKNLADDMVRNTARDLLYYAVTQDAMLIFENLSRGFGRQGKRTFMAERQYTRMEDWLTAKLAYEGLPSKTYLSKTLAQYTSKTCSNCGFTITSADYDRVLEKLKKTATGWMTTINGKELKVEGQITYYNRYKRQNVVKDLSVELDRLSEESVNNDISSWTKGRSGEALSLLKKRFSHRPVQEKFVCLNCGFETHADEQAALNIARSWLFLRSQEYKKYQTNKTTGNTDKRAFVETWQSFYRKKLKEVWKPAV

SEQ ID NO: 43406 - protein, 978 aa, synthetic construct
  REGION 1..978: note = engineered CasX variant
QEIKRINKIRRRLVKDSNTKKAGKTGPMKTLLVRVMTPDLRERLENLRKKPENIPQPISNTSRANLNKLLTDYTEMKKAILHVYWEEFQKDPVGLMSRVAQPASKKIDQNKLKPEMDEKGNLTTAGFACSQCGQPLFVYKLEQVSEKGKAYTNYFGRCNVAEHEKLIKLAQLKPEKDSDEAVTYSLGKFGQRALDFYSIHVTKESTHPVKPLAQIAGNRYASGPVGKALSDACMGTIASFLSKYQDIIIEHQKVVKGNQKRLESLRELAGKENLEYPSVTLPPQPHTSEGVDAYNEVIARVRMWVNLNLWQKLKLSRDDAKPLLRLKNFPSFPLVERQANEVDWWDMVCNVKKLINEKKEDGKVFWQNLAGYKRQEALRPYLSSEEDRKKGKKFARYQLGDLLLHLEKKHGEDWGKVYDEAWERIDKKVEGLSKHIKLEEERRSEDAQSKAALTDWLRAKASFVIEGLKEADKDEFCRCELKLQKWYGDLRGKPFAIEAENSILDISGFSKQYNCAFIWQKDGVKKLNLYLIINYFKGGKLRFKKIKPEAFEANRFYTVINKKSGEIVPMEVNFNFDDPNLIILPLAFGKRQGREFIWNDLLSLETGSLKLANGRVIEKTLYNRRTRQDEPALFVALTFERREVLDSSNIKPMNLIGVDRGENIPAVIALTDPEGCPLSRFKDSLGNPTHILRIGESYKEKQRTIQAKKEVEQRRAGGYSRKYASKAKNLADDMVRNTARDLLYYAVTQDAMLIFENLSRGFGRQGKRTFMAERQYTRMEDWLTAKLAYEGLPSKTYLSKTLAQYTSKTCSNCGFTITSADYDRVLEKLKKTATGWMTTINGKELKVEGQITYYNRYKRQNVVKDLSVELDRLSEESVNNDISSWTKGRSGEALSLLKKRFSHRPVQEKFVCLNCGFETHADEQAALNIARSWLFLRSQEYKKYQTNKTTGNTDKRAFVETWQSFYRKKLKEVWKPAV

SEQ ID NO: 43407 - protein, 977 aa, synthetic construct
  REGION 1..977: note = engineered CasX variant
QEIKRINKIRRRLVKDSNTKKAGKTGPMKTLLVRVMTPDLRERLENLRKKPENIPQPISNTSRANLNKLLTDYTEMKKAILHVYWEEFQKDPVGLMSRVAQPASKKIDQNKLKPEMDEKGNLTTAGFACSQCGQPLFVYKLEQVSEKGKAYTNYFGRCNVAEHEKLILLAQLKPEKDSDEAVTYSLGKFGQRALDFYSIHVTKESTHPVKPLAQIAGNRYASPVGKALSDACMGTIASFLSKYQDIIIEHQKVVKGNQKRLESLRELAGKENLEYPSVTLPPQPHTSEGVDAYNEVIARVRMWVNLNLWQKLKLSRDDAKPLLRLKNFPSFPLVERQANEVDWWDMVCNVKKLINEKKEDGKVFWQNLAGYKRQEALRPYLSSEEDRKKGKKFARYQLGDLLLHLEKKHGEDWGKVYDEAWERIDKKVEGLSKHIKLEEERRSEDAQSKAALTDWLRAKASFVIEGLKEADKDEFCRCELKLQKWYGDLRGKPFAIEAENSILDISGFSKQYNCAFIWQKDGVKKLNLYLIINYFKGGKLRFKKIKPEAFEANRFYTVINKKSGEIVPMEVNFNFDDPNLIILPLAFGKRQGREFIWNDLLSLETGSLKLANGRVIEKTLYNRRTRQDEPALFVALTFERREVLDSSNIKPMNLIGVDRGENIPAVIALTDPEGCPLSRFKDSLGNPTHILRIGESYKEKQRTIQAKKEVEQRRAGGYSRKYASKAKNLADDMVRNTARDLLYYAVTQDAMLIFENLSRGFGRQGKRTFMAERQYTRMEDWLTAKLAYEGLPSKTYLSKTLAQYTSKTCSNCGFTITSADYDRVLEKLKKTATGWMTTINGKELKVEGQITYYNRYKRQNVVKDLSVELDRLSEESVNNDISSWTKGRSGEALSLLKKRFSHRPVQEKFVCLNCGFETHADEQAALNIARSWLFLRSQEYKKYQTNKTTGNTDKRAFVETWQSFYRKKLKEVWKPAV

SEQ ID NO: 43408 - protein, 978 aa, synthetic construct
  REGION 1..978: note = engineered CasX variant
QEIKRINKIRRRLVKDSNTKKAGKTGPMKTLLVRVMTPDLRERLENLRKKPENIPQPISNTSRANLNKLLTDYTEMKKAILHVYWEEFQKDPVGLMSRVAQPASKKIDQNKLKPEMDEKGNLTTAGFACSQCGQPLFVYKLEQVSEKGKAYTNYFGRCNVAEHEKLILLAQLKPEKDSDEAVTYSLGKFGQRALDFYSIHVTKESTHPVKPLAQIAGNRYASYPVGKALSDACMGTIASFLSKYQDIIIEHQKVVKGNQKRLESLRELAGKENLEYPSVTLPPQPHTSEGVDAYNEVIARVRMWVNLNLWQKLKLSRDDAKPLLRLKGFPSFPLVERQANEVDWWDMVCNVKKLINEKKEDGKVFWQNLAGYKRQEALRPYLSSEEDRKKGKKFARYQLGDLLNHLEKKHGEDWGKVYDEAWERIDKKVEGLSKHIKLEEERRSEDAQSKAALTDWLRAKASFVIEGLKEADKDEFCRCELKLQKWYGDLRGKPFAIEAENSILDISGFSKQYNCAFIWQKDGVKKLNLYLIINYFKGGKLRFKKIKPEAFEANRFYTVINKKSGEIVPMEVNFNFDDPNLIILPLAFGKRQGREFIWNDLLSLETGSLKLANGRVIEKTLYNRRTRQDEPALFVALTFERREVLDSSNIKPMNLIGVDRGENIPAVIALTDPEGCPLSRFKDSLGNPTHILRIGESYKEKQRTIQAKKEVEQRRAGGYSRKYASKAKNLADDMVRNTARDLLYYAVTQDAMLIFENLSRGFGRQGKRTFMAERQYTRMEDWLTAKLAYEGLPSKTYLSKTLAQYTSKTCSNCGFTITSADYDRVLEKLKKTATGWMTTINGKELKVEGQITYYNRYKRQNVVKDLSVELDRLSEESVNNDISSWTKGRSGEALSLLKKRFSHRPVQEKFVCLNCGFETHADEQAALNIARSWLFLRSQEYKKYQTNKTTGNTDKRAFVETWQSFYRKKLKEVWKPAV

SEQ ID NO: 43409 - protein, 978 aa, synthetic construct
  REGION 1..978: note = engineered CasX variant
QEIKRINKIRRRLVKDSNTKKAGKTGPMKTLLVRVMTPDLRERLENLRKKPENIPQPISNTSRANLNKLLTDYTEMKKAILHVYWEEFQKDPVGLMSRVAQPASKKIDQNKLKPEMDEKGNLTTAGFACSQCGQPLFVYKLEQVSEKGKAYTNYFGRCNVAEHEKLILLAQLKPEKDSDEAVTYSLGKFGQRALDFYSIHVTKESTHPVKPLAQIAGNRYASHPVGKALSDACMGTIASFLSKYQDIIIEHQKVVKGNQKRLESLRELAGKENLEYPSVTLPPQPHTSEGVDAYNEVIARVRMWVNLNLWQKLKLSRDDAKPLLRLKGFPSFPLVERQANEVDWWDMVCNVKKLINEKKEDGKVFWQNLAGYKRQEALRPYLSSEEDRKKGKKFARYQLGDLLNHLEKKHGEDWGKVYDEAWERIDKKVEGLSKHIKLEEERRSEDAQSKAALTDWLRAKASFVIEGLKEADKDEFCRCELKLQKWYGDLRGKPFAIEAENSILDISGFSKQYNCAFIWQKDGVKKLNLYLIINYFKGGKLRFKKIKPEAFEANRFYTVINKKSGEIVPMEVNFNFDDPNLIILPLAFGKRQGREFIWNDLLSLETGSLKLANGRVIEKTLYNRRTRQDEPALFVALTFERREVLDSSNIKPMNLIGVDRGENIPAVIALTDPEGCPLSRFKDSLGNPTHILRIGESYKEKQRTIQAKKEVEQRRAGGYSRKYASKAKNLADDMVRNTARDLLYYAVTQDAMLIFENLSRGFGRQGKRTFMAERQYTRMEDWLTAKLAYEGLPSKTYLSKTLAQYTSKTCSNCGFTITSADYDRVLEKLKKTATGWMTTINGKELKVEGQITYYNRYKRQNVVKDLSVELDRLSEESVNNDISSWTKGRSGEALSLLKKRFSHRPVQEKFVCLNCGFETHADEQAALNIARSWLFLRSQEYKKYQTNKTTGNTDKRAFVETWQSFYRKKLKEVWKPAV

SEQ ID NO: 43410 - protein, 978 aa, synthetic construct
  REGION 1..978: note = engineered CasX variant
QEIKRINKIRRRLVKDSNTKKAGKTGPMKTLLVRVMTPDLRERLENLRKKPENIPQPISNTSRANLNKLLTDYTEMKKAILHVYWEEFQKDPVGLMSRVAQPASKKIDQNKLKPEMDEKGNLTTAGFACSQCGQPLFVYKLEQVSEKGKAYTNYFGRCNVAEHEKLILLAQLKPEKDSDEAVTYSLGKFGQRALDFYSIHVTKESTHPVKPLAQIAGNRYASSPVGKALSDACMGTIASFLSKYQDIIIEHQKVVKGNQKRLESLRELAGKENLEYPSVTLPPQPHTSEGVDAYNEVIARVRMWVNLNLWQKLKLSRDDAKPLLRLKGFPSFPLVERQANEVDWWDMVCNVKKLINEKKEDGKVFWQNLAGYKRQEALRPYLSSEEDRKKGKKFARYQLGDLLNHLEKKHGEDWGKVYDEAWERIDKKVEGLSKHIKLEEERRSEDAQSKAALTDWLRAKASFVIEGLKEADKDEFCRCELKLQKWYGDLRGKPFAIEAENSILDISGFSKQYNCAFIWQKDGVKKLNLYLIINYFKGGKLRFKKIKPEAFEANRFYTVINKKSGEIVPMEVNFNFDDPNLIILPLAFGKRQGREFIWNDLLSLETGSLKLANGRVIEKTLYNRRTRQDEPALFVALTFERREVLDSSNIKPMNLIGVDRGENIPAVIALTDPEGCPLSRFKDSLGNPTHILRIGESYKEKQRTIQAKKEVEQRRAGGYSRKYASKAKNLADDMVRNTARDLLYYAVTQDAMLIFENLSRGFGRQGKRTFMAERQYTRMEDWLTAKLAYEGLPSKTYLSKTLAQYTSKTCSNCGFTITSADYDRVLEKLKKTATGWMTTINGKELKVEGQITYYNRYKRQNVVKDLSVELDRLSEESVNNDISSWTKGRSGEALSLLKKRFSHRPVQEKFVCLNCGFETHADEQAALNIARSWLFLRSQEYKKYQTNKTTGNTDKRAFVETWQSFYRKKLKEVWKPAV

SEQ ID NO: 43411 - protein, 978 aa, synthetic construct
  REGION 1..978: note = engineered CasX variant
QEIKRINKIRRRLVKDSNTKKAGKTGPMKTLLVRVMTPDLRERLENLRKKPENIPQPISNTSRANLNKLLTDYTEMKKAILHVYWEEFQKDPVGLMSRVAQPASKKIDQNKLKPEMDEKGNLTTAGFACSQCGQPLFVYKLEQVSEKGKAYTNYFGRCNVAEHEKLILLAQLKPEKDSDEAVTYSLGKFGQRALDFYSIHVTKESTHPVKPLAQIAGNRYASTPVGKALSDACMGTIASFLSKYQDIIIEHQKVVKGNQKRLESLRELAGKENLEYPSVTLPPQPHTSEGVDAYNEVIARVRMWVNLNLWQKLKLSRDDAKPLLRLKGFPSFPLVERQANEVDWWDMVCNVKKLINEKKEDGKVFWQNLAGYKRQEALRPYLSSEEDRKKGKKFARYQLGDLLNHLEKKHGEDWGKVYDEAWERIDKKVEGLSKHIKLEEERRSEDAQSKAALTDWLRAKASFVIEGLKEADKDEFCRCELKLQKWYGDLRGKPFAIEAENSILDISGFSKQYNCAFIWQKDGVKKLNLYLIINYFKGGKLRFKKIKPEAFEANRFYTVINKKSGEIVPMEVNFNFDDPNLIILPLAFGKRQGREFIWNDLLSLETGSLKLANGRVIEKTLYNRRTRQDEPALFVALTFERREVLDSSNIKPMNLIGVDRGENIPAVIALTDPEGCPLSRFKDSLGNPTHILRIGESYKEKQRTIQAKKEVEQRRAGGYSRKYASKAKNLADDMVRNTARDLLYYAVTQDAMLIFENLSRGFGRQGKRTFMAERQYTRMEDWLTAKLAYEGLPSKTYLSKTLAQYTSKTCSNCGFTITSADYDRVLEKLKKTATGWMTTINGKELKVEGQITYYNRYKRQNVVKDLSVELDRLSEESVNNDISSWTKGRSGEALSLLKKRFSHRPVQEKFVCLNCGFETHADEQAALNIARSWLFLRSQEYKKYQTNKTTGNTDKRAFVETWQSFYRKKLKEVWKPAV

SEQ ID NO: 43412 - protein, 978 aa, synthetic construct
  REGION 1..978: note = engineered CasX variant
QEIKRINKIRRRLVKDSNTKKAGKTGPMKTLLVRVMTPDLRERLENLRKKPENIPQPISNTSRANLNKLLTDYTEMKKAILHVYWEEFQKDPVGLMSRVAQPASKKIDQNKLKPEMDEKGNLTTAGFACSQCGQPLFVYKLEQVSEKGKAYTNYFGRCNVAEHEKLILLAQLKPEKDSDEAVTYSLGKFGQRALDFYSIHVTKESTHPVKPLAQIAGNRYASAPVGKALSDACMGTIASFLSKYQDIIIEHQKVVKGNQKRLESLRELAGKENLEYPSVTLPPQPHTSEGVDAYNEVIARVRMWVNLNLWQKLKLSRDDAKPLLRLKGFPSFPLVERQANEVDWWDMVCNVKKLINEKKEDGKVFWQNLAGYKRQEALRPYLSSEEDRKKGKKFARYQLGDLLNHLEKKHGEDWGKVYDEAWERIDKKVEGLSKHIKLEEERRSEDAQSKAALTDWLRAKASFVIEGLKEADKDEFCRCELKLQKWYGDLRGKPFAIEAENSILDISGFSKQYNCAFIWQKDGVKKLNLYLIINYFKGGKLRFKKIKPEAFEANRFYTVINKKSGEIVPMEVNFNFDDPNLIILPLAFGKRQGREFIWNDLLSLETGSLKLANGRVIEKTLYNRRTRQDEPALFVALTFERREVLDSSNIKPMNLIGVDRGENIPAVIALTDPEGCPLSRFKDSLGNPTHILRIGESYKEKQRTIQAKKEVEQRRAGGYSRKYASKAKNLADDMVRNTARDLLYYAVTQDAMLIFENLSRGFGRQGKRTFMAERQYTRMEDWLTAKLAYEGLPSKTYLSKTLAQYTSKTCSNCGFTITSADYDRVLEKLKKTATGWMTTINGKELKVEGQITYYNRYKRQNVVKDLSVELDRLSEESVNNDISSWTKGRSGEALSLLKKRFSHRPVQEKFVCLNCGFETHADEQAALNIARSWLFLRSQEYKKYQTNKTTGNTDKRAFVETWQSFYRKKLKEVWKPAV

SEQ ID NO: 43413 - protein, 978 aa, synthetic construct
  REGION 1..978: note = engineered CasX variant
QEIKRINKIRRRLVKDSNTKKAGKTGPMKTLLVRVMTPDLRERLENLRKKPENIPQPISNTSRANLNKLLTDYTEMKKAILHVYWEEFQKDPVGLMSRVAQPASKKIDQNKLKPEMDEKGNLTTAGFACSQCGQPLFVYKLEQVSEKGKAYTNYFGRCNVAEHEKLILLAQLKPEKDSDEAVTYSLGKFGQRALDFYSIHVTKESTHPVKPLAQIAGNRYASVPVGKALSDACMGTIASFLSKYQDIIIEHQKVVKGNQKRLESLRELAGKENLEYPSVTLPPQPHTSEGVDAYNEVIARVRMWVNLNLWQKLKLSRDDAKPLLRLKGFPSFPLVERQANEVDWWDMVCNVKKLINEKKEDGKVFWQNLAGYKRQEALRPYLSSEEDRKKGKKFARYQLGDLLNHLEKKHGEDWGKVYDEAWERIDKKVEGLSKHIKLEEERRSEDAQSKAALTDWLRAKASFVIEGLKEADKDEFCRCELKLQKWYGDLRGKPFAIEAENSILDISGFSKQYNCAFIWQKDGVKKLNLYLIINYFKGGKLRFKKIKPEAFEANRFYTVINKKSGEIVPMEVNFNFDDPNLIILPLAFGKRQGREFIWNDLLSLETGSLKLANGRVIEKTLYNRRTRQDEPALFVALTFERREVLDSSNIKPMNLIGVDRGENIPAVIALTDPEGCPLSRFKDSLGNPTHILRIGESYKEKQRTIQAKKEVEQRRAGGYSRKYASKAKNLADDMVRNTARDLLYYAVTQDAMLIFENLSRGFGRQGKRTFMAERQYTRMEDWLTAKLAYEGLPSKTYLSKTLAQYTSKTCSNCGFTITSADYDRVLEKLKKTATGWMTTINGKELKVEGQITYYNRYKRQNVVKDLSVELDRLSEESVNNDISSWTKGRSGEALSLLKKRFSHRPVQEKFVCLNCGFETHADEQAALNIARSWLFLRSQEYKKYQTNKTTGNTDKRAFVETWQSFYRKKLKEVWKPAV

SEQ ID NO: 43414 - protein, 978 aa, synthetic construct
  REGION 1..978: note = engineered CasX variant
QEIKRINKIRRRLVKDSNTKKAGKTGPMKTLLVRVMTPDLRERLENLRKKPENIPQPISNTSRANLNKLLTDYTEMKKAILHVYWEEFQKDPVGLMSRVAQPASKKIDQNKLKPEMDEKGNLTTAGFACSQCGQPLFVYKLEQVSEKGKAYTNYFGRCNVAEHEKLIKLAQLKPEKDSDEAVTYSLGKFGQRALDFYSIHVTKESTHPVKPLAQIAGNRYASGPVGKALSDACMGTIASFLSKYQDIIIEHQKVVKGNQKRLESLRELAGKENLEYPSVTLPPQPHTSEGVDAYNEVIARVRMWVNLNLWQKLKLSRDDAKPLLRLKGFPSFPLVERQANEVDWWDMVCNVKKLINEKKEDGKVFWQNLAGYKRQEALRPYLSSEEDRKKGKKFARYQLGDLLNHLEKKHGEDWGKVYDEAWERIDKKVEGLSKHIKLEEERRSEDAQSKAALTDWLRAKASFVIEGLKEADKDEFCRCELKLQKWYGDLRGKPFAIEAENSILDISGFSKQYNCAFIWQKDGVKKLNLYLIINYFKGGKLRFKKIKPEAFEANRFYTVINKKSGEIVPMEVNFNFDDPNLIILPLAFGKRQGREFIWNDLLSLETGSLKLANGRVIEKTLYNRRTRQDEPALFVALTFERREVLDSSNIKPMNLIGVDRGENIPAVIALTDPEGCPLSRFKDSLGNPTHILRIGESYKEKQRTIQAKKEVEQRRAGGYSRKYASKAKNLADDMVRNTARDLLYYAVTQDAMLIFENLSRGFGRQGKRTFMAERQYTRMEDWLTAKLAYEGLPSKTYLSKTLAQYTSKTCSNCGFTITSADYDRVLEKLKKTATGWMTTINGKELKVEGQITYYNRYKRQNVVKDLSVELDRLSEESVNNDISSWTKGRSGEALSLLKKRFSHRPVQEKFVCLNCGFETHADEQAALNIARSWLFLRSQEYKKYQTNKTTGNTDKRAFVETWQSFYRKKLKEVWKPAV

SEQ ID NO: 43415 - protein, 977 aa, synthetic construct
  REGION 1..977: note = engineered CasX variant
QEIKRINKIRRRLVKDSNTKKAGKTGPMKTLLVRVMTPDLRERLENLRKKPENIPQPISNTSRANLNKLLTDYTEMKKAILHVYWEEFQKDPVGLMSRVAQPASKKIDQNKLKPEMDEKGNLTTAGFACSQCGQPLFVYKLEQVSEKGKAYTNYFGRCNVAEHEKLILLAQLKPEKDSDEAVTYSLGKFGQRALDFYSIHVTKESTHPVKPLAQIAGNRYASPVGKALSDACMGTIASFLSKYQDIIIEHQKVVKGNQKRLESLRELAGKENLEYPSVTLPPQPHTSEGVDAYNEVIARVRMWVNLNLWQKLKLSRDDAKPLLRLKGFPSFPLVERQANEVDWWDMVCNVKKLINEKKEDGKVFWQNLAGYKRQEALRPYLSSEEDRKKGKKFARYQLGDLLNHLEKKHGEDWGKVYDEAWERIDKKVEGLSKHIKLEEERRSEDAQSKAALTDWLRAKASFVIEGLKEADKDEFCRCELKLQKWYGDLRGKPFAIEAENSILDISGFSKQYNCAFIWQKDGVKKLNLYLIINYFKGGKLRFKKIKPEAFEANRFYTVINKKSGEIVPMEVNFNFDDPNLIILPLAFGKRQGREFIWNDLLSLETGSLKLANGRVIEKTLYNRRTRQDEPALFVALTFERREVLDSSNIKPMNLIGVDRGENIPAVIALTDPEGCPLSRFKDSLGNPTHILRIGESYKEKQRTIQAKKEVEQRRAGGYSRKYASKAKNLADDMVRNTARDLLYYAVTQDAMLIFENLSRGFGRQGKRTFMAERQYTRMEDWLTAKLAYEGLPSKTYLSKTLAQYTSKTCSNCGFTITSADYDRVLEKLKKTATGWMTTINGKELKVEGQITYYNRYKRQNVVKDLSVELDRLSEESVNNDISSWTKGRSGEALSLLKKRFSHRPVQEKFVCLNCGFETHADEQAALNIARSWLFLRSQEYKKYQTNKTTGNTDKRAFVETWQSFYRKKLKEVWKPAV

SEQ ID NO: 43416 - protein, 978 aa, synthetic construct
  REGION 1..978: note = engineered CasX variant
QEIKRINKIRRRLVKDSNTKKAGKTGPMKTLLVRVMTPDLRERLENLRKKPENIPQPISNTSRANLNKLLTDYTEMKKAILHVYWEEFQKDPVGLMSRVAQPASKKIDQNKLKPEMDEKGNLTTAGFACSQCGQPLFVYKLEQVSEKGKAYTNYFGRCNVAEHEKLILLAQLKPEKDSDEAVTYSLGKFGQRALDFYSIHVTKESTHPVKPLAQIAGNRYASYPVGKALSDACMGTIASFLSKYQDIIIEHQKVVKGNQKRLESLRELAGKENLEYPSVTLPPQPHTSEGVDAYNEVIARVRMWVNLNLWQKLKLSRDDAKPLLRLKGFPSFPLVERQANEVDWWDMVCNVKKLINEKKEDGKVFWQNLAGYKRQEALRPYLSSEEDRKKGKKFARYQLGDLLWHLEKKHGEDWGKVYDEAWERIDKKVEGLSKHIKLEEERRSEDAQSKAALTDWLRAKASFVIEGLKEADKDEFCRCELKLQKWYGDLRGKPFAIEAENSILDISGFSKQYNCAFIWQKDGVKKLNLYLIINYFKGGKLRFKKIKPEAFEANRFYTVINKKSGEIVPMEVNFNFDDPNLIILPLAFGKRQGREFIWNDLLSLETGSLKLANGRVIEKTLYNRRTRQDEPALFVALTFERREVLDSSNIKPMNLIGVDRGENIPAVIALTDPEGCPLSRFKDSLGNPTHILRIGESYKEKQRTIQAKKEVEQRRAGGYSRKYASKAKNLADDMVRNTARDLLYYAVTQDAMLIFENLSRGFGRQGKRTFMAERQYTRMEDWLTAKLAYEGLPSKTYLSKTLAQYTSKTCSNCGFTITSADYDRVLEKLKKTATGWMTTINGKELKVEGQITYYNRYKRQNVVKDLSVELDRLSEESVNNDISSWTKGRSGEALSLLKKRFSHRPVQEKFVCLNCGFETHADEQAALNIARSWLFLRSQEYKKYQTNKTTGNTDKRAFVETWQSFYRKKLKEVWKPAV

SEQ ID NO: 43417 - protein, 978 aa, synthetic construct
  REGION 1..978: note = engineered CasX variant
QEIKRINKIRRRLVKDSNTKKAGKTGPMKTLLVRVMTPDLRERLENLRKKPENIPQPISNTSRANLNKLLTDYTEMKKAILHVYWEEFQKDPVGLMSRVAQPASKKIDQNKLKPEMDEKGNLTTAGFACSQCGQPLFVYKLEQVSEKGKAYTNYFGRCNVAEHEKLILLAQLKPEKDSDEAVTYSLGKFGQRALDFYSIHVTKESTHPVKPLAQIAGNRYASHPVGKALSDACMGTIASFLSKYQDIIIEHQKVVKGNQKRLESLRELAGKENLEYPSVTLPPQPHTSEGVDAYNEVIARVRMWVNLNLWQKLKLSRDDAKPLLRLKGFPSFPLVERQANEVDWWDMVCNVKKLINEKKEDGKVFWQNLAGYKRQEALRPYLSSEEDRKKGKKFARYQLGDLLWHLEKKHGEDWGKVYDEAWERIDKKVEGLSKHIKLEEERRSEDAQSKAALTDWLRAKASFVIEGLKEADKDEFCRCELKLQKWYGDLRGKPFAIEAENSILDISGFSKQYNCAFIWQKDGVKKLNLYLIINYFKGGKLRFKKIKPEAFEANRFYTVINKKSGEIVPMEVNFNFDDPNLIILPLAFGKRQGREFIWNDLLSLETGSLKLANGRVIEKTLYNRRTRQDEPALFVALTFERREVLDSSNIKPMNLIGVDRGENIPAVIALTDPEGCPLSRFKDSLGNPTHILRIGESYKEKQRTIQAKKEVEQRRAGGYSRKYASKAKNLADDMVRNTARDLLYYAVTQDAMLIFENLSRGFGRQGKRTFMAERQYTRMEDWLTAKLAYEGLPSKTYLSKTLAQYTSKTCSNCGFTITSADYDRVLEKLKKTATGWMTTINGKELKVEGQITYYNRYKRQNVVKDLSVELDRLSEESVNNDISSWTKGRSGEALSLLKKRFSHRPVQEKFVCLNCGFETHADEQAALNIARSWLFLRSQEYKKYQTNKTTGNTDKRAFVETWQSFYRKKLKEVWKPAV

SEQ ID NO: 43418 - protein, 978 aa, synthetic construct
  REGION 1..978: note = engineered CasX variant
QEIKRINKIRRRLVKDSNTKKAGKTGPMKTLLVRVMTPDLRERLENLRKKPENIPQPISNTSRANLNKLLTDYTEMKKAILHVYWEEFQKDPVGLMSRVAQPASKKIDQNKLKPEMDEKGNLTTAGFACSQCGQPLFVYKLEQVSEKGKAYTNYFGRCNVAEHEKLILLAQLKPEKDSDEAVTYSLGKFGQRALDFYSIHVTKESTHPVKPLAQIAGNRYASSPVGKALSDACMGTIASFLSKYQDIIIEHQKVVKGNQKRLESLRELAGKENLEYPSVTLPPQPHTSEGVDAYNEVIARVRMWVNLNLWQKLKLSRDDAKPLLRLKGFPSFPLVERQANEVDWWDMVCNVKKLINEKKEDGKVFWQNLAGYKRQEALRPYLSSEEDRKKGKKFARYQLGDLLWHLEKKHGEDWGKVYDEAWERIDKKVEGLSKHIKLEEERRSEDAQSKAALTDWLRAKASFVIEGLKEADKDEFCRCELKLQKWYGDLRGKPFAIEAENSILDISGFSKQYNCAFIWQKDGVKKLNLYLIINYFKGGKLRFKKIKPEAFEANRFYTVINKKSGEIVPMEVNFNFDDPNLIILPLAFGKRQGREFIWNDLLSLETGSLKLANGRVIEKTLYNRRTRQDEPALFVALTFERREVLDSSNIKPMNLIGVDRGENIPAVIALTDPEGCPLSRFKDSLGNPTHILRIGESYKEKQRTIQAKKEVEQRRAGGYSRKYASKAKNLADDMVRNTARDLLYYAVTQDAMLIFENLSRGFGRQGKRTFMAERQYTRMEDWLTAKLAYEGLPSKTYLSKTLAQYTSKTCSNCGFTITSADYDRVLEKLKKTATGWMTTINGKELKVEGQITYYNRYKRQNVVKDLSVELDRLSEESVNNDISSWTKGRSGEALSLLKKRFSHRPVQEKFVCLNCGFETHADEQAALNIARSWLFLRSQEYKKYQTNKTTGNTDKRAFVETWQSFYRKKLKEVWKPAV

SEQ ID NO: 43419 - protein, 978 aa, synthetic construct
  REGION 1..978: note = engineered CasX variant
QEIKRINKIRRRLVKDSNTKKAGKTGPMKTLLVRVMTPDLRERLENLRKKPENIPQPISNTSRANLNKLLTDYTEMKKAILHVYWEEFQKDPVGLMSRVAQPASKKIDQNKLKPEMDEKGNLTTAGFACSQCGQPLFVYKLEQVSEKGKAYTNYFGRCNVAEHEKLILLAQLKPEKDSDEAVTYSLGKFGQRALDFYSIHVTKESTHPVKPLAQIAGNRYASTPVGKALSDACMGTIASFLSKYQDIIIEHQKVVKGNQKRLESLRELAGKENLEYPSVTLPPQPHTSEGVDAYNEVIARVRMWVNLNLWQKLKLSRDDAKPLLRLKGFPSFPLVERQANEVDWWDMVCNVKKLINEKKEDGKVFWQNLAGYKRQEALRPYLSSEEDRKKGKKFARYQLGDLLWHLEKKHGEDWGKVYDEAWERIDKKVEGLSKHIKLEEERRSEDAQSKAALTDWLRAKASFVIEGLKEADKDEFCRCELKLQKWYGDLRGKPFAIEAENSILDISGFSKQYNCAFIWQKDGVKKLNLYLIINYFKGGKLRFKKIKPEAFEANRFYTVINKKSGEIVPMEVNFNFDDPNLIILPLAFGKRQGREFIWNDLLSLETGSLKLANGRVIEKTLYNRRTRQDEPALFVALTFERREVLDSSNIKPMNLIGVDRGENIPAVIALTDPEGCPLSRFKDSLGNPTHILRIGESYKEKQRTIQAKKEVEQRRAGGYSRKYASKAKNLADDMVRNTARDLLYYAVTQDAMLIFENLSRGFGRQGKRTFMAERQYTRMEDWLTAKLAYEGLPSKTYLSKTLAQYTSKTCSNCGFTITSADYDRVLEKLKKTATGWMTTINGKELKVEGQITYYNRYKRQNVVKDLSVELDRLSEESVNNDISSWTKGRSGEALSLLKKRFSHRPVQEKFVCLNCGFETHADEQAALNIARSWLFLRSQEYKKYQTNKTTGNTDKRAFVETWQSFYRKKLKEVWKPAV

SEQ ID NO: 43420 - protein, 978 aa, synthetic construct
  REGION 1..978: note = engineered CasX variant
QEIKRINKIRRRLVKDSNTKKAGKTGPMKTLLVRVMTPDLRERLENLRKKPENIPQPISNTSRANLNKLLTDYTEMKKAILHVYWEEFQKDPVGLMSRVAQPASKKIDQNKLKPEMDEKGNLTTAGFACSQCGQPLFVYKLEQVSEKGKAYTNYFGRCNVAEHEKLILLAQLKPEKDSDEAVTYSLGKFGQRALDFYSIHVTKESTHPVKPLAQIAGNRYASAPVGKALSDACMGTIASFLSKYQDIIIEHQKVVKGNQKRLESLRELAGKENLEYPSVTLPPQPHTSEGVDAYNEVIARVRMWVNLNLWQKLKLSRDDAKPLLRLKGFPSFPLVERQANEVDWWDMVCNVKKLINEKKEDGKVFWQNLAGYKRQEALRPYLSSEEDRKKGKKFARYQLGDLLWHLEKKHGEDWGKVYDEAWERIDKKVEGLSKHIKLEEERRSEDAQSKAALTDWLRAKASFVIEGLKEADKDEFCRCELKLQKWYGDLRGKPFAIEAENSILDISGFSKQYNCAFIWQKDGVKKLNLYLIINYFKGGKLRFKKIKPEAFEANRFYTVINKKSGEIVPMEVNFNFDDPNLIILPLAFGKRQGREFIWNDLLSLETGSLKLANGRVIEKTLYNRRTRQDEPALFVALTFERREVLDSSNIKPMNLIGVDRGENIPAVIALTDPEGCPLSRFKDSLGNPTHILRIGESYKEKQRTIQAKKEVEQRRAGGYSRKYASKAKNLADDMVRNTARDLLYYAVTQDAMLIFENLSRGFGRQGKRTFMAERQYTRMEDWLTAKLAYEGLPSKTYLSKTLAQYTSKTCSNCGFTITSADYDRVLEKLKKTATGWMTTINGKELKVEGQITYYNRYKRQNVVKDLSVELDRLSEESVNNDISSWTKGRSGEALSLLKKRFSHRPVQEKFVCLNCGFETHADEQAALNIARSWLFLRSQEYKKYQTNKTTGNTDKRAFVETWQSFYRKKLKEVWKPAV

SEQ ID NO: 43421 - protein, 978 aa, synthetic construct
  REGION 1..978: note = engineered CasX variant
QEIKRINKIRRRLVKDSNTKKAGKTGPMKTLLVRVMTPDLRERLENLRKKPENIPQPISNTSRANLNKLLTDYTEMKKAILHVYWEEFQKDPVGLMSRVAQPASKKIDQNKLKPEMDEKGNLTTAGFACSQCGQPLFVYKLEQVSEKGKAYTNYFGRCNVAEHEKLILLAQLKPEKDSDEAVTYSLGKFGQRALDFYSIHVTKESTHPVKPLAQIAGNRYASVPVGKALSDACMGTIASFLSKYQDIIIEHQKVVKGNQKRLESLRELAGKENLEYPSVTLPPQPHTSEGVDAYNEVIARVRMWVNLNLWQKLKLSRDDAKPLLRLKGFPSFPLVERQANEVDWWDMVCNVKKLINEKKEDGKVFWQNLAGYKRQEALRPYLSSEEDRKKGKKFARYQLGDLLWHLEKKHGEDWGKVYDEAWERIDKKVEGLSKHIKLEEERRSEDAQSKAALTDWLRAKASFVIEGLKEADKDEFCRCELKLQKWYGDLRGKPFAIEAENSILDISGFSKQYNCAFIWQKDGVKKLNLYLIINYFKGGKLRFKKIKPEAFEANRFYTVINKKSGEIVPMEVNFNFDDPNLIILPLAFGKRQGREFIWNDLLSLETGSLKLANGRVIEKTLYNRRTRQDEPALFVALTFERREVLDSSNIKPMNLIGVDRGENIPAVIALTDPEGCPLSRFKDSLGNPTHILRIGESYKEKQRTIQAKKEVEQRRAGGYSRKYASKAKNLADDMVRNTARDLLYYAVTQDAMLIFENLSRGFGRQGKRTFMAERQYTRMEDWLTAKLAYEGLPSKTYLSKTLAQYTSKTCSNCGFTITSADYDRVLEKLKKTATGWMTTINGKELKVEGQITYYNRYKRQNVVKDLSVELDRLSEESVNNDISSWTKGRSGEALSLLKKRFSHRPVQEKFVCLNCGFETHADEQAALNIARSWLFLRSQEYKKYQTNKTTGNTDKRAFVETWQSFYRKKLKEVWKPAV

SEQ ID NO: 43422 - protein, 978 aa, synthetic construct
  REGION 1..978: note = engineered CasX variant
QEIKRINKIRRRLVKDSNTKKAGKTGPMKTLLVRVMTPDLRERLENLRKKPENIPQPISNTSRANLNKLLTDYTEMKKAILHVYWEEFQKDPVGLMSRVAQPASKKIDQNKLKPEMDEKGNLTTAGFACSQCGQPLFVYKLEQVSEKGKAYTNYFGRCNVAEHEKLIKLAQLKPEKDSDEAVTYSLGKFGQRALDFYSIHVTKESTHPVKPLAQIAGNRYASGPVGKALSDACMGTIASFLSKYQDIIIEHQKVVKGNQKRLESLRELAGKENLEYPSVTLPPQPHTSEGVDAYNEVIARVRMWVNLNLWQKLKLSRDDAKPLLRLKGFPSFPLVERQANEVDWWDMVCNVKKLINEKKEDGKVFWQNLAGYKRQEALRPYLSSEEDRKKGKKFARYQLGDLLWHLEKKHGEDWGKVYDEAWERIDKKVEGLSKHIKLEEERRSEDAQSKAALTDWLRAKASFVIEGLKEADKDEFCRCELKLQKWYGDLRGKPFAIEAENSILDISGFSKQYNCAFIWQKDGVKKLNLYLIINYFKGGKLRFKKIKPEAFEANRFYTVINKKSGEIVPMEVNFNFDDPNLIILPLAFGKRQGREFIWNDLLSLETGSLKLANGRVIEKTLYNRRTRQDEPALFVALTFERREVLDSSNIKPMNLIGVDRGENIPAVIALTDPEGCPLSRFKDSLGNPTHILRIGESYKEKQRTIQAKKEVEQRRAGGYSRKYASKAKNLADDMVRNTARDLLYYAVTQDAMLIFENLSRGFGRQGKRTFMAERQYTRMEDWLTAKLAYEGLPSKTYLSKTLAQYTSKTCSNCGFTITSADYDRVLEKLKKTATGWMTTINGKELKVEGQITYYNRYKRQNVVKDLSVELDRLSEESVNNDISSWTKGRSGEALSLLKKRFSHRPVQEKFVCLNCGFETHADEQAALNIARSWLFLRSQEYKKYQTNKTTGNTDKRAFVETWQSFYRKKLKEVWKPAV

SEQ ID NO: 43423 - protein, 977 aa, synthetic construct
  REGION 1..977: note = engineered CasX variant
QEIKRINKIRRRLVKDSNTKKAGKTGPMKTLLVRVMTPDLRERLENLRKKPENIPQPISNTSRANLNKLLTDYTEMKKAILHVYWEEFQKDPVGLMSRVAQPASKKIDQNKLKPEMDEKGNLTTAGFACSQCGQPLFVYKLEQVSEKGKAYTNYFGRCNVAEHEKLILLAQLKPEKDSDEAVTYSLGKFGQRALDFYSIHVTKESTHPVKPLAQIAGNRYASPVGKALSDACMGTIASFLSKYQDIIIEHQKVVKGNQKRLESLRELAGKENLEYPSVTLPPQPHTSEGVDAYNEVIARVRMWVNLNLWQKLKLSRDDAKPLLRLKGFPSFPLVERQANEVDWWDMVCNVKKLINEKKEDGKVFWQNLAGYKRQEALRPYLSSEEDRKKGKKFARYQLGDLLWHLEKKHGEDWGKVYDEAWERIDKKVEGLSKHIKLEEERRSEDAQSKAALTDWLRAKASFVIEGLKEADKDEFCRCELKLQKWYGDLRGKPFAIEAENSILDISGFSKQYNCAFIWQKDGVKKLNLYLIINYFKGGKLRFKKIKPEAFEANRFYTVINKKSGEIVPMEVNFNFDDPNLIILPLAFGKRQGREFIWNDLLSLETGSLKLANGRVIEKTLYNRRTRQDEPALFVALTFERREVLDSSNIKPMNLIGVDRGENIPAVIALTDPEGCPLSRFKDSLGNPTHILRIGESYKEKQRTIQAKKEVEQRRAGGYSRKYASKAKNLADDMVRNTARDLLYYAVTQDAMLIFENLSRGFGRQGKRTFMAERQYTRMEDWLTAKLAYEGLPSKTYLSKTLAQYTSKTCSNCGFTITSADYDRVLEKLKKTATGWMTTINGKELKVEGQITYYNRYKRQNVVKDLSVELDRLSEESVNNDISSWTKGRSGEALSLLKKRFSHRPVQEKFVCLNCGFETHADEQAALNIARSWLFLRSQEYKKYQTNKTTGNTDKRAFVETWQSFYRKKLKEVWKPAV

SEQ ID NO: 43424 - protein, 978 aa, synthetic construct
  REGION 1..978: note = engineered CasX variant
QEIKRINKIRRRLVKDSNTKKAGKTGPMKTLLVRVMTPDLRERLENLRKKPENIPQPISNTSRANLNKLLTDYTEMKKAILHVYWEEFQKDPVGLMSRVAQPASKKIDQNKLKPEMDEKGNLTTAGFACSQCGQPLFVYKLEQVSEKGKAYTNYFGRCNVAEHEKLILLAQLKPEKDSDEAVTYSLGKFGQRALDFYSIHVTKESTHPVKPLAQIAGNRYASYPVGKALSDACMGTIASFLSKYQDIIIEHQKVVKGNQKRLESLRELAGKENLEYPSVTLPPQPHTSEGVDAYNEVIARVRMWVNLNLWQKLKLSRDDAKPLLRLKGFPSFPLVERQANEVDWWDMVCNVKKLINEKKEDGKVFWQNLAGYKRQEALRPYLSSEEDRKKGKKFARYQLGDLLLHLYKKHGEDWGKVYDEAWERIDKKVEGLSKHIKLEEERRSEDAQSKAALTDWLRAKASFVIEGLKEADKDEFCRCELKLQKWYGDLRGKPFAIEAENSILDISGFSKQYNCAFIWQKDGVKKLNLYLIINYFKGGKLRFKKIKPEAFEANRFYTVINKKSGEIVPMEVNFNFDDPNLIILPLAFGKRQGREFIWNDLLSLETGSLKLANGRVIEKTLYNRRTRQDEPALFVALTFERREVLDSSNIKPMNLIGVDRGENIPAVIALTDPEGCPLSRFKDSLGNPTHILRIGESYKEKQRTIQAKKEVEQRRAGGYSRKYASKAKNLADDMVRNTARDLLYYAVTQDAMLIFENLSRGFGRQGKRTFMAERQYTRMEDWLTAKLAYEGLPSKTYLSKTLAQYTSKTCSNCGFTITSADYDRVLEKLKKTATGWMTTINGKELKVEGQITYYNRYKRQNVVKDLSVELDRLSEESVNNDISSWTKGRSGEALSLLKKRFSHRPVQEKFVCLNCGFETHADEQAALNIARSWLFLRSQEYKKYQTNKTTGNTDKRAFVETWQSFYRKKLKEVWKPAV

SEQ ID NO: 43425 - protein, 978 aa, synthetic construct
  REGION 1..978: note = engineered CasX variant
QEIKRINKIRRRLVKDSNTKKAGKTGPMKTLLVRVMTPDLRERLENLRKKPENIPQPISNTSRANLNKLLTDYTEMKKAILHVYWEEFQKDPVGLMSRVAQPASKKIDQNKLKPEMDEKGNLTTAGFACSQCGQPLFVYKLEQVSEKGKAYTNYFGRCNVAEHEKLILLAQLKPEKDSDEAVTYSLGKFGQRALDFYSIHVTKESTHPVKPLAQIAGNRYASHPVGKALSDACMGTIASFLSKYQDIIIEHQKVVKGNQKRLESLRELAGKENLEYPSVTLPPQPHTSEGVDAYNEVIARVRMWVNLNLWQKLKLSRDDAKPLLRLKGFPSFPLVERQANEVDWWDMVCNVKKLINEKKEDGKVFWQNLAGYKRQEALRPYLSSEEDRKKGKKFARYQLGDLLLHLYKKHGEDWGKVYDEAWERIDKKVEGLSKHIKLEEERRSEDAQSKAALTDWLRAKASFVIEGLKEADKDEFCRCELKLQKWYGDLRGKPFAIEAENSILDISGFSKQYNCAFIWQKDGVKKLNLYLIINYFKGGKLRFKKIKPEAFEANRFYTVINKKSGEIVPMEVNFNFDDPNLIILPLAFGKRQGREFIWNDLLSLETGSLKLANGRVIEKTLYNRRTRQDEPALFVALTFERREVLDSSNIKPMNLIGVDRGENIPAVIALTDPEGCPLSRFKDSLGNPTHILRIGESYKEKQRTIQAKKEVEQRRAGGYSRKYASKAKNLADDMVRNTARDLLYYAVTQDAMLIFENLSRGFGRQGKRTFMAERQYTRMEDWLTAKLAYEGLPSKTYLSKTLAQYTSKTCSNCGFTITSADYDRVLEKLKKTATGWMTTINGKELKVEGQITYYNRYKRQNVVKDLSVELDRLSEESVNNDISSWTKGRSGEALSLLKKRFSHRPVQEKFVCLNCGFETHADEQAALNIARSWLFLRSQEYKKYQTNKTTGNTDKRAFVETWQSFYRKKLKEVWKPAV

SEQ ID NO: 43426 - protein, 978 aa, synthetic construct
  REGION 1..978: note = engineered CasX variant
QEIKRINKIRRRLVKDSNTKKAGKTGPMKTLLVRVMTPDLRERLENLRKKPENIPQPISNTSRANLNKLLTDYTEMKKAILHVYWEEFQKDPVGLMSRVAQPASKKIDQNKLKPEMDEKGNLTTAGFACSQCGQPLFVYKLEQVSEKGKAYTNYFGRCNVAEHEKLILLAQLKPEKDSDEAVTYSLGKFGQRALDFYSIHVTKESTHPVKPLAQIAGNRYASSPVGKALSDACMGTIASFLSKYQDIIIEHQKVVKGNQKRLESLRELAGKENLEYPSVTLPPQPHTSEGVDAYNEVIARVRMWVNLNLWQKLKLSRDDAKPLLRLKGFPSFPLVERQANEVDWWDMVCNVKKLINEKKEDGKVFWQNLAGYKRQEALRPYLSSEEDRKKGKKFARYQLGDLLLHLYKKHGEDWGKVYDEAWERIDKKVEGLSKHIKLEEERRSEDAQSKAALTDWLRAKASFVIEGLKEADKDEFCRCELKLQKWYGDLRGKPFAIEAENSILDISGFSKQYNCAFIWQKDGVKKLNLYLIINYFKGGKLRFKKIKPEAFEANRFYTVINKKSGEIVPMEVNFNFDDPNLIILPLAFGKRQGREFIWNDLLSLETGSLKLANGRVIEKTLYNRRTRQDEPALFVALTFERREVLDSSNIKPMNLIGVDRGENIPAVIALTDPEGCPLSRFKDSLGNPTHILRIGESYKEKQRTIQAKKEVEQRRAGGYSRKYASKAKNLADDMVRNTARDLLYYAVTQDAMLIFENLSRGFGRQGKRTFMAERQYTRMEDWLTAKLAYEGLPSKTYLSKTLAQYTSKTCSNCGFTITSADYDRVLEKLKKTATGWMTTINGKELKVEGQITYYNRYKRQNVVKDLSVELDRLSEESVNNDISSWTKGRSGEALSLLKKRFSHRPVQEKFVCLNCGFETHADEQAALNIARSWLFLRSQEYKKYQTNKTTGNTDKRAFVETWQSFYRKKLKEVWKPAV

SEQ ID NO: 43427 - protein, 978 aa, synthetic construct
  REGION 1..978: note = engineered CasX variant
QEIKRINKIRRRLVKDSNTKKAGKTGPMKTLLVRVMTPDLRERLENLRKKPENIPQPISNTSRANLNKLLTDYTEMKKAILHVYWEEFQKDPVGLMSRVAQPASKKIDQNKLKPEMDEKGNLTTAGFACSQCGQPLFVYKLEQVSEKGKAYTNYFGRCNVAEHEKLILLAQLKPEKDSDEAVTYSLGKFGQRALDFYSIHVTKESTHPVKPLAQIAGNRYASTPVGKALSDACMGTIASFLSKYQDIIIEHQKVVKGNQKRLESLRELAGKENLEYPSVTLPPQPHTSEGVDAYNEVIARVRMWVNLNLWQKLKLSRDDAKPLLRLKGFPSFPLVERQANEVDWWDMVCNVKKLINEKKEDGKVFWQNLAGYKRQEALRPYLSSEEDRKKGKKFARYQLGDLLLHLYKKHGEDWGKVYDEAWERIDKKVEGLSKHIKLEEERRSEDAQSKAALTDWLRAKASFVIEGLKEADKDEFCRCELKLQKWYGDLRGKPFAIEAENSILDISGFSKQYNCAFIWQKDGVKKLNLYLIINYFKGGKLRFKKIKPEAFEANRFYTVINKKSGEIVPMEVNFNFDDPNLIILPLAFGKRQGREFIWNDLLSLETGSLKLANGRVIEKTLYNRRTRQDEPALFVALTFERREVLDSSNIKPMNLIGVDRGENIPAVIALTDPEGCPLSRFKDSLGNPTHILRIGESYKEKQRTIQAKKEVEQRRAGGYSRKYASKAKNLADDMVRNTARDLLYYAVTQDAMLIFENLSRGFGRQGKRTFMAERQYTRMEDWLTAKLAYEGLPSKTYLSKTLAQYTSKTCSNCGFTITSADYDRVLEKLKKTATGWMTTINGKELKVEGQITYYNRYKRQNVVKDLSVELDRLSEESVNNDISSWTKGRSGEALSLLKKRFSHRPVQEKFVCLNCGFETHADEQAALNIARSWLFLRSQEYKKYQTNKTTGNTDKRAFVETWQSFYRKKLKEVWKPAV

SEQ ID NO: 43428 - protein, 978 aa, synthetic construct
  REGION 1..978: note = engineered CasX variant
QEIKRINKIRRRLVKDSNTKKAGKTGPMKTLLVRVMTPDLRERLENLRKKPENIPQPISNTSRANLNKLLTDYTEMKKAILHVYWEEFQKDPVGLMSRVAQPASKKIDQNKLKPEMDEKGNLTTAGFACSQCGQPLFVYKLEQVSEKGKAYTNYFGRCNVAEHEKLILLAQLKPEKDSDEAVTYSLGKFGQRALDFYSIHVTKESTHPVKPLAQIAGNRYASAPVGKALSDACMGTIASFLSKYQDIIIEHQKVVKGNQKRLESLRELAGKENLEYPSVTLPPQPHTSEGVDAYNEVIARVRMWVNLNLWQKLKLSRDDAKPLLRLKGFPSFPLVERQANEVDWWDMVCNVKKLINEKKEDGKVFWQNLAGYKRQEALRPYLSSEEDRKKGKKFARYQLGDLLLHLYKKHGEDWGKVYDEAWERIDKKVEGLSKHIKLEEERRSEDAQSKAALTDWLRAKASFVIEGLKEADKDEFCRCELKLQKWYGDLRGKPFAIEAENSILDISGFSKQYNCAFIWQKDGVKKLNLYLIINYFKGGKLRFKKIKPEAFEANRFYTVINKKSGEIVPMEVNFNFDDPNLIILPLAFGKRQGREFIWNDLLSLETGSLKLANGRVIEKTLYNRRTRQDEPALFVALTFERREVLDSSNIKPMNLIGVDRGENIPAVIALTDPEGCPLSRFKDSLGNPTHILRIGESYKEKQRTIQAKKEVEQRRAGGYSRKYASKAKNLADDMVRNTARDLLYYAVTQDAMLIFENLSRGFGRQGKRTFMAERQYTRMEDWLTAKLAYEGLPSKTYLSKTLAQYTSKTCSNCGFTITSADYDRVLEKLKKTATGWMTTINGKELKVEGQITYYNRYKRQNVVKDLSVELDRLSEESVNNDISSWTKGRSGEALSLLKKRFSHRPVQEKFVCLNCGFETHADEQAALNIARSWLFLRSQEYKKYQTNKTTGNTDKRAFVETWQSFYRKKLKEVWKPAV

SEQ ID NO: 43429 - protein, 978 aa, synthetic construct
  REGION 1..978: note = engineered CasX variant
QEIKRINKIRRRLVKDSNTKKAGKTGPMKTLLVRVMTPDLRERLENLRKKPENIPQPISNTSRANLNKLLTDYTEMKKAILHVYWEEFQKDPVGLMSRVAQPASKKIDQNKLKPEMDEKGNLTTAGFACSQCGQPLFVYKLEQVSEKGKAYTNYFGRCNVAEHEKLILLAQLKPEKDSDEAVTYSLGKFGQRALDFYSIHVTKESTHPVKPLAQIAGNRYASVPVGKALSDACMGTIASFLSKYQDIIIEHQKVVKGNQKRLESLRELAGKENLEYPSVTLPPQPHTSEGVDAYNEVIARVRMWVNLNLWQKLKLSRDDAKPLLRLKGFPSFPLVERQANEVDWWDMVCNVKKLINEKKEDGKVFWQNLAGYKRQEALRPYLSSEEDRKKGKKFARYQLGDLLLHLYKKHGEDWGKVYDEAWERIDKKVEGLSKHIKLEEERRSEDAQSKAALTDWLRAKASFVIEGLKEADKDEFCRCELKLQKWYGDLRGKPFAIEAENSILDISGFSKQYNCAFIWQKDGVKKLNLYLIINYFKGGKLRFKKIKPEAFEANRFYTVINKKSGEIVPMEVNFNFDDPNLIILPLAFGKRQGREFIWNDLLSLETGSLKLANGRVIEKTLYNRRTRQDEPALFVALTFERREVLDSSNIKPMNLIGVDRGENIPAVIALTDPEGCPLSRFKDSLGNPTHILRIGESYKEKQRTIQAKKEVEQRRAGGYSRKYASKAKNLADDMVRNTARDLLYYAVTQDAMLIFENLSRGFGRQGKRTFMAERQYTRMEDWLTAKLAYEGLPSKTYLSKTLAQYTSKTCSNCGFTITSADYDRVLEKLKKTATGWMTTINGKELKVEGQITYYNRYKRQNVVKDLSVELDRLSEESVNNDISSWTKGRSGEALSLLKKRFSHRPVQEKFVCLNCGFETHADEQAALNIARSWLFLRSQEYKKYQTNKTTGNTDKRAFVETWQSFYRKKLKEVWKPAV

SEQ ID NO: 43430 - protein, 978 aa, synthetic construct
  REGION 1..978: note = engineered CasX variant
QEIKRINKIRRRLVKDSNTKKAGKTGPMKTLLVRVMTPDLRERLENLRKKPENIPQPISNTSRANLNKLLTDYTEMKKAILHVYWEEFQKDPVGLMSRVAQPASKKIDQNKLKPEMDEKGNLTTAGFACSQCGQPLFVYKLEQVSEKGKAYTNYFGRCNVAEHEKLIKLAQLKPEKDSDEAVTYSLGKFGQRALDFYSIHVTKESTHPVKPLAQIAGNRYASGPVGKALSDACMGTIASFLSKYQDIIIEHQKVVKGNQKRLESLRELAGKENLEYPSVTLPPQPHTSEGVDAYNEVIARVRMWVNLNLWQKLKLSRDDAKPLLRLKGFPSFPLVERQANEVDWWDMVCNVKKLINEKKEDGKVFWQNLAGYKRQEALRPYLSSEEDRKKGKKFARYQLGDLLLHLYKKHGEDWGKVYDEAWERIDKKVEGLSKHIKLEEERRSEDAQSKAALTDWLRAKASFVIEGLKEADKDEFCRCELKLQKWYGDLRGKPFAIEAENSILDISGFSKQYNCAFIWQKDGVKKLNLYLIINYFKGGKLRFKKIKPEAFEANRFYTVINKKSGEIVPMEVNFNFDDPNLIILPLAFGKRQGREFIWNDLLSLETGSLKLANGRVIEKTLYNRRTRQDEPALFVALTFERREVLDSSNIKPMNLIGVDRGENIPAVIALTDPEGCPLSRFKDSLGNPTHILRIGESYKEKQRTIQAKKEVEQRRAGGYSRKYASKAKNLADDMVRNTARDLLYYAVTQDAMLIFENLSRGFGRQGKRTFMAERQYTRMEDWLTAKLAYEGLPSKTYLSKTLAQYTSKTCSNCGFTITSADYDRVLEKLKKTATGWMTTINGKELKVEGQITYYNRYKRQNVVKDLSVELDRLSEESVNNDISSWTKGRSGEALSLLKKRFSHRPVQEKFVCLNCGFETHADEQAALNIARSWLFLRSQEYKKYQTNKTTGNTDKRAFVETWQSFYRKKLKEVWKPAV

SEQ ID NO: 43431 - protein, 977 aa, synthetic construct
  REGION 1..977: note = engineered CasX variant
QEIKRINKIRRRLVKDSNTKKAGKTGPMKTLLVRVMTPDLRERLENLRKKPENIPQPISNTSRANLNKLLTDYTEMKKAILHVYWEEFQKDPVGLMSRVAQPASKKIDQNKLKPEMDEKGNLTTAGFACSQCGQPLFVYKLEQVSEKGKAYTNYFGRCNVAEHEKLILLAQLKPEKDSDEAVTYSLGKFGQRALDFYSIHVTKESTHPVKPLAQIAGNRYASPVGKALSDACMGTIASFLSKYQDIIIEHQKVVKGNQKRLESLRELAGKENLEYPSVTLPPQPHTSEGVDAYNEVIARVRMWVNLNLWQKLKLSRDDAKPLLRLKGFPSFPLVERQANEVDWWDMVCNVKKLINEKKEDGKVFWQNLAGYKRQEALRPYLSSEEDRKKGKKFARYQLGDLLLHLYKKHGEDWGKVYDEAWERIDKKVEGLSKHIKLEEERRSEDAQSKAALTDWLRAKASFVIEGLKEADKDEFCRCELKLQKWYGDLRGKPFAIEAENSILDISGFSKQYNCAFIWQKDGVKKLNLYLIINYFKGGKLRFKKIKPEAFEANRFYTVINKKSGEIVPMEVNFNFDDPNLIILPLAFGKRQGREFIWNDLLSLETGSLKLANGRVIEKTLYNRRTRQDEPALFVALTFERREVLDSSNIKPMNLIGVDRGENIPAVIALTDPEGCPLSRFKDSLGNPTHILRIGESYKEKQRTIQAKKEVEQRRAGGYSRKYASKAKNLADDMVRNTARDLLYYAVTQDAMLIFENLSRGFGRQGKRTFMAERQYTRMEDWLTAKLAYEGLPSKTYLSKTLAQYTSKTCSNCGFTITSADYDRVLEKLKKTATGWMTTINGKELKVEGQITYYNRYKRQNVVKDLSVELDRLSEESVNNDISSWTKGRSGEALSLLKKRFSHRPVQEKFVCLNCGFETHADEQAALNIARSWLFLRSQEYKKYQTNKTTGNTDKRAFVETWQSFYRKKLKEVWKPAV

SEQ ID NO: 43432 - protein, 978 aa, synthetic construct
  REGION 1..978: note = engineered CasX variant
QEIKRINKIRRRLVKDSNTKKAGKTGPMKTLLVRVMTPDLRERLENLRKKPENIPQPISNTSRANLNKLLTDYTEMKKAILHVYWEEFQKDPVGLMSRVAQPASKKIDQNKLKPEMDEKGNLTTAGFACSQCGQPLFVYKLEQVSEKGKAYTNYFGRCNVAEHEKLILLAQLKPEKDSDEAVTYSLGKFGQRALDFYSIHVTKESTHPVKPLAQIAGNRYASYPVGKALSDACMGTIASFLSKYQDIIIEHQKVVKGNQKRLESLRELAGKENLEYPSVTLPPQPHTSEGVDAYNEVIARVRMWVNLNLWQKLKLSRDDAKPLLRLKGFPSFPLVERQANEVDWWDMVCNVKKLINEKKEDGKVFWQNLAGYKRQEALRPYLSSEEDRKKGKKFARYQLGDLLLHLEKKHPEDWGKVYDEAWERIDKKVEGLSKHIKLEEERRSEDAQSKAALTDWLRAKASFVIEGLKEADKDEFCRCELKLQKWYGDLRGKPFAIEAENSILDISGFSKQYNCAFIWQKDGVKKLNLYLIINYFKGGKLRFKKIKPEAFEANRFYTVINKKSGEIVPMEVNFNFDDPNLIILPLAFGKRQGREFIWNDLLSLETGSLKLANGRVIEKTLYNRRTRQDEPALFVALTFERREVLDSSNIKPMNLIGVDRGENIPAVIALTDPEGCPLSRFKDSLGNPTHILRIGESYKEKQRTIQAKKEVEQRRAGGYSRKYASKAKNLADDMVRNTARDLLYYAVTQDAMLIFENLSRGFGRQGKRTFMAERQYTRMEDWLTAKLAYEGLPSKTYLSKTLAQYTSKTCSNCGFTITSADYDRVLEKLKKTATGWMTTINGKELKVEGQITYYNRYKRQNVVKDLSVELDRLSEESVNNDISSWTKGRSGEALSLLKKRFSHRPVQEKFVCLNCGFETHADEQAALNIARSWLFLRSQEYKKYQTNKTTGNTDKRAFVETWQSFYRKKLKEVWKPAV

SEQ ID NO: 43433 - protein, 978 aa, synthetic construct
  REGION 1..978: note = engineered CasX variant
QEIKRINKIRRRLVKDSNTKKAGKTGPMKTLLVRVMTPDLRERLENLRKKPENIPQPISNTSRANLNKLLTDYTEMKKAILHVYWEEFQKDPVGLMSRVAQPASKKIDQNKLKPEMDEKGNLTTAGFACSQCGQPLFVYKLEQVSEKGKAYTNYFGRCNVAEHEKLILLAQLKPEKDSDEAVTYSLGKFGQRALDFYSIHVTKESTHPVKPLAQIAGNRYASHPVGKALSDACMGTIASFLSKYQDIIIEHQKVVKGNQKRLESLRELAGKENLEYPSVTLPPQPHTSEGVDAYNEVIARVRMWVNLNLWQKLKLSRDDAKPLLRLKGFPSFPLVERQANEVDWWDMVCNVKKLINEKKEDGKVFWQNLAGYKRQEALRPYLSSEEDRKKGKKFARYQLGDLLLHLEKKHPEDWGKVYDEAWERIDKKVEGLSKHIKLEEERRSEDAQSKAALTDWLRAKASFVIEGLKEADKDEFCRCELKLQKWYGDLRGKPFAIEAENSILDISGFSKQYNCAFIWQKDGVKKLNLYLIINYFKGGKLRFKKIKPEAFEANRFYTVINKKSGEIVPMEVNFNFDDPNLIILPLAFGKRQGREFIWNDLLSLETGSLKLANGRVIEKTLYNRRTRQDEPALFVALTFERREVLDSSNIKPMNLIGVDRGENIPAVIALTDPEGCPLSRFKDSLGNPTHILRIGESYKEKQRTIQAKKEVEQRRAGGYSRKYASKAKNLADDMVRNTARDLLYYAVTQDAMLIFENLSRGFGRQGKRTFMAERQYTRMEDWLTAKLAYEGLPSKTYLSKTLAQYTSKTCSNCGFTITSADYDRVLEKLKKTATGWMTTINGKELKVEGQITYYNRYKRQNVVKDLSVELDRLSEESVNNDISSWTKGRSGEALSLLKKRFSHRPVQEKFVCLNCGFETHADEQAALNIARSWLFLRSQEYKKYQTNKTTGNTDKRAFVETWQSFYRKKLKEVWKPAV

SEQ ID NO: 43434 - protein, 978 aa, synthetic construct
  REGION 1..978: note = engineered CasX variant
QEIKRINKIRRRLVKDSNTKKAGKTGPMKTLLVRVMTPDLRERLENLRKKPENIPQPISNTSRANLNKLLTDYTEMKKAILHVYWEEFQKDPVGLMSRVAQPASKKIDQNKLKPEMDEKGNLTTAGFACSQCGQPLFVYKLEQVSEKGKAYTNYFGRCNVAEHEKLILLAQLKPEKDSDEAVTYSLGKFGQRALDFYSIHVTKESTHPVKPLAQIAGNRYASSPVGKALSDACMGTIASFLSKYQDIIIEHQKVVKGNQKRLESLRELAGKENLEYPSVTLPPQPHTSEGVDAYNEVIARVRMWVNLNLWQKLKLSRDDAKPLLRLKGFPSFPLVERQANEVDWWDMVCNVKKLINEKKEDGKVFWQNLAGYKRQEALRPYLSSEEDRKKGKKFARYQLGDLLLHLEKKHPEDWGKVYDEAWERIDKKVEGLSKHIKLEEERRSEDAQSKAALTDWLRAKASFVIEGLKEADKDEFCRCELKLQKWYGDLRGKPFAIEAENSILDISGFSKQYNCAFIWQKDGVKKLNLYLIINYFKGGKLRFKKIKPEAFEANRFYTVINKKSGEIVPMEVNFNFDDPNLIILPLAFGKRQGREFIWNDLLSLETGSLKLANGRVIEKTLYNRRTRQDEPALFVALTFERREVLDSSNIKPMNLIGVDRGENIPAVIALTDPEGCPLSRFKDSLGNPTHILRIGESYKEKQRTIQAKKEVEQRRAGGYSRKYASKAKNLADDMVRNTARDLLYYAVTQDAMLIFENLSRGFGRQGKRTFMAERQYTRMEDWLTAKLAYEGLPSKTYLSKTLAQYTSKTCSNCGFTITSADYDRVLEKLKKTATGWMTTINGKELKVEGQITYYNRYKRQNVVKDLSVELDRLSEESVNNDISSWTKGRSGEALSLLKKRFSHRPVQEKFVCLNCGFETHADEQAALNIARSWLFLRSQEYKKYQTNKTTGNTDKRAFVETWQSFYRKKLKEVWKPAV

SEQ ID NO: 43435 - protein, 978 aa, synthetic construct
  REGION 1..978: note = engineered CasX variant
QEIKRINKIRRRLVKDSNTKKAGKTGPMKTLLVRVMTPDLRERLENLRKKPENIPQPISNTSRANLNKLLTDYTEMKKAILHVYWEEFQKDPVGLMSRVAQPASKKIDQNKLKPEMDEKGNLTTAGFACSQCGQPLFVYKLEQVSEKGKAYTNYFGRCNVAEHEKLILLAQLKPEKDSDEAVTYSLGKFGQRALDFYSIHVTKESTHPVKPLAQIAGNRYASTPVGKALSDACMGTIASFLSKYQDIIIEHQKVVKGNQKRLESLRELAGKENLEYPSVTLPPQPHTSEGVDAYNEVIARVRMWVNLNLWQKLKLSRDDAKPLLRLKGFPSFPLVERQANEVDWWDMVCNVKKLINEKKEDGKVFWQNLAGYKRQEALRPYLSSEEDRKKGKKFARYQLGDLLLHLEKKHPEDWGKVYDEAWERIDKKVEGLSKHIKLEEERRSEDAQSKAALTDWLRAKASFVIEGLKEADKDEFCRCELKLQKWYGDLRGKPFAIEAENSILDISGFSKQYNCAFIWQKDGVKKLNLYLIINYFKGGKLRFKKIKPEAFEANRFYTVINKKSGEIVPMEVNFNFDDPNLIILPLAFGKRQGREFIWNDLLSLETGSLKLANGRVIEKTLYNRRTRQDEPALFVALTFERREVLDSSNIKPMNLIGVDRGENIPAVIALTDPEGCPLSRFKDSLGNPTHILRIGESYKEKQRTIQAKKEVEQRRAGGYSRKYASKAKNLADDMVRNTARDLLYYAVTQDAMLIFENLSRGFGRQGKRTFMAERQYTRMEDWLTAKLAYEGLPSKTYLSKTLAQYTSKTCSNCGFTITSADYDRVLEKLKKTATGWMTTINGKELKVEGQITYYNRYKRQNVVKDLSVELDRLSEESVNNDISSWTKGRSGEALSLLKKRFSHRPVQEKFVCLNCGFETHADEQAALNIARSWLFLRSQEYKKYQTNKTTGNTDKRAFVETWQSFYRKKLKEVWKPAV

SEQ ID NO: 43436 - protein, 978 aa, synthetic construct
  REGION 1..978: note = engineered CasX variant
QEIKRINKIRRRLVKDSNTKKAGKTGPMKTLLVRVMTPDLRERLENLRKKPENIPQPISNTSRANLNKLLTDYTEMKKAILHVYWEEFQKDPVGLMSRVAQPASKKIDQNKLKPEMDEKGNLTTAGFACSQCGQPLFVYKLEQVSEKGKAYTNYFGRCNVAEHEKLILLAQLKPEKDSDEAVTYSLGKFGQRALDFYSIHVTKESTHPVKPLAQIAGNRYASAPVGKALSDACMGTIASFLSKYQDIIIEHQKVVKGNQKRLESLRELAGKENLEYPSVTLPPQPHTSEGVDAYNEVIARVRMWVNLNLWQKLKLSRDDAKPLLRLKGFPSFPLVERQANEVDWWDMVCNVKKLINEKKEDGKVFWQNLAGYKRQEALRPYLSSEEDRKKGKKFARYQLGDLLLHLEKKHPEDWGKVYDEAWERIDKKVEGLSKHIKLEEERRSEDAQSKAALTDWLRAKASFVIEGLKEADKDEFCRCELKLQKWYGDLRGKPFAIEAENSILDISGFSKQYNCAFIWQKDGVKKLNLYLIINYFKGGKLRFKKIKPEAFEANRFYTVINKKSGEIVPMEVNFNFDDPNLIILPLAFGKRQGREFIWNDLLSLETGSLKLANGRVIEKTLYNRRTRQDEPALFVALTFERREVLDSSNIKPMNLIGVDRGENIPAVIALTDPEGCPLSRFKDSLGNPTHILRIGESYKEKQRTIQAKKEVEQRRAGGYSRKYASKAKNLADDMVRNTARDLLYYAVTQDAMLIFENLSRGFGRQGKRTFMAERQYTRMEDWLTAKLAYEGLPSKTYLSKTLAQYTSKTCSNCGFTITSADYDRVLEKLKKTATGWMTTINGKELKVEGQITYYNRYKRQNVVKDLSVELDRLSEESVNNDISSWTKGRSGEALSLLKKRFSHRPVQEKFVCLNCGFETHADEQAALNIARSWLFLRSQEYKKYQTNKTTGNTDKRAFVETWQSFYRKKLKEVWKPAV

SEQ ID NO: 43437 - protein, 978 aa, synthetic construct
  REGION 1..978: note = engineered CasX variant
QEIKRINKIRRRLVKDSNTKKAGKTGPMKTLLVRVMTPDLRERLENLRKKPENIPQPISNTSRANLNKLLTDYTEMKKAILHVYWEEFQKDPVGLMSRVAQPASKKIDQNKLKPEMDEKGNLTTAGFACSQCGQPLFVYKLEQVSEKGKAYTNYFGRCNVAEHEKLILLAQLKPEKDSDEAVTYSLGKFGQRALDFYSIHVTKESTHPVKPLAQIAGNRYASVPVGKALSDACMGTIASFLSKYQDIIIEHQKVVKGNQKRLESLRELAGKENLEYPSVTLPPQPHTSEGVDAYNEVIARVRMWVNLNLWQKLKLSRDDAKPLLRLKGFPSFPLVERQANEVDWWDMVCNVKKLINEKKEDGKVFWQNLAGYKRQEALRPYLSSEEDRKKGKKFARYQLGDLLLHLEKKHPEDWGKVYDEAWERIDKKVEGLSKHIKLEEERRSEDAQSKAALTDWLRAKASFVIEGLKEADKDEFCRCELKLQKWYGDLRGKPFAIEAENSILDISGFSKQYNCAFIWQKDGVKKLNLYLIINYFKGGKLRFKKIKPEAFEANRFYTVINKKSGEIVPMEVNFNFDDPNLIILPLAFGKRQGREFIWNDLLSLETGSLKLANGRVIEKTLYNRRTRQDEPALFVALTFERREVLDSSNIKPMNLIGVDRGENIPAVIALTDPEGCPLSRFKDSLGNPTHILRIGESYKEKQRTIQAKKEVEQRRAGGYSRKYASKAKNLADDMVRNTARDLLYYAVTQDAMLIFENLSRGFGRQGKRTFMAERQYTRMEDWLTAKLAYEGLPSKTYLSKTLAQYTSKTCSNCGFTITSADYDRVLEKLKKTATGWMTTINGKELKVEGQITYYNRYKRQNVVKDLSVELDRLSEESVNNDISSWTKGRSGEALSLLKKRFSHRPVQEKFVCLNCGFETHADEQAALNIARSWLFLRSQEYKKYQTNKTTGNTDKRAFVETWQSFYRKKLKEVWKPAV

SEQ ID NO: 43438 - protein, 978 aa, synthetic construct
  REGION 1..978: note = engineered CasX variant
QEIKRINKIRRRLVKDSNTKKAGKTGPMKTLLVRVMTPDLRERLENLRKKPENIPQPISNTSRANLNKLLTDYTEMKKAILHVYWEEFQKDPVGLMSRVAQPASKKIDQNKLKPEMDEKGNLTTAGFACSQCGQPLFVYKLEQVSEKGKAYTNYFGRCNVAEHEKLIKLAQLKPEKDSDEAVTYSLGKFGQRALDFYSIHVTKESTHPVKPLAQIAGNRYASGPVGKALSDACMGTIASFLSKYQDIIIEHQKVVKGNQKRLESLRELAGKENLEYPSVTLPPQPHTSEGVDAYNEVIARVRMWVNLNLWQKLKLSRDDAKPLLRLKGFPSFPLVERQANEVDWWDMVCNVKKLINEKKEDGKVFWQNLAGYKRQEALRPYLSSEEDRKKGKKFARYQLGDLLLHLEKKHPEDWGKVYDEAWERIDKKVEGLSKHIKLEEERRSEDAQSKAALTDWLRAKASFVIEGLKEADKDEFCRCELKLQKWYGDLRGKPFAIEAENSILDISGFSKQYNCAFIWQKDGVKKLNLYLIINYFKGGKLRFKKIKPEAFEANRFYTVINKKSGEIVPMEVNFNFDDPNLIILPLAFGKRQGREFIWNDLLSLETGSLKLANGRVIEKTLYNRRTRQDEPALFVALTFERREVLDSSNIKPMNLIGVDRGENIPAVIALTDPEGCPLSRFKDSLGNPTHILRIGESYKEKQRTIQAKKEVEQRRAGGYSRKYASKAKNLADDMVRNTARDLLYYAVTQDAMLIFENLSRGFGRQGKRTFMAERQYTRMEDWLTAKLAYEGLPSKTYLSKTLAQYTSKTCSNCGFTITSADYDRVLEKLKKTATGWMTTINGKELKVEGQITYYNRYKRQNVVKDLSVELDRLSEESVNNDISSWTKGRSGEALSLLKKRFSHRPVQEKFVCLNCGFETHADEQAALNIARSWLFLRSQEYKKYQTNKTTGNTDKRAFVETWQSFYRKKLKEVWKPAV

SEQ ID NO: 43439 - protein, 977 aa, synthetic construct
  REGION 1..977: note = engineered CasX variant
QEIKRINKIRRRLVKDSNTKKAGKTGPMKTLLVRVMTPDLRERLENLRKKPENIPQPISNTSRANLNKLLTDYTEMKKAILHVYWEEFQKDPVGLMSRVAQPASKKIDQNKLKPEMDEKGNLTTAGFACSQCGQPLFVYKLEQVSEKGKAYTNYFGRCNVAEHEKLILLAQLKPEKDSDEAVTYSLGKFGQRALDFYSIHVTKESTHPVKPLAQIAGNRYASPVGKALSDACMGTIASFLSKYQDIIIEHQKVVKGNQKRLESLRELAGKENLEYPSVTLPPQPHTSEGVDAYNEVIARVRMWVNLNLWQKLKLSRDDAKPLLRLKGFPSFPLVERQANEVDWWDMVCNVKKLINEKKEDGKVFWQNLAGYKRQEALRPYLSSEEDRKKGKKFARYQLGDLLLHLEKKHPEDWGKVYDEAWERIDKKVEGLSKHIKLEEERRSEDAQSKAALTDWLRAKASFVIEGLKEADKDEFCRCELKLQKWYGDLRGKPFAIEAENSILDISGFSKQYNCAFIWQKDGVKKLNLYLIINYFKGGKLRFKKIKPEAFEANRFYTVINKKSGEIVPMEVNFNFDDPNLIILPLAFGKRQGREFIWNDLLSLETGSLKLANGRVIEKTLYNRRTRQDEPALFVALTFERREVLDSSNIKPMNLIGVDRGENIPAVIALTDPEGCPLSRFKDSLGNPTHILRIGESYKEKQRTIQAKKEVEQRRAGGYSRKYASKAKNLADDMVRNTARDLLYYAVTQDAMLIFENLSRGFGRQGKRTFMAERQYTRMEDWLTAKLAYEGLPSKTYLSKTLAQYTSKTCSNCGFTITSADYDRVLEKLKKTATGWMTTINGKELKVEGQITYYNRYKRQNVVKDLSVELDRLSEESVNNDISSWTKGRSGEALSLLKKRFSHRPVQEKFVCLNCGFETHADEQAALNIARSWLFLRSQEYKKYQTNKTTGNTDKRAFVETWQSFYRKKLKEVWKPAV

SEQ ID NO: 43440 - protein, 979 aa, synthetic construct
  REGION 1..979: note = engineered CasX variant
QEIKRINKIRRRLVKDSNTKKAGKTGPMKTLLVRVMTPDLRERLENLRKKPENIPQPISNTSRANLNKLLTDYTEMKKAILHVYWEEFQKDPVGLMSRVAQPASKKIDQNKLKPEMDEKGNLTTAGFACSQCGQPLFVYKLEQVSEKGKAYTNYFGRCNVAEHEKLILLAQLKPEKDSDEAVTYSLGKFGQRALDFYSIHVTKESTHPVKPLAQIAGNRYASYPVGKALSDACMGTIASFLSKYQDIIIEHQKVVKGNQKRLESLRELAGKENLEYPSVTLPPQPHTSEGVDAYNEVIARVRMWVNLNLWQKLKLSRDDAKPLLRLKGFPSFPLVERQANEVDWWDMVCNVKKLINEKKEDGKVFWQNLAGYKRQEALRPYLSSEEDRKKGKKFARYQLGDLLLHLEKKHGERDWGKVYDEAWERIDKKVEGLSKHIKLEEERRSEDAQSKAALTDWLRAKASFVIEGLKEADKDEFCRCELKLQKWYGDLRGKPFAIEAENSILDISGFSKQYNCAFIWQKDGVKKLNLYLIINYFKGGKLRFKKIKPEAFEANRFYTVINKKSGEIVPMEVNFNFDDPNLIILPLAFGKRQGREFIWNDLLSLETGSLKLANGRVIEKTLYNRRTRQDEPALFVALTFERREVLDSSNIKPMNLIGVDRGENIPAVIALTDPEGCPLSRFKDSLGNPTHILRIGESYKEKQRTIQAKKEVEQRRAGGYSRKYASKAKNLADDMVRNTARDLLYYAVTQDAMLIFENLSRGFGRQGKRTFMAERQYTRMEDWLTAKLAYEGLPSKTYLSKTLAQYTSKTCSNCGFTITSADYDRVLEKLKKTATGWMTTINGKELKVEGQITYYNRYKRQNVVKDLSVELDRLSEESVNNDISSWTKGRSGEALSLLKKRFSHRPVQEKFVCLNCGFETHADEQAALNIARSWLFLRSQEYKKYQTNKTTGNTDKRAFVETWQSFYRKKLKEVWKPAV

SEQ ID NO: 43441 - protein, 979 aa, synthetic construct
  REGION 1..979: note = engineered CasX variant
QEIKRINKIRRRLVKDSNTKKAGKTGPMKTLLVRVMTPDLRERLENLRKKPENIPQPISNTSRANLNKLLTDYTEMKKAILHVYWEEFQKDPVGLMSRVAQPASKKIDQNKLKPEMDEKGNLTTAGFACSQCGQPLFVYKLEQVSEKGKAYTNYFGRCNVAEHEKLILLAQLKPEKDSDEAVTYSLGKFGQRALDFYSIHVTKESTHPVKPLAQIAGNRYASHPVGKALSDACMGTIASFLSKYQDIIIEHQKVVKGNQKRLESLRELAGKENLEYPSVTLPPQPHTSEGVDAYNEVIARVRMWVNLNLWQKLKLSRDDAKPLLRLKGFPSFPLVERQANEVDWWDMVCNVKKLINEKKEDGKVFWQNLAGYKRQEALRPYLSSEEDRKKGKKFARYQLGDLLLHLEKKHGERDWGKVYDEAWERIDKKVEGLSKHIKLEEERRSEDAQSKAALTDWLRAKASFVIEGLKEADKDEFCRCELKLQKWYGDLRGKPFAIEAENSILDISGFSKQYNCAFIWQKDGVKKLNLYLIINYFKGGKLRFKKIKPEAFEANRFYTVINKKSGEIVPMEVNFNFDDPNLIILPLAFGKRQGREFIWNDLLSLETGSLKLANGRVIEKTLYNRRTRQDEPALFVALTFERREVLDSSNIKPMNLIGVDRGENIPAVIALTDPEGCPLSRFKDSLGNPTHILRIGESYKEKQRTIQAKKEVEQRRAGGYSRKYASKAKNLADDMVRNTARDLLYYAVTQDAMLIFENLSRGFGRQGKRTFMAERQYTRMEDWLTAKLAYEGLPSKTYLSKTLAQYTSKTCSNCGFTITSADYDRVLEKLKKTATGWMTTINGKELKVEGQITYYNRYKRQNVVKDLSVELDRLSEESVNNDISSWTKGRSGEALSLLKKRFSHRPVQEKFVCLNCGFETHADEQAALNIARSWLFLRSQEYKKYQTNKTTGNTDKRAFVETWQSFYRKKLKEVWKPAV

SEQ ID NO: 43442 - protein, 979 aa, synthetic construct
  REGION 1..979: note = engineered CasX variant
QEIKRINKIRRRLVKDSNTKKAGKTGPMKTLLVRVMTPDLRERLENLRKKPENIPQPISNTSRANLNKLLTDYTEMKKAILHVYWEEFQKDPVGLMSRVAQPASKKIDQNKLKPEMDEKGNLTTAGFACSQCGQPLFVYKLEQVSEKGKAYTNYFGRCNVAEHEKLILLAQLKPEKDSDEAVTYSLGKFGQRALDFYSIHVTKESTHPVKPLAQIAGNRYASSPVGKALSDACMGTIASFLSKYQDIIIEHQKVVKGNQKRLESLRELAGKENLEYPSVTLPPQPHTSEGVDAYNEVIARVRMWVNLNLWQKLKLSRDDAKPLLRLKGFPSFPLVERQANEVDWWDMVCNVKKLINEKKEDGKVFWQNLAGYKRQEALRPYLSSEEDRKKGKKFARYQLGDLLLHLEKKHGERDWGKVYDEAWERIDKKVEGLSKHIKLEEERRSEDAQSKAALTDWLRAKASFVIEGLKEADKDEFCRCELKLQKWYGDLRGKPFAIEAENSILDISGFSKQYNCAFIWQKDGVKKLNLYLIINYFKGGKLRFKKIKPEAFEANRFYTVINKKSGEIVPMEVNFNFDDPNLIILPLAFGKRQGREFIWNDLLSLETGSLKLANGRVIEKTLYNRRTRQDEPALFVALTFERREVLDSSNIKPMNLIGVDRGENIPAVIALTDPEGCPLSRFKDSLGNPTHILRIGESYKEKQRTIQAKKEVEQRRAGGYSRKYASKAKNLADDMVRNTARDLLYYAVTQDAMLIFENLSRGFGRQGKRTFMAERQYTRMEDWLTAKLAYEGLPSKTYLSKTLAQYTSKTCSNCGFTITSADYDRVLEKLKKTATGWMTTINGKELKVEGQITYYNRYKRQNVVKDLSVELDRLSEESVNNDISSWTKGRSGEALSLLKKRFSHRPVQEKFVCLNCGFETHADEQAALNIARSWLFLRSQEYKKYQTNKTTGNTDKRAFVETWQSFYRKKLKEVWKPAV

SEQ ID NO: 43443 - protein, 979 aa, synthetic construct
  REGION 1..979: note = engineered CasX variant
QEIKRINKIRRRLVKDSNTKKAGKTGPMKTLLVRVMTPDLRERLENLRKKPENIPQPISNTSRANLNKLLTDYTEMKKAILHVYWEEFQKDPVGLMSRVAQPASKKIDQNKLKPEMDEKGNLTTAGFACSQCGQPLFVYKLEQVSEKGKAYTNYFGRCNVAEHEKLILLAQLKPEKDSDEAVTYSLGKFGQRALDFYSIHVTKESTHPVKPLAQIAGNRYASTPVGKALSDACMGTIASFLSKYQDIIIEHQKVVKGNQKRLESLRELAGKENLEYPSVTLPPQPHTSEGVDAYNEVIARVRMWVNLNLWQKLKLSRDDAKPLLRLKGFPSFPLVERQANEVDWWDMVCNVKKLINEKKEDGKVFWQNLAGYKRQEALRPYLSSEEDRKKGKKFARYQLGDLLLHLEKKHGERDWGKVYDEAWERIDKKVEGLSKHIKLEEERRSEDAQSKAALTDWLRAKASFVIEGLKEADKDEFCRCELKLQKWYGDLRGKPFAIEAENSILDISGFSKQYNCAFIWQKDGVKKLNLYLIINYFKGGKLRFKKIKPEAFEANRFYTVINKKSGEIVPMEVNFNFDDPNLIILPLAFGKRQGREFIWNDLLSLETGSLKLANGRVIEKTLYNRRTRQDEPALFVALTFERREVLDSSNIKPMNLIGVDRGENIPAVIALTDPEGCPLSRFKDSLGNPTHILRIGESYKEKQRTIQAKKEVEQRRAGGYSRKYASKAKNLADDMVRNTARDLLYYAVTQDAMLIFENLSRGFGRQGKRTFMAERQYTRMEDWLTAKLAYEGLPSKTYLSKTLAQYTSKTCSNCGFTITSADYDRVLEKLKKTATGWMTTINGKELKVEGQITYYNRYKRQNVVKDLSVELDRLSEESVNNDISSWTKGRSGEALSLLKKRFSHRPVQEKFVCLNCGFETHADEQAALNIARSWLFLRSQEYKKYQTNKTTGNTDKRAFVETWQSFYRKKLKEVWKPAV

SEQ ID NO: 43444 - protein, 979 aa, synthetic construct
  REGION 1..979: note = engineered CasX variant
QEIKRINKIRRRLVKDSNTKKAGKTGPMKTLLVRVMTPDLRERLENLRKKPENIPQPISNTSRANLNKLLTDYTEMKKAILHVYWEEFQKDPVGLMSRVAQPASKKIDQNKLKPEMDEKGNLTTAGFACSQCGQPLFVYKLEQVSEKGKAYTNYFGRCNVAEHEKLILLAQLKPEKDSDEAVTYSLGKFGQRALDFYSIHVTKESTHPVKPLAQIAGNRYASAPVGKALSDACMGTIASFLSKYQDIIIEHQKVVKGNQKRLESLRELAGKENLEYPSVTLPPQPHTSEGVDAYNEVIARVRMWVNLNLWQKLKLSRDDAKPLLRLKGFPSFPLVERQANEVDWWDMVCNVKKLINEKKEDGKVFWQNLAGYKRQEALRPYLSSEEDRKKGKKFARYQLGDLLLHLEKKHGERDWGKVYDEAWERIDKKVEGLSKHIKLEEERRSEDAQSKAALTDWLRAKASFVIEGLKEADKDEFCRCELKLQKWYGDLRGKPFAIEAENSILDISGFSKQYNCAFIWQKDGVKKLNLYLIINYFKGGKLRFKKIKPEAFEANRFYTVINKKSGEIVPMEVNFNFDDPNLIILPLAFGKRQGREFIWNDLLSLETGSLKLANGRVIEKTLYNRRTRQDEPALFVALTFERREVLDSSNIKPMNLIGVDRGENIPAVIALTDPEGCPLSRFKDSLGNPTHILRIGESYKEKQRTIQAKKEVEQRRAGGYSRKYASKAKNLADDMVRNTARDLLYYAVTQDAMLIFENLSRGFGRQGKRTFMAERQYTRMEDWLTAKLAYEGLPSKTYLSKTLAQYTSKTCSNCGFTITSADYDRVLEKLKKTATGWMTTINGKELKVEGQITYYNRYKRQNVVKDLSVELDRLSEESVNNDISSWTKGRSGEALSLLKKRFSHRPVQEKFVCLNCGFETHADEQAALNIARSWLFLRSQEYKKYQTNKTTGNTDKRAFVETWQSFYRKKLKEVWKPAV

SEQ ID NO: 43445 - protein, 979 aa, synthetic construct
  REGION 1..979: note = engineered CasX variant
QEIKRINKIRRRLVKDSNTKKAGKTGPMKTLLVRVMTPDLRERLENLRKKPENIPQPISNTSRANLNKLLTDYTEMKKAILHVYWEEFQKDPVGLMSRVAQPASKKIDQNKLKPEMDEKGNLTTAGFACSQCGQPLFVYKLEQVSEKGKAYTNYFGRCNVAEHEKLILLAQLKPEKDSDEAVTYSLGKFGQRALDFYSIHVTKESTHPVKPLAQIAGNRYASVPVGKALSDACMGTIASFLSKYQDIIIEHQKVVKGNQKRLESLRELAGKENLEYPSVTLPPQPHTSEGVDAYNEVIARVRMWVNLNLWQKLKLSRDDAKPLLRLKGFPSFPLVERQANEVDWWDMVCNVKKLINEKKEDGKVFWQNLAGYKRQEALRPYLSSEEDRKKGKKFARYQLGDLLLHLEKKHGERDWGKVYDEAWERIDKKVEGLSKHIKLEEERRSEDAQSKAALTDWLRAKASFVIEGLKEADKDEFCRCELKLQKWYGDLRGKPFAIEAENSILDISGFSKQYNCAFIWQKDGVKKLNLYLIINYFKGGKLRFKKIKPEAFEANRFYTVINKKSGEIVPMEVNFNFDDPNLIILPLAFGKRQGREFIWNDLLSLETGSLKLANGRVIEKTLYNRRTRQDEPALFVALTFERREVLDSSNIKPMNLIGVDRGENIPAVIALTDPEGCPLSRFKDSLGNPTHILRIGESYKEKQRTIQAKKEVEQRRAGGYSRKYASKAKNLADDMVRNTARDLLYYAVTQDAMLIFENLSRGFGRQGKRTFMAERQYTRMEDWLTAKLAYEGLPSKTYLSKTLAQYTSKTCSNCGFTITSADYDRVLEKLKKTATGWMTTINGKELKVEGQITYYNRYKRQNVVKDLSVELDRLSEESVNNDISSWTKGRSGEALSLLKKRFSHRPVQEKFVCLNCGFETHADEQAALNIARSWLFLRSQEYKKYQTNKTTGNTDKRAFVETWQSFYRKKLKEVWKPAV

SEQ ID NO: 43446 - protein, 979 aa, synthetic construct
  REGION 1..979: note = engineered CasX variant
QEIKRINKIRRRLVKDSNTKKAGKTGPMKTLLVRVMTPDLRERLENLRKKPENIPQPISNTSRANLNKLLTDYTEMKKAILHVYWEEFQKDPVGLMSRVAQPASKKIDQNKLKPEMDEKGNLTTAGFACSQCGQPLFVYKLEQVSEKGKAYTNYFGRCNVAEHEKLIKLAQLKPEKDSDEAVTYSLGKFGQRALDFYSIHVTKESTHPVKPLAQIAGNRYASGPVGKALSDACMGTIASFLSKYQDIIIEHQKVVKGNQKRLESLRELAGKENLEYPSVTLPPQPHTSEGVDAYNEVIARVRMWVNLNLWQKLKLSRDDAKPLLRLKGFPSFPLVERQANEVDWWDMVCNVKKLINEKKEDGKVFWQNLAGYKRQEALRPYLSSEEDRKKGKKFARYQLGDLLLHLEKKHGERDWGKVYDEAWERIDKKVEGLSKHIKLEEERRSEDAQSKAALTDWLRAKASFVIEGLKEADKDEFCRCELKLQKWYGDLRGKPFAIEAENSILDISGFSKQYNCAFIWQKDGVKKLNLYLIINYFKGGKLRFKKIKPEAFEANRFYTVINKKSGEIVPMEVNFNFDDPNLIILPLAFGKRQGREFIWNDLLSLETGSLKLANGRVIEKTLYNRRTRQDEPALFVALTFERREVLDSSNIKPMNLIGVDRGENIPAVIALTDPEGCPLSRFKDSLGNPTHILRIGESYKEKQRTIQAKKEVEQRRAGGYSRKYASKAKNLADDMVRNTARDLLYYAVTQDAMLIFENLSRGFGRQGKRTFMAERQYTRMEDWLTAKLAYEGLPSKTYLSKTLAQYTSKTCSNCGFTITSADYDRVLEKLKKTATGWMTTINGKELKVEGQITYYNRYKRQNVVKDLSVELDRLSEESVNNDISSWTKGRSGEALSLLKKRFSHRPVQEKFVCLNCGFETHADEQAALNIARSWLFLRSQEYKKYQTNKTTGNTDKRAFVETWQSFYRKKLKEVWKPAV

SEQ ID NO: 43447 - protein, 978 aa, synthetic construct
  REGION 1..978: note = engineered CasX variant
QEIKRINKIRRRLVKDSNTKKAGKTGPMKTLLVRVMTPDLRERLENLRKKPENIPQPISNTSRANLNKLLTDYTEMKKAILHVYWEEFQKDPVGLMSRVAQPASKKIDQNKLKPEMDEKGNLTTAGFACSQCGQPLFVYKLEQVSEKGKAYTNYFGRCNVAEHEKLILLAQLKPEKDSDEAVTYSLGKFGQRALDFYSIHVTKESTHPVKPLAQIAGNRYASPVGKALSDACMGTIASFLSKYQDIIIEHQKVVKGNQKRLESLRELAGKENLEYPSVTLPPQPHTSEGVDAYNEVIARVRMWVNLNLWQKLKLSRDDAKPLLRLKGFPSFPLVERQANEVDWWDMVCNVKKLINEKKEDGKVFWQNLAGYKRQEALRPYLSSEEDRKKGKKFARYQLGDLLLHLEKKHGERDWGKVYDEAWERIDKKVEGLSKHIKLEEERRSEDAQSKAALTDWLRAKASFVIEGLKEADKDEFCRCELKLQKWYGDLRGKPFAIEAENSILDISGFSKQYNCAFIWQKDGVKKLNLYLIINYFKGGKLRFKKIKPEAFEANRFYTVINKKSGEIVPMEVNFNFDDPNLIILPLAFGKRQGREFIWNDLLSLETGSLKLANGRVIEKTLYNRRTRQDEPALFVALTFERREVLDSSNIKPMNLIGVDRGENIPAVIALTDPEGCPLSRFKDSLGNPTHILRIGESYKEKQRTIQAKKEVEQRRAGGYSRKYASKAKNLADDMVRNTARDLLYYAVTQDAMLIFENLSRGFGRQGKRTFMAERQYTRMEDWLTAKLAYEGLPSKTYLSKTLAQYTSKTCSNCGFTITSADYDRVLEKLKKTATGWMTTINGKELKVEGQITYYNRYKRQNVVKDLSVELDRLSEESVNNDISSWTKGRSGEALSLLKKRFSHRPVQEKFVCLNCGFETHADEQAALNIARSWLFLRSQEYKKYQTNKTTGNTDKRAFVETWQSFYRKKLKEVWKPAV

SEQ ID NO: 43448 - protein, 979 aa, synthetic construct
  REGION 1..979: note = engineered CasX variant
QEIKRINKIRRRLVKDSNTKKAGKTGPMKTLLVRVMTPDLRERLENLRKKPENIPQPISNTSRANLNKLLTDYTEMKKAILHVYWEEFQKDPVGLMSRVAQPASKKIDQNKLKPEMDEKGNLTTAGFACSQCGQPLFVYKLEQVSEKGKAYTNYFGRCNVAEHEKLILLAQLKPEKDSDEAVTYSLGKFGQRALDFYSIHVTKESTHPVKPLAQIAGNRYASYPVGKALSDACMGTIASFLSKYQDIIIEHQKVVKGNQKRLESLRELAGKENLEYPSVTLPPQPHTSEGVDAYNEVIARVRMWVNLNLWQKLKLSRDDAKPLLRLKGFPSFPLVERQANEVDWWDMVCNVKKLINEKKEDGKVFWQNLAGYKRQEALRPYLSSEEDRKKGKKFARYQLGDLLLHLEKKHGEYDWGKVYDEAWERIDKKVEGLSKHIKLEEERRSEDAQSKAALTDWLRAKASFVIEGLKEADKDEFCRCELKLQKWYGDLRGKPFAIEAENSILDISGFSKQYNCAFIWQKDGVKKLNLYLIINYFKGGKLRFKKIKPEAFEANRFYTVINKKSGEIVPMEVNFNFDDPNLIILPLAFGKRQGREFIWNDLLSLETGSLKLANGRVIEKTLYNRRTRQDEPALFVALTFERREVLDSSNIKPMNLIGVDRGENIPAVIALTDPEGCPLSRFKDSLGNPTHILRIGESYKEKQRTIQAKKEVEQRRAGGYSRKYASKAKNLADDMVRNTARDLLYYAVTQDAMLIFENLSRGFGRQGKRTFMAERQYTRMEDWLTAKLAYEGLPSKTYLSKTLAQYTSKTCSNCGFTITSADYDRVLEKLKKTATGWMTTINGKELKVEGQITYYNRYKRQNVVKDLSVELDRLSEESVNNDISSWTKGRSGEALSLLKKRFSHRPVQEKFVCLNCGFETHADEQAALNIARSWLFLRSQEYKKYQTNKTTGNTDKRAFVETWQSFYRKKLKEVWKPAV

SEQ ID NO: 43449 - protein, 979 aa, synthetic construct
  REGION 1..979: note = engineered CasX variant
QEIKRINKIRRRLVKDSNTKKAGKTGPMKTLLVRVMTPDLRERLENLRKKPENIPQPISNTSRANLNKLLTDYTEMKKAILHVYWEEFQKDPVGLMSRVAQPASKKIDQNKLKPEMDEKGNLTTAGFACSQCGQPLFVYKLEQVSEKGKAYTNYFGRCNVAEHEKLILLAQLKPEKDSDEAVTYSLGKFGQRALDFYSIHVTKESTHPVKPLAQIAGNRYASHPVGKALSDACMGTIASFLSKYQDIIIEHQKVVKGNQKRLESLRELAGKENLEYPSVTLPPQPHTSEGVDAYNEVIARVRMWVNLNLWQKLKLSRDDAKPLLRLKGFPSFPLVERQANEVDWWDMVCNVKKLINEKKEDGKVFWQNLAGYKRQEALRPYLSSEEDRKKGKKFARYQLGDLLLHLEKKHGEYDWGKVYDEAWERIDKKVEGLSKHIKLEEERRSEDAQSKAALTDWLRAKASFVIEGLKEADKDEFCRCELKLQKWYGDLRGKPFAIEAENSILDISGFSKQYNCAFIWQKDGVKKLNLYLIINYFKGGKLRFKKIKPEAFEANRFYTVINKKSGEIVPMEVNFNFDDPNLIILPLAFGKRQGREFIWNDLLSLETGSLKLANGRVIEKTLYNRRTRQDEPALFVALTFERREVLDSSNIKPMNLIGVDRGENIPAVIALTDPEGCPLSRFKDSLGNPTHILRIGESYKEKQRTIQAKKEVEQRRAGGYSRKYASKAKNLADDMVRNTARDLLYYAVTQDAMLIFENLSRGFGRQGKRTFMAERQYTRMEDWLTAKLAYEGLPSKTYLSKTLAQYTSKTCSNCGFTITSADYDRVLEKLKKTATGWMTTINGKELKVEGQITYYNRYKRQNVVKDLSVELDRLSEESVNNDISSWTKGRSGEALSLLKKRFSHRPVQEKFVCLNCGFETHADEQAALNIARSWLFLRSQEYKKYQTNKTTGNTDKRAFVETWQSFYRKKLKEVWKPAV

SEQ ID NO: 43450 - protein, 979 aa, synthetic construct
  REGION 1..979: note = engineered CasX variant
QEIKRINKIRRRLVKDSNTKKAGKTGPMKTLLVRVMTPDLRERLENLRKKPENIPQPISNTSRANLNKLLTDYTEMKKAILHVYWEEFQKDPVGLMSRVAQPASKKIDQNKLKPEMDEKGNLTTAGFACSQCGQPLFVYKLEQVSEKGKAYTNYFGRCNVAEHEKLILLAQLKPEKDSDEAVTYSLGKFGQRALDFYSIHVTKESTHPVKPLAQIAGNRYASSPVGKALSDACMGTIASFLSKYQDIIIEHQKVVKGNQKRLESLRELAGKENLEYPSVTLPPQPHTSEGVDAYNEVIARVRMWVNLNLWQKLKLSRDDAKPLLRLKGFPSFPLVERQANEVDWWDMVCNVKKLINEKKEDGKVFWQNLAGYKRQEALRPYLSSEEDRKKGKKFARYQLGDLLLHLEKKHGEYDWGKVYDEAWERIDKKVEGLSKHIKLEEERRSEDAQSKAALTDWLRAKASFVIEGLKEADKDEFCRCELKLQKWYGDLRGKPFAIEAENSILDISGFSKQYNCAFIWQKDGVKKLNLYLIINYFKGGKLRFKKIKPEAFEANRFYTVINKKSGEIVPMEVNFNFDDPNLIILPLAFGKRQGREFIWNDLLSLETGSLKLANGRVIEKTLYNRRTRQDEPALFVALTFERREVLDSSNIKPMNLIGVDRGENIPAVIALTDPEGCPLSRFKDSLGNPTHILRIGESYKEKQRTIQAKKEVEQRRAGGYSRKYASKAKNLADDMVRNTARDLLYYAVTQDAMLIFENLSRGFGRQGKRTFMAERQYTRMEDWLTAKLAYEGLPSKTYLSKTLAQYTSKTCSNCGFTITSADYDRVLEKLKKTATGWMTTINGKELKVEGQITYYNRYKRQNVVKDLSVELDRLSEESVNNDISSWTKGRSGEALSLLKKRFSHRPVQEKFVCLNCGFETHADEQAALNIARSWLFLRSQEYKKYQTNKTTGNTDKRAFVETWQSFYRKKLKEVWKPAV

SEQ ID NO: 43451 - protein, 979 aa, synthetic construct
  REGION 1..979: note = engineered CasX variant
QEIKRINKIRRRLVKDSNTKKAGKTGPMKTLLVRVMTPDLRERLENLRKKPENIPQPISNTSRANLNKLLTDYTEMKKAILHVYWEEFQKDPVGLMSRVAQPASKKIDQNKLKPEMDEKGNLTTAGFACSQCGQPLFVYKLEQVSEKGKAYTNYFGRCNVAEHEKLILLAQLKPEKDSDEAVTYSLGKFGQRALDFYSIHVTKESTHPVKPLAQIAGNRYASTPVGKALSDACMGTIASFLSKYQDIIIEHQKVVKGNQKRLESLRELAGKENLEYPSVTLPPQPHTSEGVDAYNEVIARVRMWVNLNLWQKLKLSRDDAKPLLRLKGFPSFPLVERQANEVDWWDMVCNVKKLINEKKEDGKVFWQNLAGYKRQEALRPYLSSEEDRKKGKKFARYQLGDLLLHLEKKHGEYDWGKVYDEAWERIDKKVEGLSKHIKLEEERRSEDAQSKAALTDWLRAKASFVIEGLKEADKDEFCRCELKLQKWYGDLRGKPFAIEAENSILDISGFSKQYNCAFIWQKDGVKKLNLYLIINYFKGGKLRFKKIKPEAFEANRFYTVINKKSGEIVPMEVNFNFDDPNLIILPLAFGKRQGREFIWNDLLSLETGSLKLANGRVIEKTLYNRRTRQDEPALFVALTFERREVLDSSNIKPMNLIGVDRGENIPAVIALTDPEGCPLSRFKDSLGNPTHILRIGESYKEKQRTIQAKKEVEQRRAGGYSRKYASKAKNLADDMVRNTARDLLYYAVTQDAMLIFENLSRGFGRQGKRTFMAERQYTRMEDWLTAKLAYEGLPSKTYLSKTLAQYTSKTCSNCGFTITSADYDRVLEKLKKTATGWMTTINGKELKVEGQITYYNRYKRQNVVKDLSVELDRLSEESVNNDISSWTKGRSGEALSLLKKRFSHRPVQEKFVCLNCGFETHADEQAALNIARSWLFLRSQEYKKYQTNKTTGNTDKRAFVETWQSFYRKKLKEVWKPAV

SEQ ID NO: 43452 - protein, 979 aa, synthetic construct
  REGION 1..979: note = engineered CasX variant
QEIKRINKIRRRLVKDSNTKKAGKTGPMKTLLVRVMTPDLRERLENLRKKPENIPQPISNTSRANLNKLLTDYTEMKKAILHVYWEEFQKDPVGLMSRVAQPASKKIDQNKLKPEMDEKGNLTTAGFACSQCGQPLFVYKLEQVSEKGKAYTNYFGRCNVAEHEKLILLAQLKPEKDSDEAVTYSLGKFGQRALDFYSIHVTKESTHPVKPLAQIAGNRYASAPVGKALSDACMGTIASFLSKYQDIIIEHQKVVKGNQKRLESLRELAGKENLEYPSVTLPPQPHTSEGVDAYNEVIARVRMWVNLNLWQKLKLSRDDAKPLLRLKGFPSFPLVERQANEVDWWDMVCNVKKLINEKKEDGKVFWQNLAGYKRQEALRPYLSSEEDRKKGKKFARYQLGDLLLHLEKKHGEYDWGKVYDEAWERIDKKVEGLSKHIKLEEERRSEDAQSKAALTDWLRAKASFVIEGLKEADKDEFCRCELKLQKWYGDLRGKPFAIEAENSILDISGFSKQYNCAFIWQKDGVKKLNLYLIINYFKGGKLRFKKIKPEAFEANRFYTVINKKSGEIVPMEVNFNFDDPNLIILPLAFGKRQGREFIWNDLLSLETGSLKLANGRVIEKTLYNRRTRQDEPALFVALTFERREVLDSSNIKPMNLIGVDRGENIPAVIALTDPEGCPLSRFKDSLGNPTHILRIGESYKEKQRTIQAKKEVEQRRAGGYSRKYASKAKNLADDMVRNTARDLLYYAVTQDAMLIFENLSRGFGRQGKRTFMAERQYTRMEDWLTAKLAYEGLPSKTYLSKTLAQYTSKTCSNCGFTITSADYDRVLEKLKKTATGWMTTINGKELKVEGQITYYNRYKRQNVVKDLSVELDRLSEESVNNDISSWTKGRSGEALSLLKKRFSHRPVQEKFVCLNCGFETHADEQAALNIARSWLFLRSQEYKKYQTNKTTGNTDKRAFVETWQSFYRKKLKEVWKPAV

SEQ ID NO: 43453 - protein, 979 aa, synthetic construct
  REGION 1..979: note = engineered CasX variant
QEIKRINKIRRRLVKDSNTKKAGKTGPMKTLLVRVMTPDLRERLENLRKKPENIPQPISNTSRANLNKLLTDYTEMKKAILHVYWEEFQKDPVGLMSRVAQPASKKIDQNKLKPEMDEKGNLTTAGFACSQCGQPLFVYKLEQVSEKGKAYTNYFGRCNVAEHEKLILLAQLKPEKDSDEAVTYSLGKFGQRALDFYSIHVTKESTHPVKPLAQIAGNRYASVPVGKALSDACMGTIASFLSKYQDIIIEHQKVVKGNQKRLESLRELAGKENLEYPSVTLPPQPHTSEGVDAYNEVIARVRMWVNLNLWQKLKLSRDDAKPLLRLKGFPSFPLVERQANEVDWWDMVCNVKKLINEKKEDGKVFWQNLAGYKRQEALRPYLSSEEDRKKGKKFARYQLGDLLLHLEKKHGEYDWGKVYDEAWERIDKKVEGLSKHIKLEEERRSEDAQSKAALTDWLRAKASFVIEGLKEADKDEFCRCELKLQKWYGDLRGKPFAIEAENSILDISGFSKQYNCAFIWQKDGVKKLNLYLIINYFKGGKLRFKKIKPEAFEANRFYTVINKKSGEIVPMEVNFNFDDPNLIILPLAFGKRQGREFIWNDLLSLETGSLKLANGRVIEKTLYNRRTRQDEPALFVALTFERREVLDSSNIKPMNLIGVDRGENIPAVIALTDPEGCPLSRFKDSLGNPTHILRIGESYKEKQRTIQAKKEVEQRRAGGYSRKYASKAKNLADDMVRNTARDLLYYAVTQDAMLIFENLSRGFGRQGKRTFMAERQYTRMEDWLTAKLAYEGLPSKTYLSKTLAQYTSKTCSNCGFTITSADYDRVLEKLKKTATGWMTTINGKELKVEGQITYYNRYKRQNVVKDLSVELDRLSEESVNNDISSWTKGRSGEALSLLKKRFSHRPVQEKFVCLNCGFETHADEQAALNIARSWLFLRSQEYKKYQTNKTTGNTDKRAFVETWQSFYRKKLKEVWKPAV

SEQ ID NO: 43454 - protein, 979 aa, synthetic construct
  REGION 1..979: note = engineered CasX variant
QEIKRINKIRRRLVKDSNTKKAGKTGPMKTLLVRVMTPDLRERLENLRKKPENIPQPISNTSRANLNKLLTDYTEMKKAILHVYWEEFQKDPVGLMSRVAQPASKKIDQNKLKPEMDEKGNLTTAGFACSQCGQPLFVYKLEQVSEKGKAYTNYFGRCNVAEHEKLIKLAQLKPEKDSDEAVTYSLGKFGQRALDFYSIHVTKESTHPVKPLAQIAGNRYASGPVGKALSDACMGTIASFLSKYQDIIIEHQKVVKGNQKRLESLRELAGKENLEYPSVTLPPQPHTSEGVDAYNEVIARVRMWVNLNLWQKLKLSRDDAKPLLRLKGFPSFPLVERQANEVDWWDMVCNVKKLINEKKEDGKVFWQNLAGYKRQEALRPYLSSEEDRKKGKKFARYQLGDLLLHLEKKHGEYDWGKVYDEAWERIDKKVEGLSKHIKLEEERRSEDAQSKAALTDWLRAKASFVIEGLKEADKDEFCRCELKLQKWYGDLRGKPFAIEAENSILDISGFSKQYNCAFIWQKDGVKKLNLYLIINYFKGGKLRFKKIKPEAFEANRFYTVINKKSGEIVPMEVNFNFDDPNLIILPLAFGKRQGREFIWNDLLSLETGSLKLANGRVIEKTLYNRRTRQDEPALFVALTFERREVLDSSNIKPMNLIGVDRGENIPAVIALTDPEGCPLSRFKDSLGNPTHILRIGESYKEKQRTIQAKKEVEQRRAGGYSRKYASKAKNLADDMVRNTARDLLYYAVTQDAMLIFENLSRGFGRQGKRTFMAERQYTRMEDWLTAKLAYEGLPSKTYLSKTLAQYTSKTCSNCGFTITSADYDRVLEKLKKTATGWMTTINGKELKVEGQITYYNRYKRQNVVKDLSVELDRLSEESVNNDISSWTKGRSGEALSLLKKRFSHRPVQEKFVCLNCGFETHADEQAALNIARSWLFLRSQEYKKYQTNKTTGNTDKRAFVETWQSFYRKKLKEVWKPAV

SEQ ID NO: 43455 - protein, 978 aa, synthetic construct
  REGION 1..978: note = engineered CasX variant
QEIKRINKIRRRLVKDSNTKKAGKTGPMKTLLVRVMTPDLRERLENLRKKPENIPQPISNTSRANLNKLLTDYTEMKKAILHVYWEEFQKDPVGLMSRVAQPASKKIDQNKLKPEMDEKGNLTTAGFACSQCGQPLFVYKLEQVSEKGKAYTNYFGRCNVAEHEKLILLAQLKPEKDSDEAVTYSLGKFGQRALDFYSIHVTKESTHPVKPLAQIAGNRYASPVGKALSDACMGTIASFLSKYQDIIIEHQKVVKGNQKRLESLRELAGKENLEYPSVTLPPQPHTSEGVDAYNEVIARVRMWVNLNLWQKLKLSRDDAKPLLRLKGFPSFPLVERQANEVDWWDMVCNVKKLINEKKEDGKVFWQNLAGYKRQEALRPYLSSEEDRKKGKKFARYQLGDLLLHLEKKHGEYDWGKVYDEAWERIDKKVEGLSKHIKLEEERRSEDAQSKAALTDWLRAKASFVIEGLKEADKDEFCRCELKLQKWYGDLRGKPFAIEAENSILDISGFSKQYNCAFIWQKDGVKKLNLYLIINYFKGGKLRFKKIKPEAFEANRFYTVINKKSGEIVPMEVNFNFDDPNLIILPLAFGKRQGREFIWNDLLSLETGSLKLANGRVIEKTLYNRRTRQDEPALFVALTFERREVLDSSNIKPMNLIGVDRGENIPAVIALTDPEGCPLSRFKDSLGNPTHILRIGESYKEKQRTIQAKKEVEQRRAGGYSRKYASKAKNLADDMVRNTARDLLYYAVTQDAMLIFENLSRGFGRQGKRTFMAERQYTRMEDWLTAKLAYEGLPSKTYLSKTLAQYTSKTCSNCGFTITSADYDRVLEKLKKTATGWMTTINGKELKVEGQITYYNRYKRQNVVKDLSVELDRLSEESVNNDISSWTKGRSGEALSLLKKRFSHRPVQEKFVCLNCGFETHADEQAALNIARSWLFLRSQEYKKYQTNKTTGNTDKRAFVETWQSFYRKKLKEVWKPAV

SEQ ID NO: 43456 - protein, 978 aa, synthetic construct
  REGION 1..978: note = engineered CasX variant
QEIKRINKIRRRLVKDSNTKKAGKTGPMKTLLVRVMTPDLRERLENLRKKPENIPQPISNTSRANLNKLLTDYTEMKKAILHVYWEEFQKDPVGLMSRVAQPASKKIDQNKLKPEMDEKGNLTTAGFACSQCGQPLFVYKLEQVSEKGKAYTNYFGRCNVAEHEKLILLAQLKPEKDSDEAVTYSLGKFGQRALDFYSIHVTKESTHPVKPLAQIAGNRYASYPVGKALSDACMGTIASFLSKYQDIIIEHQKVVKGNQKRLESLRELAGKENLEYPSVTLPPQPHTSEGVDAYNEVIARVRMWVNLNLWQKLKLSRDDAKPLLRLKGFPSFPLVERQANEVDWWDMVCNVKKLINEKKEDGKVFWQNLAGYKRQEALRPYLSSEEDRKKGKKFARYQLGDLLLHLEKKHGEDWGDVYDEAWERIDKKVEGLSKHIKLEEERRSEDAQSKAALTDWLRAKASFVIEGLKEADKDEFCRCELKLQKWYGDLRGKPFAIEAENSILDISGFSKQYNCAFIWQKDGVKKLNLYLIINYFKGGKLRFKKIKPEAFEANRFYTVINKKSGEIVPMEVNFNFDDPNLIILPLAFGKRQGREFIWNDLLSLETGSLKLANGRVIEKTLYNRRTRQDEPALFVALTFERREVLDSSNIKPMNLIGVDRGENIPAVIALTDPEGCPLSRFKDSLGNPTHILRIGESYKEKQRTIQAKKEVEQRRAGGYSRKYASKAKNLADDMVRNTARDLLYYAVTQDAMLIFENLSRGFGRQGKRTFMAERQYTRMEDWLTAKLAYEGLPSKTYLSKTLAQYTSKTCSNCGFTITSADYDRVLEKLKKTATGWMTTINGKELKVEGQITYYNRYKRQNVVKDLSVELDRLSEESVNNDISSWTKGRSGEALSLLKKRFSHRPVQEKFVCLNCGFETHADEQAALNIARSWLFLRSQEYKKYQTNKTTGNTDKRAFVETWQSFYRKKLKEVWKPAV

SEQ ID NO: 43457 - protein, 978 aa, synthetic construct
  REGION 1..978: note = engineered CasX variant
QEIKRINKIRRRLVKDSNTKKAGKTGPMKTLLVRVMTPDLRERLENLRKKPENIPQPISNTSRANLNKLLTDYTEMKKAILHVYWEEFQKDPVGLMSRVAQPASKKIDQNKLKPEMDEKGNLTTAGFACSQCGQPLFVYKLEQVSEKGKAYTNYFGRCNVAEHEKLILLAQLKPEKDSDEAVTYSLGKFGQRALDFYSIHVTKESTHPVKPLAQIAGNRYASHPVGKALSDACMGTIASFLSKYQDIIIEHQKVVKGNQKRLESLRELAGKENLEYPSVTLPPQPHTSEGVDAYNEVIARVRMWVNLNLWQKLKLSRDDAKPLLRLKGFPSFPLVERQANEVDWWDMVCNVKKLINEKKEDGKVFWQNLAGYKRQEALRPYLSSEEDRKKGKKFARYQLGDLLLHLEKKHGEDWGDVYDEAWERIDKKVEGLSKHIKLEEERRSEDAQSKAALTDWLRAKASFVIEGLKEADKDEFCRCELKLQKWYGDLRGKPFAIEAENSILDISGFSKQYNCAFIWQKDGVKKLNLYLIINYFKGGKLRFKKIKPEAFEANRFYTVINKKSGEIVPMEVNFNFDDPNLIILPLAFGKRQGREFIWNDLLSLETGSLKLANGRVIEKTLYNRRTRQDEPALFVALTFERREVLDSSNIKPMNLIGVDRGENIPAVIALTDPEGCPLSRFKDSLGNPTHILRIGESYKEKQRTIQAKKEVEQRRAGGYSRKYASKAKNLADDMVRNTARDLLYYAVTQDAMLIFENLSRGFGRQGKRTFMAERQYTRMEDWLTAKLAYEGLPSKTYLSKTLAQYTSKTCSNCGFTITSADYDRVLEKLKKTATGWMTTINGKELKVEGQITYYNRYKRQNVVKDLSVELDRLSEESVNNDISSWTKGRSGEALSLLKKRFSHRPVQEKFVCLNCGFETHADEQAALNIARSWLFLRSQEYKKYQTNKTTGNTDKRAFVETWQSFYRKKLKEVWKPAV

SEQ ID NO: 43458 - protein, 978 aa, synthetic construct
  REGION 1..978: note = engineered CasX variant
QEIKRINKIRRRLVKDSNTKKAGKTGPMKTLLVRVMTPDLRERLENLRKKPENIPQPISNTSRANLNKLLTDYTEMKKAILHVYWEEFQKDPVGLMSRVAQPASKKIDQNKLKPEMDEKGNLTTAGFACSQCGQPLFVYKLEQVSEKGKAYTNYFGRCNVAEHEKLILLAQLKPEKDSDEAVTYSLGKFGQRALDFYSIHVTKESTHPVKPLAQIAGNRYASSPVGKALSDACMGTIASFLSKYQDIIIEHQKVVKGNQKRLESLRELAGKENLEYPSVTLPPQPHTSEGVDAYNEVIARVRMWVNLNLWQKLKLSRDDAKPLLRLKGFPSFPLVERQANEVDWWDMVCNVKKLINEKKEDGKVFWQNLAGYKRQEALRPYLSSEEDRKKGKKFARYQLGDLLLHLEKKHGEDWGDVYDEAWERIDKKVEGLSKHIKLEEERRSEDAQSKAALTDWLRAKASFVIEGLKEADKDEFCRCELKLQKWYGDLRGKPFAIEAENSILDISGFSKQYNCAFIWQKDGVKKLNLYLIINYFKGGKLRFKKIKPEAFEANRFYTVINKKSGEIVPMEVNFNFDDPNLIILPLAFGKRQGREFIWNDLLSLETGSLKLANGRVIEKTLYNRRTRQDEPALFVALTFERREVLDSSNIKPMNLIGVDRGENIPAVIALTDPEGCPLSRFKDSLGNPTHILRIGESYKEKQRTIQAKKEVEQRRAGGYSRKYASKAKNLADDMVRNTARDLLYYAVTQDAMLIFENLSRGFGRQGKRTFMAERQYTRMEDWLTAKLAYEGLPSKTYLSKTLAQYTSKTCSNCGFTITSADYDRVLEKLKKTATGWMTTINGKELKVEGQITYYNRYKRQNVVKDLSVELDRLSEESVNNDISSWTKGRSGEALSLLKKRFSHRPVQEKFVCLNCGFETHADEQAALNIARSWLFLRSQEYKKYQTNKTTGNTDKRAFVETWQSFYRKKLKEVWKPAV

SEQ ID NO: 43459 - protein, 978 aa, synthetic construct
  REGION 1..978: note = engineered CasX variant
QEIKRINKIRRRLVKDSNTKKAGKTGPMKTLLVRVMTPDLRERLENLRKKPENIPQPISNTSRANLNKLLTDYTEMKKAILHVYWEEFQKDPVGLMSRVAQPASKKIDQNKLKPEMDEKGNLTTAGFACSQCGQPLFVYKLEQVSEKGKAYTNYFGRCNVAEHEKLILLAQLKPEKDSDEAVTYSLGKFGQRALDFYSIHVTKESTHPVKPLAQIAGNRYASTPVGKALSDACMGTIASFLSKYQDIIIEHQKVVKGNQKRLESLRELAGKENLEYPSVTLPPQPHTSEGVDAYNEVIARVRMWVNLNLWQKLKLSRDDAKPLLRLKGFPSFPLVERQANEVDWWDMVCNVKKLINEKKEDGKVFWQNLAGYKRQEALRPYLSSEEDRKKGKKFARYQLGDLLLHLEKKHGEDWGDVYDEAWERIDKKVEGLSKHIKLEEERRSEDAQSKAALTDWLRAKASFVIEGLKEADKDEFCRCELKLQKWYGDLRGKPFAIEAENSILDISGFSKQYNCAFIWQKDGVKKLNLYLIINYFKGGKLRFKKIKPEAFEANRFYTVINKKSGEIVPMEVNFNFDDPNLIILPLAFGKRQGREFIWNDLLSLETGSLKLANGRVIEKTLYNRRTRQDEPALFVALTFERREVLDSSNIKPMNLIGVDRGENIPAVIALTDPEGCPLSRFKDSLGNPTHILRIGESYKEKQRTIQAKKEVEQRRAGGYSRKYASKAKNLADDMVRNTARDLLYYAVTQDAMLIFENLSRGFGRQGKRTFMAERQYTRMEDWLTAKLAYEGLPSKTYLSKTLAQYTSKTCSNCGFTITSADYDRVLEKLKKTATGWMTTINGKELKVEGQITYYNRYKRQNVVKDLSVELDRLSEESVNNDISSWTKGRSGEALSLLKKRFSHRPVQEKFVCLNCGFETHADEQAALNIARSWLFLRSQEYKKYQTNKTTGNTDKRAFVETWQSFYRKKLKEVWKPAV

SEQ ID NO: 43460 - protein, 978 aa, synthetic construct
  REGION 1..978: note = engineered CasX variant
QEIKRINKIRRRLVKDSNTKKAGKTGPMKTLLVRVMTPDLRERLENLRKKPENIPQPISNTSRANLNKLLTDYTEMKKAILHVYWEEFQKDPVGLMSRVAQPASKKIDQNKLKPEMDEKGNLTTAGFACSQCGQPLFVYKLEQVSEKGKAYTNYFGRCNVAEHEKLILLAQLKPEKDSDEAVTYSLGKFGQRALDFYSIHVTKESTHPVKPLAQIAGNRYASAPVGKALSDACMGTIASFLSKYQDIIIEHQKVVKGNQKRLESLRELAGKENLEYPSVTLPPQPHTSEGVDAYNEVIARVRMWVNLNLWQKLKLSRDDAKPLLRLKGFPSFPLVERQANEVDWWDMVCNVKKLINEKKEDGKVFWQNLAGYKRQEALRPYLSSEEDRKKGKKFARYQLGDLLLHLEKKHGEDWGDVYDEAWERIDKKVEGLSKHIKLEEERRSEDAQSKAALTDWLRAKASFVIEGLKEADKDEFCRCELKLQKWYGDLRGKPFAIEAENSILDISGFSKQYNCAFIWQKDGVKKLNLYLIINYFKGGKLRFKKIKPEAFEANRFYTVINKKSGEIVPMEVNFNFDDPNLIILPLAFGKRQGREFIWNDLLSLETGSLKLANGRVIEKTLYNRRTRQDEPALFVALTFERREVLDSSNIKPMNLIGVDRGENIPAVIALTDPEGCPLSRFKDSLGNPTHILRIGESYKEKQRTIQAKKEVEQRRAGGYSRKYASKAKNLADDMVRNTARDLLYYAVTQDAMLIFENLSRGFGRQGKRTFMAERQYTRMEDWLTAKLAYEGLPSKTYLSKTLAQYTSKTCSNCGFTITSADYDRVLEKLKKTATGWMTTINGKELKVEGQITYYNRYKRQNVVKDLSVELDRLSEESVNNDISSWTKGRSGEALSLLKKRFSHRPVQEKFVCLNCGFETHADEQAALNIARSWLFLRSQEYKKYQTNKTTGNTDKRAFVETWQSFYRKKLKEVWKPAV

SEQ ID NO: 43461 - protein, 978 aa, synthetic construct
  REGION 1..978: note = engineered CasX variant
QEIKRINKIRRRLVKDSNTKKAGKTGPMKTLLVRVMTPDLRERLENLRKKPENIPQPISNTSRANLNKLLTDYTEMKKAILHVYWEEFQKDPVGLMSRVAQPASKKIDQNKLKPEMDEKGNLTTAGFACSQCGQPLFVYKLEQVSEKGKAYTNYFGRCNVAEHEKLILLAQLKPEKDSDEAVTYSLGKFGQRALDFYSIHVTKESTHPVKPLAQIAGNRYASVPVGKALSDACMGTIASFLSKYQDIIIEHQKVVKGNQKRLESLRELAGKENLEYPSVTLPPQPHTSEGVDAYNEVIARVRMWVNLNLWQKLKLSRDDAKPLLRLKGFPSFPLVERQANEVDWWDMVCNVKKLINEKKEDGKVFWQNLAGYKRQEALRPYLSSEEDRKKGKKFARYQLGDLLLHLEKKHGEDWGDVYDEAWERIDKKVEGLSKHIKLEEERRSEDAQSKAALTDWLRAKASFVIEGLKEADKDEFCRCELKLQKWYGDLRGKPFAIEAENSILDISGFSKQYNCAFIWQKDGVKKLNLYLIINYFKGGKLRFKKIKPEAFEANRFYTVINKKSGEIVPMEVNFNFDDPNLIILPLAFGKRQGREFIWNDLLSLETGSLKLANGRVIEKTLYNRRTRQDEPALFVALTFERREVLDSSNIKPMNLIGVDRGENIPAVIALTDPEGCPLSRFKDSLGNPTHILRIGESYKEKQRTIQAKKEVEQRRAGGYSRKYASKAKNLADDMVRNTARDLLYYAVTQDAMLIFENLSRGFGRQGKRTFMAERQYTRMEDWLTAKLAYEGLPSKTYLSKTLAQYTSKTCSNCGFTITSADYDRVLEKLKKTATGWMTTINGKELKVEGQITYYNRYKRQNVVKDLSVELDRLSEESVNNDISSWTKGRSGEALSLLKKRFSHRPVQEKFVCLNCGFETHADEQAALNIARSWLFLRSQEYKKYQTNKTTGNTDKRAFVETWQSFYRKKLKEVWKPAV

SEQ ID NO: 43462 - protein, 978 aa, synthetic construct
  REGION 1..978: note = engineered CasX variant
QEIKRINKIRRRLVKDSNTKKAGKTGPMKTLLVRVMTPDLRERLENLRKKPENIPQPISNTSRANLNKLLTDYTEMKKAILHVYWEEFQKDPVGLMSRVAQPASKKIDQNKLKPEMDEKGNLTTAGFACSQCGQPLFVYKLEQVSEKGKAYTNYFGRCNVAEHEKLIKLAQLKPEKDSDEAVTYSLGKFGQRALDFYSIHVTKESTHPVKPLAQIAGNRYASGPVGKALSDACMGTIASFLSKYQDIIIEHQKVVKGNQKRLESLRELAGKENLEYPSVTLPPQPHTSEGVDAYNEVIARVRMWVNLNLWQKLKLSRDDAKPLLRLKGFPSFPLVERQANEVDWWDMVCNVKKLINEKKEDGKVFWQNLAGYKRQEALRPYLSSEEDRKKGKKFARYQLGDLLLHLEKKHGEDWGDVYDEAWERIDKKVEGLSKHIKLEEERRSEDAQSKAALTDWLRAKASFVIEGLKEADKDEFCRCELKLQKWYGDLRGKPFAIEAENSILDISGFSKQYNCAFIWQKDGVKKLNLYLIINYFKGGKLRFKKIKPEAFEANRFYTVINKKSGEIVPMEVNFNFDDPNLIILPLAFGKRQGREFIWNDLLSLETGSLKLANGRVIEKTLYNRRTRQDEPALFVALTFERREVLDSSNIKPMNLIGVDRGENIPAVIALTDPEGCPLSRFKDSLGNPTHILRIGESYKEKQRTIQAKKEVEQRRAGGYSRKYASKAKNLADDMVRNTARDLLYYAVTQDAMLIFENLSRGFGRQGKRTFMAERQYTRMEDWLTAKLAYEGLPSKTYLSKTLAQYTSKTCSNCGFTITSADYDRVLEKLKKTATGWMTTINGKELKVEGQITYYNRYKRQNVVKDLSVELDRLSEESVNNDISSWTKGRSGEALSLLKKRFSHRPVQEKFVCLNCGFETHADEQAALNIARSWLFLRSQEYKKYQTNKTTGNTDKRAFVETWQSFYRKKLKEVWKPAV

SEQ ID NO: 43463 - protein, 977 aa, synthetic construct
  REGION 1..977: note = engineered CasX variant
QEIKRINKIRRRLVKDSNTKKAGKTGPMKTLLVRVMTPDLRERLENLRKKPENIPQPISNTSRANLNKLLTDYTEMKKAILHVYWEEFQKDPVGLMSRVAQPASKKIDQNKLKPEMDEKGNLTTAGFACSQCGQPLFVYKLEQVSEKGKAYTNYFGRCNVAEHEKLILLAQLKPEKDSDEAVTYSLGKFGQRALDFYSIHVTKESTHPVKPLAQIAGNRYASPVGKALSDACMGTIASFLSKYQDIIIEHQKVVKGNQKRLESLRELAGKENLEYPSVTLPPQPHTSEGVDAYNEVIARVRMWVNLNLWQKLKLSRDDAKPLLRLKGFPSFPLVERQANEVDWWDMVCNVKKLINEKKEDGKVFWQNLAGYKRQEALRPYLSSEEDRKKGKKFARYQLGDLLLHLEKKHGEDWGDVYDEAWERIDKKVEGLSKHIKLEEERRSEDAQSKAALTDWLRAKASFVIEGLKEADKDEFCRCELKLQKWYGDLRGKPFAIEAENSILDISGFSKQYNCAFIWQKDGVKKLNLYLIINYFKGGKLRFKKIKPEAFEANRFYTVINKKSGEIVPMEVNFNFDDPNLIILPLAFGKRQGREFIWNDLLSLETGSLKLANGRVIEKTLYNRRTRQDEPALFVALTFERREVLDSSNIKPMNLIGVDRGENIPAVIALTDPEGCPLSRFKDSLGNPTHILRIGESYKEKQRTIQAKKEVEQRRAGGYSRKYASKAKNLADDMVRNTARDLLYYAVTQDAMLIFENLSRGFGRQGKRTFMAERQYTRMEDWLTAKLAYEGLPSKTYLSKTLAQYTSKTCSNCGFTITSADYDRVLEKLKKTATGWMTTINGKELKVEGQITYYNRYKRQNVVKDLSVELDRLSEESVNNDISSWTKGRSGEALSLLKKRFSHRPVQEKFVCLNCGFETHADEQAALNIARSWLFLRSQEYKKYQTNKTTGNTDKRAFVETWQSFYRKKLKEVWKPAV

SEQ ID NO: 43464 - protein, 978 aa, synthetic construct
  REGION 1..978: note = engineered CasX variant
QEIKRINKIRRRLVKDSNTKKAGKTGPMKTLLVRVMTPDLRERLENLRKKPENIPQPISNTSRANLNKLLTDYTEMKKAILHVYWEEFQKDPVGLMSRVAQPASKKIDQNKLKPEMDEKGNLTTAGFACSQCGQPLFVYKLEQVSEKGKAYTNYFGRCNVAEHEKLILLAQLKPEKDSDEAVTYSLGKFGQRALDFYSIHVTKESTHPVKPLAQIAGNRYASYPVGKALSDACMGTIASFLSKYQDIIIEHQKVVKGNQKRLESLRELAGKENLEYPSVTLPPQPHTSEGVDAYNEVIARVRMWVNLNLWQKLKLSRDDAKPLLRLKGFPSFPLVERQANEVDWWDMVCNVKKLINEKKEDGKVFWQNLAGYKRQEALRPYLSSEEDRKKGKKFARYQLGDLLLHLEKKHGEDWGKVYGEAWERIDKKVEGLSKHIKLEEERRSEDAQSKAALTDWLRAKASFVIEGLKEADKDEFCRCELKLQKWYGDLRGKPFAIEAENSILDISGFSKQYNCAFIWQKDGVKKLNLYLIINYFKGGKLRFKKIKPEAFEANRFYTVINKKSGEIVPMEVNFNFDDPNLIILPLAFGKRQGREFIWNDLLSLETGSLKLANGRVIEKTLYNRRTRQDEPALFVALTFERREVLDSSNIKPMNLIGVDRGENIPAVIALTDPEGCPLSRFKDSLGNPTHILRIGESYKEKQRTIQAKKEVEQRRAGGYSRKYASKAKNLADDMVRNTARDLLYYAVTQDAMLIFENLSRGFGRQGKRTFMAERQYTRMEDWLTAKLAYEGLPSKTYLSKTLAQYTSKTCSNCGFTITSADYDRVLEKLKKTATGWMTTINGKELKVEGQITYYNRYKRQNVVKDLSVELDRLSEESVNNDISSWTKGRSGEALSLLKKRFSHRPVQEKFVCLNCGFETHADEQAALNIARSWLFLRSQEYKKYQTNKTTGNTDKRAFVETWQSFYRKKLKEVWKPAV

SEQ ID NO: 43465 - protein, 978 aa, synthetic construct
  REGION 1..978: note = engineered CasX variant
QEIKRINKIRRRLVKDSNTKKAGKTGPMKTLLVRVMTPDLRERLENLRKKPENIPQPISNTSRANLNKLLTDYTEMKKAILHVYWEEFQKDPVGLMSRVAQPASKKIDQNKLKPEMDEKGNLTTAGFACSQCGQPLFVYKLEQVSEKGKAYTNYFGRCNVAEHEKLILLAQLKPEKDSDEAVTYSLGKFGQRALDFYSIHVTKESTHPVKPLAQIAGNRYASHPVGKALSDACMGTIASFLSKYQDIIIEHQKVVKGNQKRLESLRELAGKENLEYPSVTLPPQPHTSEGVDAYNEVIARVRMWVNLNLWQKLKLSRDDAKPLLRLKGFPSFPLVERQANEVDWWDMVCNVKKLINEKKEDGKVFWQNLAGYKRQEALRPYLSSEEDRKKGKKFARYQLGDLLLHLEKKHGEDWGKVYGEAWERIDKKVEGLSKHIKLEEERRSEDAQSKAALTDWLRAKASFVIEGLKEADKDEFCRCELKLQKWYGDLRGKPFAIEAENSILDISGFSKQYNCAFIWQKDGVKKLNLYLIINYFKGGKLRFKKIKPEAFEANRFYTVINKKSGEIVPMEVNFNFDDPNLIILPLAFGKRQGREFIWNDLLSLETGSLKLANGRVIEKTLYNRRTRQDEPALFVALTFERREVLDSSNIKPMNLIGVDRGENIPAVIALTDPEGCPLSRFKDSLGNPTHILRIGESYKEKQRTIQAKKEVEQRRAGGYSRKYASKAKNLADDMVRNTARDLLYYAVTQDAMLIFENLSRGFGRQGKRTFMAERQYTRMEDWLTAKLAYEGLPSKTYLSKTLAQYTSKTCSNCGFTITSADYDRVLEKLKKTATGWMTTINGKELKVEGQITYYNRYKRQNVVKDLSVELDRLSEESVNNDISSWTKGRSGEALSLLKKRFSHRPVQEKFVCLNCGFETHADEQAALNIARSWLFLRSQEYKKYQTNKTTGNTDKRAFVETWQSFYRKKLKEVWKPAV

SEQ ID NO: 43466 - protein, 978 aa, synthetic construct
  REGION 1..978: note = engineered CasX variant
QEIKRINKIRRRLVKDSNTKKAGKTGPMKTLLVRVMTPDLRERLENLRKKPENIPQPISNTSRANLNKLLTDYTEMKKAILHVYWEEFQKDPVGLMSRVAQPASKKIDQNKLKPEMDEKGNLTTAGFACSQCGQPLFVYKLEQVSEKGKAYTNYFGRCNVAEHEKLILLAQLKPEKDSDEAVTYSLGKFGQRALDFYSIHVTKESTHPVKPLAQIAGNRYASSPVGKALSDACMGTIASFLSKYQDIIIEHQKVVKGNQKRLESLRELAGKENLEYPSVTLPPQPHTSEGVDAYNEVIARVRMWVNLNLWQKLKLSRDDAKPLLRLKGFPSFPLVERQANEVDWWDMVCNVKKLINEKKEDGKVFWQNLAGYKRQEALRPYLSSEEDRKKGKKFARYQLGDLLLHLEKKHGEDWGKVYGEAWERIDKKVEGLSKHIKLEEERRSEDAQSKAALTDWLRAKASFVIEGLKEADKDEFCRCELKLQKWYGDLRGKPFAIEAENSILDISGFSKQYNCAFIWQKDGVKKLNLYLIINYFKGGKLRFKKIKPEAFEANRFYTVINKKSGEIVPMEVNFNFDDPNLIILPLAFGKRQGREFIWNDLLSLETGSLKLANGRVIEKTLYNRRTRQDEPALFVALTFERREVLDSSNIKPMNLIGVDRGENIPAVIALTDPEGCPLSRFKDSLGNPTHILRIGESYKEKQRTIQAKKEVEQRRAGGYSRKYASKAKNLADDMVRNTARDLLYYAVTQDAMLIFENLSRGFGRQGKRTFMAERQYTRMEDWLTAKLAYEGLPSKTYLSKTLAQYTSKTCSNCGFTITSADYDRVLEKLKKTATGWMTTINGKELKVEGQITYYNRYKRQNVVKDLSVELDRLSEESVNNDISSWTKGRSGEALSLLKKRFSHRPVQEKFVCLNCGFETHADEQAALNIARSWLFLRSQEYKKYQTNKTTGNTDKRAFVETWQSFYRKKLKEVWKPAV

SEQ ID NO: 43467 - protein, 978 aa, synthetic construct
  REGION 1..978: note = engineered CasX variant
QEIKRINKIRRRLVKDSNTKKAGKTGPMKTLLVRVMTPDLRERLENLRKKPENIPQPISNTSRANLNKLLTDYTEMKKAILHVYWEEFQKDPVGLMSRVAQPASKKIDQNKLKPEMDEKGNLTTAGFACSQCGQPLFVYKLEQVSEKGKAYTNYFGRCNVAEHEKLILLAQLKPEKDSDEAVTYSLGKFGQRALDFYSIHVTKESTHPVKPLAQIAGNRYASTPVGKALSDACMGTIASFLSKYQDIIIEHQKVVKGNQKRLESLRELAGKENLEYPSVTLPPQPHTSEGVDAYNEVIARVRMWVNLNLWQKLKLSRDDAKPLLRLKGFPSFPLVERQANEVDWWDMVCNVKKLINEKKEDGKVFWQNLAGYKRQEALRPYLSSEEDRKKGKKFARYQLGDLLLHLEKKHGEDWGKVYGEAWERIDKKVEGLSKHIKLEEERRSEDAQSKAALTDWLRAKASFVIEGLKEADKDEFCRCELKLQKWYGDLRGKPFAIEAENSILDISGFSKQYNCAFIWQKDGVKKLNLYLIINYFKGGKLRFKKIKPEAFEANRFYTVINKKSGEIVPMEVNFNFDDPNLIILPLAFGKRQGREFIWNDLLSLETGSLKLANGRVIEKTLYNRRTRQDEPALFVALTFERREVLDSSNIKPMNLIGVDRGENIPAVIALTDPEGCPLSRFKDSLGNPTHILRIGESYKEKQRTIQAKKEVEQRRAGGYSRKYASKAKNLADDMVRNTARDLLYYAVTQDAMLIFENLSRGFGRQGKRTFMAERQYTRMEDWLTAKLAYEGLPSKTYLSKTLAQYTSKTCSNCGFTITSADYDRVLEKLKKTATGWMTTINGKELKVEGQITYYNRYKRQNVVKDLSVELDRLSEESVNNDISSWTKGRSGEALSLLKKRFSHRPVQEKFVCLNCGFETHADEQAALNIARSWLFLRSQEYKKYQTNKTTGNTDKRAFVETWQSFYRKKLKEVWKPAV

SEQ ID NO: 43468 - protein, 978 aa, synthetic construct
  REGION 1..978: note = engineered CasX variant
QEIKRINKIRRRLVKDSNTKKAGKTGPMKTLLVRVMTPDLRERLENLRKKPENIPQPISNTSRANLNKLLTDYTEMKKAILHVYWEEFQKDPVGLMSRVAQPASKKIDQNKLKPEMDEKGNLTTAGFACSQCGQPLFVYKLEQVSEKGKAYTNYFGRCNVAEHEKLILLAQLKPEKDSDEAVTYSLGKFGQRALDFYSIHVTKESTHPVKPLAQIAGNRYASAPVGKALSDACMGTIASFLSKYQDIIIEHQKVVKGNQKRLESLRELAGKENLEYPSVTLPPQPHTSEGVDAYNEVIARVRMWVNLNLWQKLKLSRDDAKPLLRLKGFPSFPLVERQANEVDWWDMVCNVKKLINEKKEDGKVFWQNLAGYKRQEALRPYLSSEEDRKKGKKFARYQLGDLLLHLEKKHGEDWGKVYGEAWERIDKKVEGLSKHIKLEEERRSEDAQSKAALTDWLRAKASFVIEGLKEADKDEFCRCELKLQKWYGDLRGKPFAIEAENSILDISGFSKQYNCAFIWQKDGVKKLNLYLIINYFKGGKLRFKKIKPEAFEANRFYTVINKKSGEIVPMEVNFNFDDPNLIILPLAFGKRQGREFIWNDLLSLETGSLKLANGRVIEKTLYNRRTRQDEPALFVALTFERREVLDSSNIKPMNLIGVDRGENIPAVIALTDPEGCPLSRFKDSLGNPTHILRIGESYKEKQRTIQAKKEVEQRRAGGYSRKYASKAKNLADDMVRNTARDLLYYAVTQDAMLIFENLSRGFGRQGKRTFMAERQYTRMEDWLTAKLAYEGLPSKTYLSKTLAQYTSKTCSNCGFTITSADYDRVLEKLKKTATGWMTTINGKELKVEGQITYYNRYKRQNVVKDLSVELDRLSEESVNNDISSWTKGRSGEALSLLKKRFSHRPVQEKFVCLNCGFETHADEQAALNIARSWLFLRSQEYKKYQTNKTTGNTDKRAFVETWQSFYRKKLKEVWKPAV

SEQ ID NO: 43469 - protein, 978 aa, synthetic construct
  REGION 1..978: note = engineered CasX variant
QEIKRINKIRRRLVKDSNTKKAGKTGPMKTLLVRVMTPDLRERLENLRKKPENIPQPISNTSRANLNKLLTDYTEMKKAILHVYWEEFQKDPVGLMSRVAQPASKKIDQNKLKPEMDEKGNLTTAGFACSQCGQPLFVYKLEQVSEKGKAYTNYFGRCNVAEHEKLILLAQLKPEKDSDEAVTYSLGKFGQRALDFYSIHVTKESTHPVKPLAQIAGNRYASVPVGKALSDACMGTIASFLSKYQDIIIEHQKVVKGNQKRLESLRELAGKENLEYPSVTLPPQPHTSEGVDAYNEVIARVRMWVNLNLWQKLKLSRDDAKPLLRLKGFPSFPLVERQANEVDWWDMVCNVKKLINEKKEDGKVFWQNLAGYKRQEALRPYLSSEEDRKKGKKFARYQLGDLLLHLEKKHGEDWGKVYGEAWERIDKKVEGLSKHIKLEEERRSEDAQSKAALTDWLRAKASFVIEGLKEADKDEFCRCELKLQKWYGDLRGKPFAIEAENSILDISGFSKQYNCAFIWQKDGVKKLNLYLIINYFKGGKLRFKKIKPEAFEANRFYTVINKKSGEIVPMEVNFNFDDPNLIILPLAFGKRQGREFIWNDLLSLETGSLKLANGRVIEKTLYNRRTRQDEPALFVALTFERREVLDSSNIKPMNLIGVDRGENIPAVIALTDPEGCPLSRFKDSLGNPTHILRIGESYKEKQRTIQAKKEVEQRRAGGYSRKYASKAKNLADDMVRNTARDLLYYAVTQDAMLIFENLSRGFGRQGKRTFMAERQYTRMEDWLTAKLAYEGLPSKTYLSKTLAQYTSKTCSNCGFTITSADYDRVLEKLKKTATGWMTTINGKELKVEGQITYYNRYKRQNVVKDLSVELDRLSEESVNNDISSWTKGRSGEALSLLKKRFSHRPVQEKFVCLNCGFETHADEQAALNIARSWLFLRSQEYKKYQTNKTTGNTDKRAFVETWQSFYRKKLKEVWKPAV

SEQ ID NO: 43470 - protein, 978 aa, synthetic construct
  REGION 1..978: note = engineered CasX variant
QEIKRINKIRRRLVKDSNTKKAGKTGPMKTLLVRVMTPDLRERLENLRKKPENIPQPISNTSRANLNKLLTDYTEMKKAILHVYWEEFQKDPVGLMSRVAQPASKKIDQNKLKPEMDEKGNLTTAGFACSQCGQPLFVYKLEQVSEKGKAYTNYFGRCNVAEHEKLIKLAQLKPEKDSDEAVTYSLGKFGQRALDFYSIHVTKESTHPVKPLAQIAGNRYASGPVGKALSDACMGTIASFLSKYQDIIIEHQKVVKGNQKRLESLRELAGKENLEYPSVTLPPQPHTSEGVDAYNEVIARVRMWVNLNLWQKLKLSRDDAKPLLRLKGFPSFPLVERQANEVDWWDMVCNVKKLINEKKEDGKVFWQNLAGYKRQEALRPYLSSEEDRKKGKKFARYQLGDLLLHLEKKHGEDWGKVYGEAWERIDKKVEGLSKHIKLEEERRSEDAQSKAALTDWLRAKASFVIEGLKEADKDEFCRCELKLQKWYGDLRGKPFAIEAENSILDISGFSKQYNCAFIWQKDGVKKLNLYLIINYFKGGKLRFKKIKPEAFEANRFYTVINKKSGEIVPMEVNFNFDDPNLIILPLAFGKRQGREFIWNDLLSLETGSLKLANGRVIEKTLYNRRTRQDEPALFVALTFERREVLDSSNIKPMNLIGVDRGENIPAVIALTDPEGCPLSRFKDSLGNPTHILRIGESYKEKQRTIQAKKEVEQRRAGGYSRKYASKAKNLADDMVRNTARDLLYYAVTQDAMLIFENLSRGFGRQGKRTFMAERQYTRMEDWLTAKLAYEGLPSKTYLSKTLAQYTSKTCSNCGFTITSADYDRVLEKLKKTATGWMTTINGKELKVEGQITYYNRYKRQNVVKDLSVELDRLSEESVNNDISSWTKGRSGEALSLLKKRFSHRPVQEKFVCLNCGFETHADEQAALNIARSWLFLRSQEYKKYQTNKTTGNTDKRAFVETWQSFYRKKLKEVWKPAV

SEQ ID NO: 43471 - protein, 977 aa, synthetic construct
  REGION 1..977: note = engineered CasX variant
QEIKRINKIRRRLVKDSNTKKAGKTGPMKTLLVRVMTPDLRERLENLRKKPENIPQPISNTSRANLNKLLTDYTEMKKAILHVYWEEFQKDPVGLMSRVAQPASKKIDQNKLKPEMDEKGNLTTAGFACSQCGQPLFVYKLEQVSEKGKAYTNYFGRCNVAEHEKLILLAQLKPEKDSDEAVTYSLGKFGQRALDFYSIHVTKESTHPVKPLAQIAGNRYASPVGKALSDACMGTIASFLSKYQDIIIEHQKVVKGNQKRLESLRELAGKENLEYPSVTLPPQPHTSEGVDAYNEVIARVRMWVNLNLWQKLKLSRDDAKPLLRLKGFPSFPLVERQANEVDWWDMVCNVKKLINEKKEDGKVFWQNLAGYKRQEALRPYLSSEEDRKKGKKFARYQLGDLLLHLEKKHGEDWGKVYGEAWERIDKKVEGLSKHIKLEEERRSEDAQSKAALTDWLRAKASFVIEGLKEADKDEFCRCELKLQKWYGDLRGKPFAIEAENSILDISGFSKQYNCAFIWQKDGVKKLNLYLIINYFKGGKLRFKKIKPEAFEANRFYTVINKKSGEIVPMEVNFNFDDPNLIILPLAFGKRQGREFIWNDLLSLETGSLKLANGRVIEKTLYNRRTRQDEPALFVALTFERREVLDSSNIKPMNLIGVDRGENIPAVIALTDPEGCPLSRFKDSLGNPTHILRIGESYKEKQRTIQAKKEVEQRRAGGYSRKYASKAKNLADDMVRNTARDLLYYAVTQDAMLIFENLSRGFGRQGKRTFMAERQYTRMEDWLTAKLAYEGLPSKTYLSKTLAQYTSKTCSNCGFTITSADYDRVLEKLKKTATGWMTTINGKELKVEGQITYYNRYKRQNVVKDLSVELDRLSEESVNNDISSWTKGRSGEALSLLKKRFSHRPVQEKFVCLNCGFETHADEQAALNIARSWLFLRSQEYKKYQTNKTTGNTDKRAFVETWQSFYRKKLKEVWKPAV

SEQ ID NO: 43472 - protein, 978 aa, synthetic construct
  REGION 1..978: note = engineered CasX variant
QEIKRINKIRRRLVKDSNTKKAGKTGPMKTLLVRVMTPDLRERLENLRKKPENIPQPISNTSRANLNKLLTDYTEMKKAILHVYWEEFQKDPVGLMSRVAQPASKKIDQNKLKPEMDEKGNLTTAGFACSQCGQPLFVYKLEQVSEKGKAYTNYFGRCNVAEHEKLILLAQLKPEKDSDEAVTYSLGKFGQRALDFYSIHVTKESTHPVKPLAQIAGNRYASYPVGKALSDACMGTIASFLSKYQDIIIEHQKVVKGNQKRLESLRELAGKENLEYPSVTLPPQPHTSEGVDAYNEVIARVRMWVNLNLWQKLKLSRDDAKPLLRLKGFPSFPLVERQANEVDWWDMVCNVKKLINEKKEDGKVFWQNLAGYKRQEALRPYLSSEEDRKKGKKFARYQLGDLLLHLEKKHGEDWGKVYDEAWERIDKKVEGLSKHIKLEEERRSEDAQSKAALTDWLRAKASFVIEGKKEADKDEFCRCELKLQKWYGDLRGKPFAIEAENSILDISGFSKQYNCAFIWQKDGVKKLNLYLIINYFKGGKLRFKKIKPEAFEANRFYTVINKKSGEIVPMEVNFNFDDPNLIILPLAFGKRQGREFIWNDLLSLETGSLKLANGRVIEKTLYNRRTRQDEPALFVALTFERREVLDSSNIKPMNLIGVDRGENIPAVIALTDPEGCPLSRFKDSLGNPTHILRIGESYKEKQRTIQAKKEVEQRRAGGYSRKYASKAKNLADDMVRNTARDLLYYAVTQDAMLIFENLSRGFGRQGKRTFMAERQYTRMEDWLTAKLAYEGLPSKTYLSKTLAQYTSKTCSNCGFTITSADYDRVLEKLKKTATGWMTTINGKELKVEGQITYYNRYKRQNVVKDLSVELDRLSEESVNNDISSWTKGRSGEALSLLKKRFSHRPVQEKFVCLNCGFETHADEQAALNIARSWLFLRSQEYKKYQTNKTTGNTDKRAFVETWQSFYRKKLKEVWKPAV

SEQ ID NO: 43473 - protein, 978 aa, synthetic construct
  REGION 1..978: note = engineered CasX variant
QEIKRINKIRRRLVKDSNTKKAGKTGPMKTLLVRVMTPDLRERLENLRKKPENIPQPISNTSRANLNKLLTDYTEMKKAILHVYWEEFQKDPVGLMSRVAQPASKKIDQNKLKPEMDEKGNLTTAGFACSQCGQPLFVYKLEQVSEKGKAYTNYFGRCNVAEHEKLILLAQLKPEKDSDEAVTYSLGKFGQRALDFYSIHVTKESTHPVKPLAQIAGNRYASHPVGKALSDACMGTIASFLSKYQDIIIEHQKVVKGNQKRLESLRELAGKENLEYPSVTLPPQPHTSEGVDAYNEVIARVRMWVNLNLWQKLKLSRDDAKPLLRLKGFPSFPLVERQANEVDWWDMVCNVKKLINEKKEDGKVFWQNLAGYKRQEALRPYLSSEEDRKKGKKFARYQLGDLLLHLEKKHGEDWGKVYDEAWERIDKKVEGLSKHIKLEEERRSEDAQSKAALTDWLRAKASFVIEGKKEADKDEFCRCELKLQKWYGDLRGKPFAIEAENSILDISGFSKQYNCAFIWQKDGVKKLNLYLIINYFKGGKLRFKKIKPEAFEANRFYTVINKKSGEIVPMEVNFNFDDPNLIILPLAFGKRQGREFIWNDLLSLETGSLKLANGRVIEKTLYNRRTRQDEPALFVALTFERREVLDSSNIKPMNLIGVDRGENIPAVIALTDPEGCPLSRFKDSLGNPTHILRIGESYKEKQRTIQAKKEVEQRRAGGYSRKYASKAKNLADDMVRNTARDLLYYAVTQDAMLIFENLSRGFGRQGKRTFMAERQYTRMEDWLTAKLAYEGLPSKTYLSKTLAQYTSKTCSNCGFTITSADYDRVLEKLKKTATGWMTTINGKELKVEGQITYYNRYKRQNVVKDLSVELDRLSEESVNNDISSWTKGRSGEALSLLKKRFSHRPVQEKFVCLNCGFETHADEQAALNIARSWLFLRSQEYKKYQTNKTTGNTDKRAFVETWQSFYRKKLKEVWKPAV

SEQ ID NO: 43474 - protein, 978 aa, synthetic construct
  REGION 1..978: note = engineered CasX variant
QEIKRINKIRRRLVKDSNTKKAGKTGPMKTLLVRVMTPDLRERLENLRKKPENIPQPISNTSRANLNKLLTDYTEMKKAILHVYWEEFQKDPVGLMSRVAQPASKKIDQNKLKPEMDEKGNLTTAGFACSQCGQPLFVYKLEQVSEKGKAYTNYFGRCNVAEHEKLILLAQLKPEKDSDEAVTYSLGKFGQRALDFYSIHVTKESTHPVKPLAQIAGNRYASSPVGKALSDACMGTIASFLSKYQDIIIEHQKVVKGNQKRLESLRELAGKENLEYPSVTLPPQPHTSEGVDAYNEVIARVRMWVNLNLWQKLKLSRDDAKPLLRLKGFPSFPLVERQANEVDWWDMVCNVKKLINEKKEDGKVFWQNLAGYKRQEALRPYLSSEEDRKKGKKFARYQLGDLLLHLEKKHGEDWGKVYDEAWERIDKKVEGLSKHIKLEEERRSEDAQSKAALTDWLRAKASFVIEGKKEADKDEFCRCELKLQKWYGDLRGKPFAIEAENSILDISGFSKQYNCAFIWQKDGVKKLNLYLIINYFKGGKLRFKKIKPEAFEANRFYTVINKKSGEIVPMEVNFNFDDPNLIILPLAFGKRQGREFIWNDLLSLETGSLKLANGRVIEKTLYNRRTRQDEPALFVALTFERREVLDSSNIKPMNLIGVDRGENIPAVIALTDPEGCPLSRFKDSLGNPTHILRIGESYKEKQRTIQAKKEVEQRRAGGYSRKYASKAKNLADDMVRNTARDLLYYAVTQDAMLIFENLSRGFGRQGKRTFMAERQYTRMEDWLTAKLAYEGLPSKTYLSKTLAQYTSKTCSNCGFTITSADYDRVLEKLKKTATGWMTTINGKELKVEGQITYYNRYKRQNVVKDLSVELDRLSEESVNNDISSWTKGRSGEALSLLKKRFSHRPVQEKFVCLNCGFETHADEQAALNIARSWLFLRSQEYKKYQTNKTTGNTDKRAFVETWQSFYRKKLKEVWKPAV

SEQ ID NO: 43475 - protein, 978 aa, synthetic construct
  REGION 1..978: note = engineered CasX variant
QEIKRINKIRRRLVKDSNTKKAGKTGPMKTLLVRVMTPDLRERLENLRKKPENIPQPISNTSRANLNKLLTDYTEMKKAILHVYWEEFQKDPVGLMSRVAQPASKKIDQNKLKPEMDEKGNLTTAGFACSQCGQPLFVYKLEQVSEKGKAYTNYFGRCNVAEHEKLILLAQLKPEKDSDEAVTYSLGKFGQRALDFYSIHVTKESTHPVKPLAQIAGNRYASTPVGKALSDACMGTIASFLSKYQDIIIEHQKVVKGNQKRLESLRELAGKENLEYPSVTLPPQPHTSEGVDAYNEVIARVRMWVNLNLWQKLKLSRDDAKPLLRLKGFPSFPLVERQANEVDWWDMVCNVKKLINEKKEDGKVFWQNLAGYKRQEALRPYLSSEEDRKKGKKFARYQLGDLLLHLEKKHGEDWGKVYDEAWERIDKKVEGLSKHIKLEEERRSEDAQSKAALTDWLRAKASFVIEGKKEADKDEFCRCELKLQKWYGDLRGKPFAIEAENSILDISGFSKQYNCAFIWQKDGVKKLNLYLIINYFKGGKLRFKKIKPEAFEANRFYTVINKKSGEIVPMEVNFNFDDPNLIILPLAFGKRQGREFIWNDLLSLETGSLKLANGRVIEKTLYNRRTRQDEPALFVALTFERREVLDSSNIKPMNLIGVDRGENIPAVIALTDPEGCPLSRFKDSLGNPTHILRIGESYKEKQRTIQAKKEVEQRRAGGYSRKYASKAKNLADDMVRNTARDLLYYAVTQDAMLIFENLSRGFGRQGKRTFMAERQYTRMEDWLTAKLAYEGLPSKTYLSKTLAQYTSKTCSNCGFTITSADYDRVLEKLKKTATGWMTTINGKELKVEGQITYYNRYKRQNVVKDLSVELDRLSEESVNNDISSWTKGRSGEALSLLKKRFSHRPVQEKFVCLNCGFETHADEQAALNIARSWLFLRSQEYKKYQTNKTTGNTDKRAFVETWQSFYRKKLKEVWKPAV

SEQ ID NO: 43476 - protein, 978 aa, synthetic construct
  REGION 1..978: note = engineered CasX variant
QEIKRINKIRRRLVKDSNTKKAGKTGPMKTLLVRVMTPDLRERLENLRKKPENIPQPISNTSRANLNKLLTDYTEMKKAILHVYWEEFQKDPVGLMSRVAQPASKKIDQNKLKPEMDEKGNLTTAGFACSQCGQPLFVYKLEQVSEKGKAYTNYFGRCNVAEHEKLILLAQLKPEKDSDEAVTYSLGKFGQRALDFYSIHVTKESTHPVKPLAQIAGNRYASAPVGKALSDACMGTIASFLSKYQDIIIEHQKVVKGNQKRLESLRELAGKENLEYPSVTLPPQPHTSEGVDAYNEVIARVRMWVNLNLWQKLKLSRDDAKPLLRLKGFPSFPLVERQANEVDWWDMVCNVKKLINEKKEDGKVFWQNLAGYKRQEALRPYLSSEEDRKKGKKFARYQLGDLLLHLEKKHGEDWGKVYDEAWERIDKKVEGLSKHIKLEEERRSEDAQSKAALTDWLRAKASFVIEGKKEADKDEFCRCELKLQKWYGDLRGKPFAIEAENSILDISGFSKQYNCAFIWQKDGVKKLNLYLIINYFKGGKLRFKKIKPEAFEANRFYTVINKKSGEIVPMEVNFNFDDPNLIILPLAFGKRQGREFIWNDLLSLETGSLKLANGRVIEKTLYNRRTRQDEPALFVALTFERREVLDSSNIKPMNLIGVDRGENIPAVIALTDPEGCPLSRFKDSLGNPTHILRIGESYKEKQRTIQAKKEVEQRRAGGYSRKYASKAKNLADDMVRNTARDLLYYAVTQDAMLIFENLSRGFGRQGKRTFMAERQYTRMEDWLTAKLAYEGLPSKTYLSKTLAQYTSKTCSNCGFTITSADYDRVLEKLKKTATGWMTTINGKELKVEGQITYYNRYKRQNVVKDLSVELDRLSEESVNNDISSWTKGRSGEALSLLKKRFSHRPVQEKFVCLNCGFETHADEQAALNIARSWLFLRSQEYKKYQTNKTTGNTDKRAFVETWQSFYRKKLKEVWKPAV

SEQ ID NO: 43477 - protein, 978 aa, synthetic construct
  REGION 1..978: note = engineered CasX variant
QEIKRINKIRRRLVKDSNTKKAGKTGPMKTLLVRVMTPDLRERLENLRKKPENIPQPISNTSRANLNKLLTDYTEMKKAILHVYWEEFQKDPVGLMSRVAQPASKKIDQNKLKPEMDEKGNLTTAGFACSQCGQPLFVYKLEQVSEKGKAYTNYFGRCNVAEHEKLILLAQLKPEKDSDEAVTYSLGKFGQRALDFYSIHVTKESTHPVKPLAQIAGNRYASVPVGKALSDACMGTIASFLSKYQDIIIEHQKVVKGNQKRLESLRELAGKENLEYPSVTLPPQPHTSEGVDAYNEVIARVRMWVNLNLWQKLKLSRDDAKPLLRLKGFPSFPLVERQANEVDWWDMVCNVKKLINEKKEDGKVFWQNLAGYKRQEALRPYLSSEEDRKKGKKFARYQLGDLLLHLEKKHGEDWGKVYDEAWERIDKKVEGLSKHIKLEEERRSEDAQSKAALTDWLRAKASFVIEGKKEADKDEFCRCELKLQKWYGDLRGKPFAIEAENSILDISGFSKQYNCAFIWQKDGVKKLNLYLIINYFKGGKLRFKKIKPEAFEANRFYTVINKKSGEIVPMEVNFNFDDPNLIILPLAFGKRQGREFIWNDLLSLETGSLKLANGRVIEKTLYNRRTRQDEPALFVALTFERREVLDSSNIKPMNLIGVDRGENIPAVIALTDPEGCPLSRFKDSLGNPTHILRIGESYKEKQRTIQAKKEVEQRRAGGYSRKYASKAKNLADDMVRNTARDLLYYAVTQDAMLIFENLSRGFGRQGKRTFMAERQYTRMEDWLTAKLAYEGLPSKTYLSKTLAQYTSKTCSNCGFTITSADYDRVLEKLKKTATGWMTTINGKELKVEGQITYYNRYKRQNVVKDLSVELDRLSEESVNNDISSWTKGRSGEALSLLKKRFSHRPVQEKFVCLNCGFETHADEQAALNIARSWLFLRSQEYKKYQTNKTTGNTDKRAFVETWQSFYRKKLKEVWKPAV

SEQ ID NO: 43478 - protein, 978 aa, synthetic construct
  REGION 1..978: note = engineered CasX variant
QEIKRINKIRRRLVKDSNTKKAGKTGPMKTLLVRVMTPDLRERLENLRKKPENIPQPISNTSRANLNKLLTDYTEMKKAILHVYWEEFQKDPVGLMSRVAQPASKKIDQNKLKPEMDEKGNLTTAGFACSQCGQPLFVYKLEQVSEKGKAYTNYFGRCNVAEHEKLIKLAQLKPEKDSDEAVTYSLGKFGQRALDFYSIHVTKESTHPVKPLAQIAGNRYASGPVGKALSDACMGTIASFLSKYQDIIIEHQKVVKGNQKRLESLRELAGKENLEYPSVTLPPQPHTSEGVDAYNEVIARVRMWVNLNLWQKLKLSRDDAKPLLRLKGFPSFPLVERQANEVDWWDMVCNVKKLINEKKEDGKVFWQNLAGYKRQEALRPYLSSEEDRKKGKKFARYQLGDLLLHLEKKHGEDWGKVYDEAWERIDKKVEGLSKHIKLEEERRSEDAQSKAALTDWLRAKASFVIEGKKEADKDEFCRCELKLQKWYGDLRGKPFAIEAENSILDISGFSKQYNCAFIWQKDGVKKLNLYLIINYFKGGKLRFKKIKPEAFEANRFYTVINKKSGEIVPMEVNFNFDDPNLIILPLAFGKRQGREFIWNDLLSLETGSLKLANGRVIEKTLYNRRTRQDEPALFVALTFERREVLDSSNIKPMNLIGVDRGENIPAVIALTDPEGCPLSRFKDSLGNPTHILRIGESYKEKQRTIQAKKEVEQRRAGGYSRKYASKAKNLADDMVRNTARDLLYYAVTQDAMLIFENLSRGFGRQGKRTFMAERQYTRMEDWLTAKLAYEGLPSKTYLSKTLAQYTSKTCSNCGFTITSADYDRVLEKLKKTATGWMTTINGKELKVEGQITYYNRYKRQNVVKDLSVELDRLSEESVNNDISSWTKGRSGEALSLLKKRFSHRPVQEKFVCLNCGFETHADEQAALNIARSWLFLRSQEYKKYQTNKTTGNTDKRAFVETWQSFYRKKLKEVWKPAV

SEQ ID NO: 43479 - protein, 977 aa, synthetic construct
  REGION 1..977: note = engineered CasX variant
QEIKRINKIRRRLVKDSNTKKAGKTGPMKTLLVRVMTPDLRERLENLRKKPENIPQPISNTSRANLNKLLTDYTEMKKAILHVYWEEFQKDPVGLMSRVAQPASKKIDQNKLKPEMDEKGNLTTAGFACSQCGQPLFVYKLEQVSEKGKAYTNYFGRCNVAEHEKLILLAQLKPEKDSDEAVTYSLGKFGQRALDFYSIHVTKESTHPVKPLAQIAGNRYASPVGKALSDACMGTIASFLSKYQDIIIEHQKVVKGNQKRLESLRELAGKENLEYPSVTLPPQPHTSEGVDAYNEVIARVRMWVNLNLWQKLKLSRDDAKPLLRLKGFPSFPLVERQANEVDWWDMVCNVKKLINEKKEDGKVFWQNLAGYKRQEALRPYLSSEEDRKKGKKFARYQLGDLLLHLEKKHGEDWGKVYDEAWERIDKKVEGLSKHIKLEEERRSEDAQSKAALTDWLRAKASFVIEGKKEADKDEFCRCELKLQKWYGDLRGKPFAIEAENSILDISGFSKQYNCAFIWQKDGVKKLNLYLIINYFKGGKLRFKKIKPEAFEANRFYTVINKKSGEIVPMEVNFNFDDPNLIILPLAFGKRQGREFIWNDLLSLETGSLKLANGRVIEKTLYNRRTRQDEPALFVALTFERREVLDSSNIKPMNLIGVDRGENIPAVIALTDPEGCPLSRFKDSLGNPTHILRIGESYKEKQRTIQAKKEVEQRRAGGYSRKYASKAKNLADDMVRNTARDLLYYAVTQDAMLIFENLSRGFGRQGKRTFMAERQYTRMEDWLTAKLAYEGLPSKTYLSKTLAQYTSKTCSNCGFTITSADYDRVLEKLKKTATGWMTTINGKELKVEGQITYYNRYKRQNVVKDLSVELDRLSEESVNNDISSWTKGRSGEALSLLKKRFSHRPVQEKFVCLNCGFETHADEQAALNIARSWLFLRSQEYKKYQTNKTTGNTDKRAFVETWQSFYRKKLKEVWKPAV

SEQ ID NO: 43480 - protein, 978 aa, synthetic construct
  REGION 1..978: note = engineered CasX variant
QEIKRINKIRRRLVKDSNTKKAGKTGPMKTLLVRVMTPDLRERLENLRKKPENIPQPISNTSRANLNKLLTDYTEMKKAILHVYWEEFQKDPVGLMSRVAQPASKKIDQNKLKPEMDEKGNLTTAGFACSQCGQPLFVYKLEQVSEKGKAYTNYFGRCNVAEHEKLILLAQLKPEKDSDEAVTYSLGKFGQRALDFYSIHVTKESTHPVKPLAQIAGNRYASYPVGKALSDACMGTIASFLSKYQDIIIEHQKVVKGNQKRLESLRELAGKENLEYPSVTLPPQPHTSEGVDAYNEVIARVRMWVNLNLWQKLKLSRDDAKPLLRLKGFPSFPLVERQANEVDWWDMVCNVKKLINEKKEDGKVFWQNLAGYKRQEALRPYLSSEEDRKKGKKFARYQLGDLLLHLEKKHGEDWGKVYDEAWERIDKKVEGLSKHIKLEEERRSEDAQSKAALTDWLRAKASFVIEGSKEADKDEFCRCELKLQKWYGDLRGKPFAIEAENSILDISGFSKQYNCAFIWQKDGVKKLNLYLIINYFKGGKLRFKKIKPEAFEANRFYTVINKKSGEIVPMEVNFNFDDPNLIILPLAFGKRQGREFIWNDLLSLETGSLKLANGRVIEKTLYNRRTRQDEPALFVALTFERREVLDSSNIKPMNLIGVDRGENIPAVIALTDPEGCPLSRFKDSLGNPTHILRIGESYKEKQRTIQAKKEVEQRRAGGYSRKYASKAKNLADDMVRNTARDLLYYAVTQDAMLIFENLSRGFGRQGKRTFMAERQYTRMEDWLTAKLAYEGLPSKTYLSKTLAQYTSKTCSNCGFTITSADYDRVLEKLKKTATGWMTTINGKELKVEGQITYYNRYKRQNVVKDLSVELDRLSEESVNNDISSWTKGRSGEALSLLKKRFSHRPVQEKFVCLNCGFETHADEQAALNIARSWLFLRSQEYKKYQTNKTTGNTDKRAFVETWQSFYRKKLKEVWKPAV

SEQ ID NO: 43481 - protein, 978 aa, synthetic construct
  REGION 1..978: note = engineered CasX variant
QEIKRINKIRRRLVKDSNTKKAGKTGPMKTLLVRVMTPDLRERLENLRKKPENIPQPISNTSRANLNKLLTDYTEMKKAILHVYWEEFQKDPVGLMSRVAQPASKKIDQNKLKPEMDEKGNLTTAGFACSQCGQPLFVYKLEQVSEKGKAYTNYFGRCNVAEHEKLILLAQLKPEKDSDEAVTYSLGKFGQRALDFYSIHVTKESTHPVKPLAQIAGNRYASHPVGKALSDACMGTIASFLSKYQDIIIEHQKVVKGNQKRLESLRELAGKENLEYPSVTLPPQPHTSEGVDAYNEVIARVRMWVNLNLWQKLKLSRDDAKPLLRLKGFPSFPLVERQANEVDWWDMVCNVKKLINEKKEDGKVFWQNLAGYKRQEALRPYLSSEEDRKKGKKFARYQLGDLLLHLEKKHGEDWGKVYDEAWERIDKKVEGLSKHIKLEEERRSEDAQSKAALTDWLRAKASFVIEGSKEADKDEFCRCELKLQKWYGDLRGKPFAIEAENSILDISGFSKQYNCAFIWQKDGVKKLNLYLIINYFKGGKLRFKKIKPEAFEANRFYTVINKKSGEIVPMEVNFNFDDPNLIILPLAFGKRQGREFIWNDLLSLETGSLKLANGRVIEKTLYNRRTRQDEPALFVALTFERREVLDSSNIKPMNLIGVDRGENIPAVIALTDPEGCPLSRFKDSLGNPTHILRIGESYKEKQRTIQAKKEVEQRRAGGYSRKYASKAKNLADDMVRNTARDLLYYAVTQDAMLIFENLSRGFGRQGKRTFMAERQYTRMEDWLTAKLAYEGLPSKTYLSKTLAQYTSKTCSNCGFTITSADYDRVLEKLKKTATGWMTTINGKELKVEGQITYYNRYKRQNVVKDLSVELDRLSEESVNNDISSWTKGRSGEALSLLKKRFSHRPVQEKFVCLNCGFETHADEQAALNIARSWLFLRSQEYKKYQTNKTTGNTDKRAFVETWQSFYRKKLKEVWKPAV

SEQ ID NO: 43482 - protein, 978 aa, synthetic construct
  REGION 1..978: note = engineered CasX variant
QEIKRINKIRRRLVKDSNTKKAGKTGPMKTLLVRVMTPDLRERLENLRKKPENIPQPISNTSRANLNKLLTDYTEMKKAILHVYWEEFQKDPVGLMSRVAQPASKKIDQNKLKPEMDEKGNLTTAGFACSQCGQPLFVYKLEQVSEKGKAYTNYFGRCNVAEHEKLILLAQLKPEKDSDEAVTYSLGKFGQRALDFYSIHVTKESTHPVKPLAQIAGNRYASSPVGKALSDACMGTIASFLSKYQDIIIEHQKVVKGNQKRLESLRELAGKENLEYPSVTLPPQPHTSEGVDAYNEVIARVRMWVNLNLWQKLKLSRDDAKPLLRLKGFPSFPLVERQANEVDWWDMVCNVKKLINEKKEDGKVFWQNLAGYKRQEALRPYLSSEEDRKKGKKFARYQLGDLLLHLEKKHGEDWGKVYDEAWERIDKKVEGLSKHIKLEEERRSEDAQSKAALTDWLRAKASFVIEGSKEADKDEFCRCELKLQKWYGDLRGKPFAIEAENSILDISGFSKQYNCAFIWQKDGVKKLNLYLIINYFKGGKLRFKKIKPEAFEANRFYTVINKKSGEIVPMEVNFNFDDPNLIILPLAFGKRQGREFIWNDLLSLETGSLKLANGRVIEKTLYNRRTRQDEPALFVALTFERREVLDSSNIKPMNLIGVDRGENIPAVIALTDPEGCPLSRFKDSLGNPTHILRIGESYKEKQRTIQAKKEVEQRRAGGYSRKYASKAKNLADDMVRNTARDLLYYAVTQDAMLIFENLSRGFGRQGKRTFMAERQYTRMEDWLTAKLAYEGLPSKTYLSKTLAQYTSKTCSNCGFTITSADYDRVLEKLKKTATGWMTTINGKELKVEGQITYYNRYKRQNVVKDLSVELDRLSEESVNNDISSWTKGRSGEALSLLKKRFSHRPVQEKFVCLNCGFETHADEQAALNIARSWLFLRSQEYKKYQTNKTTGNTDKRAFVETWQSFYRKKLKEVWKPAV

SEQ ID NO: 43483 - protein, 978 aa, synthetic construct
  REGION 1..978: note = engineered CasX variant
QEIKRINKIRRRLVKDSNTKKAGKTGPMKTLLVRVMTPDLRERLENLRKKPENIPQPISNTSRANLNKLLTDYTEMKKAILHVYWEEFQKDPVGLMSRVAQPASKKIDQNKLKPEMDEKGNLTTAGFACSQCGQPLFVYKLEQVSEKGKAYTNYFGRCNVAEHEKLILLAQLKPEKDSDEAVTYSLGKFGQRALDFYSIHVTKESTHPVKPLAQIAGNRYASTPVGKALSDACMGTIASFLSKYQDIIIEHQKVVKGNQKRLESLRELAGKENLEYPSVTLPPQPHTSEGVDAYNEVIARVRMWVNLNLWQKLKLSRDDAKPLLRLKGFPSFPLVERQANEVDWWDMVCNVKKLINEKKEDGKVFWQNLAGYKRQEALRPYLSSEEDRKKGKKFARYQLGDLLLHLEKKHGEDWGKVYDEAWERIDKKVEGLSKHIKLEEERRSEDAQSKAALTDWLRAKASFVIEGSKEADKDEFCRCELKLQKWYGDLRGKPFAIEAENSILDISGFSKQYNCAFIWQKDGVKKLNLYLIINYFKGGKLRFKKIKPEAFEANRFYTVINKKSGEIVPMEVNFNFDDPNLIILPLAFGKRQGREFIWNDLLSLETGSLKLANGRVIEKTLYNRRTRQDEPALFVALTFERREVLDSSNIKPMNLIGVDRGENIPAVIALTDPEGCPLSRFKDSLGNPTHILRIGESYKEKQRTIQAKKEVEQRRAGGYSRKYASKAKNLADDMVRNTARDLLYYAVTQDAMLIFENLSRGFGRQGKRTFMAERQYTRMEDWLTAKLAYEGLPSKTYLSKTLAQYTSKTCSNCGFTITSADYDRVLEKLKKTATGWMTTINGKELKVEGQITYYNRYKRQNVVKDLSVELDRLSEESVNNDISSWTKGRSGEALSLLKKRFSHRPVQEKFVCLNCGFETHADEQAALNIARSWLFLRSQEYKKYQTNKTTGNTDKRAFVETWQSFYRKKLKEVWKPAV

SEQ ID NO: 43484 - protein, 978 aa, synthetic construct
  REGION 1..978: note = engineered CasX variant
QEIKRINKIRRRLVKDSNTKKAGKTGPMKTLLVRVMTPDLRERLENLRKKPENIPQPISNTSRANLNKLLTDYTEMKKAILHVYWEEFQKDPVGLMSRVAQPASKKIDQNKLKPEMDEKGNLTTAGFACSQCGQPLFVYKLEQVSEKGKAYTNYFGRCNVAEHEKLILLAQLKPEKDSDEAVTYSLGKFGQRALDFYSIHVTKESTHPVKPLAQIAGNRYASAPVGKALSDACMGTIASFLSKYQDIIIEHQKVVKGNQKRLESLRELAGKENLEYPSVTLPPQPHTSEGVDAYNEVIARVRMWVNLNLWQKLKLSRDDAKPLLRLKGFPSFPLVERQANEVDWWDMVCNVKKLINEKKEDGKVFWQNLAGYKRQEALRPYLSSEEDRKKGKKFARYQLGDLLLHLEKKHGEDWGKVYDEAWERIDKKVEGLSKHIKLEEERRSEDAQSKAALTDWLRAKASFVIEGSKEADKDEFCRCELKLQKWYGDLRGKPFAIEAENSILDISGFSKQYNCAFIWQKDGVKKLNLYLIINYFKGGKLRFKKIKPEAFEANRFYTVINKKSGEIVPMEVNFNFDDPNLIILPLAFGKRQGREFIWNDLLSLETGSLKLANGRVIEKTLYNRRTRQDEPALFVALTFERREVLDSSNIKPMNLIGVDRGENIPAVIALTDPEGCPLSRFKDSLGNPTHILRIGESYKEKQRTIQAKKEVEQRRAGGYSRKYASKAKNLADDMVRNTARDLLYYAVTQDAMLIFENLSRGFGRQGKRTFMAERQYTRMEDWLTAKLAYEGLPSKTYLSKTLAQYTSKTCSNCGFTITSADYDRVLEKLKKTATGWMTTINGKELKVEGQITYYNRYKRQNVVKDLSVELDRLSEESVNNDISSWTKGRSGEALSLLKKRFSHRPVQEKFVCLNCGFETHADEQAALNIARSWLFLRSQEYKKYQTNKTTGNTDKRAFVETWQSFYRKKLKEVWKPAV

SEQ ID NO: 43485 - protein, 978 aa, synthetic construct
  REGION 1..978: note = engineered CasX variant
QEIKRINKIRRRLVKDSNTKKAGKTGPMKTLLVRVMTPDLRERLENLRKKPENIPQPISNTSRANLNKLLTDYTEMKKAILHVYWEEFQKDPVGLMSRVAQPASKKIDQNKLKPEMDEKGNLTTAGFACSQCGQPLFVYKLEQVSEKGKAYTNYFGRCNVAEHEKLILLAQLKPEKDSDEAVTYSLGKFGQRALDFYSIHVTKESTHPVKPLAQIAGNRYASVPVGKALSDACMGTIASFLSKYQDIIIEHQKVVKGNQKRLESLRELAGKENLEYPSVTLPPQPHTSEGVDAYNEVIARVRMWVNLNLWQKLKLSRDDAKPLLRLKGFPSFPLVERQANEVDWWDMVCNVKKLINEKKEDGKVFWQNLAGYKRQEALRPYLSSEEDRKKGKKFARYQLGDLLLHLEKKHGEDWGKVYDEAWERIDKKVEGLSKHIKLEEERRSEDAQSKAALTDWLRAKASFVIEGSKEADKDEFCRCELKLQKWYGDLRGKPFAIEAENSILDISGFSKQYNCAFIWQKDGVKKLNLYLIINYFKGGKLRFKKIKPEAFEANRFYTVINKKSGEIVPMEVNFNFDDPNLIILPLAFGKRQGREFIWNDLLSLETGSLKLANGRVIEKTLYNRRTRQDEPALFVALTFERREVLDSSNIKPMNLIGVDRGENIPAVIALTDPEGCPLSRFKDSLGNPTHILRIGESYKEKQRTIQAKKEVEQRRAGGYSRKYASKAKNLADDMVRNTARDLLYYAVTQDAMLIFENLSRGFGRQGKRTFMAERQYTRMEDWLTAKLAYEGLPSKTYLSKTLAQYTSKTCSNCGFTITSADYDRVLEKLKKTATGWMTTINGKELKVEGQITYYNRYKRQNVVKDLSVELDRLSEESVNNDISSWTKGRSGEALSLLKKRFSHRPVQEKFVCLNCGFETHADEQAALNIARSWLFLRSQEYKKYQTNKTTGNTDKRAFVETWQSFYRKKLKEVWKPAV

SEQ ID NO: 43486 - protein, 978 aa, synthetic construct
  REGION 1..978: note = engineered CasX variant
QEIKRINKIRRRLVKDSNTKKAGKTGPMKTLLVRVMTPDLRERLENLRKKPENIPQPISNTSRANLNKLLTDYTEMKKAILHVYWEEFQKDPVGLMSRVAQPASKKIDQNKLKPEMDEKGNLTTAGFACSQCGQPLFVYKLEQVSEKGKAYTNYFGRCNVAEHEKLIKLAQLKPEKDSDEAVTYSLGKFGQRALDFYSIHVTKESTHPVKPLAQIAGNRYASGPVGKALSDACMGTIASFLSKYQDIIIEHQKVVKGNQKRLESLRELAGKENLEYPSVTLPPQPHTSEGVDAYNEVIARVRMWVNLNLWQKLKLSRDDAKPLLRLKGFPSFPLVERQANEVDWWDMVCNVKKLINEKKEDGKVFWQNLAGYKRQEALRPYLSSEEDRKKGKKFARYQLGDLLLHLEKKHGEDWGKVYDEAWERIDKKVEGLSKHIKLEEERRSEDAQSKAALTDWLRAKASFVIEGSKEADKDEFCRCELKLQKWYGDLRGKPFAIEAENSILDISGFSKQYNCAFIWQKDGVKKLNLYLIINYFKGGKLRFKKIKPEAFEANRFYTVINKKSGEIVPMEVNFNFDDPNLIILPLAFGKRQGREFIWNDLLSLETGSLKLANGRVIEKTLYNRRTRQDEPALFVALTFERREVLDSSNIKPMNLIGVDRGENIPAVIALTDPEGCPLSRFKDSLGNPTHILRIGESYKEKQRTIQAKKEVEQRRAGGYSRKYASKAKNLADDMVRNTARDLLYYAVTQDAMLIFENLSRGFGRQGKRTFMAERQYTRMEDWLTAKLAYEGLPSKTYLSKTLAQYTSKTCSNCGFTITSADYDRVLEKLKKTATGWMTTINGKELKVEGQITYYNRYKRQNVVKDLSVELDRLSEESVNNDISSWTKGRSGEALSLLKKRFSHRPVQEKFVCLNCGFETHADEQAALNIARSWLFLRSQEYKKYQTNKTTGNTDKRAFVETWQSFYRKKLKEVWKPAV

SEQ ID NO: 43487 - protein, 977 aa, synthetic construct
  REGION 1..977: note = engineered CasX variant
QEIKRINKIRRRLVKDSNTKKAGKTGPMKTLLVRVMTPDLRERLENLRKKPENIPQPISNTSRANLNKLLTDYTEMKKAILHVYWEEFQKDPVGLMSRVAQPASKKIDQNKLKPEMDEKGNLTTAGFACSQCGQPLFVYKLEQVSEKGKAYTNYFGRCNVAEHEKLILLAQLKPEKDSDEAVTYSLGKFGQRALDFYSIHVTKESTHPVKPLAQIAGNRYASPVGKALSDACMGTIASFLSKYQDIIIEHQKVVKGNQKRLESLRELAGKENLEYPSVTLPPQPHTSEGVDAYNEVIARVRMWVNLNLWQKLKLSRDDAKPLLRLKGFPSFPLVERQANEVDWWDMVCNVKKLINEKKEDGKVFWQNLAGYKRQEALRPYLSSEEDRKKGKKFARYQLGDLLLHLEKKHGEDWGKVYDEAWERIDKKVEGLSKHIKLEEERRSEDAQSKAALTDWLRAKASFVIEGSKEADKDEFCRCELKLQKWYGDLRGKPFAIEAENSILDISGFSKQYNCAFIWQKDGVKKLNLYLIINYFKGGKLRFKKIKPEAFEANRFYTVINKKSGEIVPMEVNFNFDDPNLIILPLAFGKRQGREFIWNDLLSLETGSLKLANGRVIEKTLYNRRTRQDEPALFVALTFERREVLDSSNIKPMNLIGVDRGENIPAVIALTDPEGCPLSRFKDSLGNPTHILRIGESYKEKQRTIQAKKEVEQRRAGGYSRKYASKAKNLADDMVRNTARDLLYYAVTQDAMLIFENLSRGFGRQGKRTFMAERQYTRMEDWLTAKLAYEGLPSKTYLSKTLAQYTSKTCSNCGFTITSADYDRVLEKLKKTATGWMTTINGKELKVEGQITYYNRYKRQNVVKDLSVELDRLSEESVNNDISSWTKGRSGEALSLLKKRFSHRPVQEKFVCLNCGFETHADEQAALNIARSWLFLRSQEYKKYQTNKTTGNTDKRAFVETWQSFYRKKLKEVWKPAV

SEQ ID NO: 43488 - protein, 979 aa, synthetic construct
  REGION 1..979: note = engineered CasX variant
QEIKRINKIRRRLVKDSNTKKAGKTGPMKTLLVRVMTPDLRERLENLRKKPENIPQPISNTSRANLNKLLTDYTEMKKAILHVYWEEFQKDPVGLMSRVAQPASKKIDQNKLKPEMDEKGNLTTAGFACSQCGQPLFVYKLEQVSEKGKAYTNYFGRCNVAEHEKLILLAQLKPEKDSDEAVTYSLGKFGQRALDFYSIHVTKESTHPVKPLAQIAGNRYASYPVGKALSDACMGTIASFLSKYQDIIIEHQKVVKGNQKRLESLRELAGKENLEYPSVTLPPQPHTSEGVDAYNEVIARVRMWVNLNLWQKLKLSRDDAKPLLRLKGFPSFPLVERQANEVDWWDMVCNVKKLINEKKEDGKVFWQNLAGYKRQEALRPYLSSEEDRKKGKKFARYQLGDLLLHLEKKHGEDWGKVYDEAWERIDKKVEGLSKHIKLEEERRSEDAQSKAALTDWLRAKASFVIEGLKEADDKDEFCRCELKLQKWYGDLRGKPFAIEAENSILDISGFSKQYNCAFIWQKDGVKKLNLYLIINYFKGGKLRFKKIKPEAFEANRFYTVINKKSGEIVPMEVNFNFDDPNLIILPLAFGKRQGREFIWNDLLSLETGSLKLANGRVIEKTLYNRRTRQDEPALFVALTFERREVLDSSNIKPMNLIGVDRGENIPAVIALTDPEGCPLSRFKDSLGNPTHILRIGESYKEKQRTIQAKKEVEQRRAGGYSRKYASKAKNLADDMVRNTARDLLYYAVTQDAMLIFENLSRGFGRQGKRTFMAERQYTRMEDWLTAKLAYEGLPSKTYLSKTLAQYTSKTCSNCGFTITSADYDRVLEKLKKTATGWMTTINGKELKVEGQITYYNRYKRQNVVKDLSVELDRLSEESVNNDISSWTKGRSGEALSLLKKRFSHRPVQEKFVCLNCGFETHADEQAALNIARSWLFLRSQEYKKYQTNKTTGNTDKRAFVETWQSFYRKKLKEVWKPAV

SEQ ID NO: 43489 - protein, 979 aa, synthetic construct
  REGION 1..979: note = engineered CasX variant
QEIKRINKIRRRLVKDSNTKKAGKTGPMKTLLVRVMTPDLRERLENLRKKPENIPQPISNTSRANLNKLLTDYTEMKKAILHVYWEEFQKDPVGLMSRVAQPASKKIDQNKLKPEMDEKGNLTTAGFACSQCGQPLFVYKLEQVSEKGKAYTNYFGRCNVAEHEKLILLAQLKPEKDSDEAVTYSLGKFGQRALDFYSIHVTKESTHPVKPLAQIAGNRYASHPVGKALSDACMGTIASFLSKYQDIIIEHQKVVKGNQKRLESLRELAGKENLEYPSVTLPPQPHTSEGVDAYNEVIARVRMWVNLNLWQKLKLSRDDAKPLLRLKGFPSFPLVERQANEVDWWDMVCNVKKLINEKKEDGKVFWQNLAGYKRQEALRPYLSSEEDRKKGKKFARYQLGDLLLHLEKKHGEDWGKVYDEAWERIDKKVEGLSKHIKLEEERRSEDAQSKAALTDWLRAKASFVIEGLKEADDKDEFCRCELKLQKWYGDLRGKPFAIEAENSILDISGFSKQYNCAFIWQKDGVKKLNLYLIINYFKGGKLRFKKIKPEAFEANRFYTVINKKSGEIVPMEVNFNFDDPNLIILPLAFGKRQGREFIWNDLLSLETGSLKLANGRVIEKTLYNRRTRQDEPALFVALTFERREVLDSSNIKPMNLIGVDRGENIPAVIALTDPEGCPLSRFKDSLGNPTHILRIGESYKEKQRTIQAKKEVEQRRAGGYSRKYASKAKNLADDMVRNTARDLLYYAVTQDAMLIFENLSRGFGRQGKRTFMAERQYTRMEDWLTAKLAYEGLPSKTYLSKTLAQYTSKTCSNCGFTITSADYDRVLEKLKKTATGWMTTINGKELKVEGQITYYNRYKRQNVVKDLSVELDRLSEESVNNDISSWTKGRSGEALSLLKKRFSHRPVQEKFVCLNCGFETHADEQAALNIARSWLFLRSQEYKKYQTNKTTGNTDKRAFVETWQSFYRKKLKEVWKPAV

SEQ ID NO: 43490 - protein, 979 aa, synthetic construct
  REGION 1..979: note = engineered CasX variant
QEIKRINKIRRRLVKDSNTKKAGKTGPMKTLLVRVMTPDLRERLENLRKKPENIPQPISNTSRANLNKLLTDYTEMKKAILHVYWEEFQKDPVGLMSRVAQPASKKIDQNKLKPEMDEKGNLTTAGFACSQCGQPLFVYKLEQVSEKGKAYTNYFGRCNVAEHEKLILLAQLKPEKDSDEAVTYSLGKFGQRALDFYSIHVTKESTHPVKPLAQIAGNRYASSPVGKALSDACMGTIASFLSKYQDIIIEHQKVVKGNQKRLESLRELAGKENLEYPSVTLPPQPHTSEGVDAYNEVIARVRMWVNLNLWQKLKLSRDDAKPLLRLKGFPSFPLVERQANEVDWWDMVCNVKKLINEKKEDGKVFWQNLAGYKRQEALRPYLSSEEDRKKGKKFARYQLGDLLLHLEKKHGEDWGKVYDEAWERIDKKVEGLSKHIKLEEERRSEDAQSKAALTDWLRAKASFVIEGLKEADDKDEFCRCELKLQKWYGDLRGKPFAIEAENSILDISGFSKQYNCAFIWQKDGVKKLNLYLIINYFKGGKLRFKKIKPEAFEANRFYTVINKKSGEIVPMEVNFNFDDPNLIILPLAFGKRQGREFIWNDLLSLETGSLKLANGRVIEKTLYNRRTRQDEPALFVALTFERREVLDSSNIKPMNLIGVDRGENIPAVIALTDPEGCPLSRFKDSLGNPTHILRIGESYKEKQRTIQAKKEVEQRRAGGYSRKYASKAKNLADDMVRNTARDLLYYAVTQDAMLIFENLSRGFGRQGKRTFMAERQYTRMEDWLTAKLAYEGLPSKTYLSKTLAQYTSKTCSNCGFTITSADYDRVLEKLKKTATGWMTTINGKELKVEGQITYYNRYKRQNVVKDLSVELDRLSEESVNNDISSWTKGRSGEALSLLKKRFSHRPVQEKFVCLNCGFETHADEQAALNIARSWLFLRSQEYKKYQTNKTTGNTDKRAFVETWQSFYRKKLKEVWKPAV

SEQ ID NO: 43491 - protein, 979 aa, synthetic construct
  REGION 1..979: note = engineered CasX variant
QEIKRINKIRRRLVKDSNTKKAGKTGPMKTLLVRVMTPDLRERLENLRKKPENIPQPISNTSRANLNKLLTDYTEMKKAILHVYWEEFQKDPVGLMSRVAQPASKKIDQNKLKPEMDEKGNLTTAGFACSQCGQPLFVYKLEQVSEKGKAYTNYFGRCNVAEHEKLILLAQLKPEKDSDEAVTYSLGKFGQRALDFYSIHVTKESTHPVKPLAQIAGNRYASTPVGKALSDACMGTIASFLSKYQDIIIEHQKVVKGNQKRLESLRELAGKENLEYPSVTLPPQPHTSEGVDAYNEVIARVRMWVNLNLWQKLKLSRDDAKPLLRLKGFPSFPLVERQANEVDWWDMVCNVKKLINEKKEDGKVFWQNLAGYKRQEALRPYLSSEEDRKKGKKFARYQLGDLLLHLEKKHGEDWGKVYDEAWERIDKKVEGLSKHIKLEEERRSEDAQSKAALTDWLRAKASFVIEGLKEADDKDEFCRCELKLQKWYGDLRGKPFAIEAENSILDISGFSKQYNCAFIWQKDGVKKLNLYLIINYFKGGKLRFKKIKPEAFEANRFYTVINKKSGEIVPMEVNFNFDDPNLIILPLAFGKRQGREFIWNDLLSLETGSLKLANGRVIEKTLYNRRTRQDEPALFVALTFERREVLDSSNIKPMNLIGVDRGENIPAVIALTDPEGCPLSRFKDSLGNPTHILRIGESYKEKQRTIQAKKEVEQRRAGGYSRKYASKAKNLADDMVRNTARDLLYYAVTQDAMLIFENLSRGFGRQGKRTFMAERQYTRMEDWLTAKLAYEGLPSKTYLSKTLAQYTSKTCSNCGFTITSADYDRVLEKLKKTATGWMTTINGKELKVEGQITYYNRYKRQNVVKDLSVELDRLSEESVNNDISSWTKGRSGEALSLLKKRFSHRPVQEKFVCLNCGFETHADEQAALNIARSWLFLRSQEYKKYQTNKTTGNTDKRAFVETWQSFYRKKLKEVWKPAV

SEQ ID NO: 43492 - protein, 979 aa, synthetic construct
  REGION 1..979: note = engineered CasX variant
QEIKRINKIRRRLVKDSNTKKAGKTGPMKTLLVRVMTPDLRERLENLRKKPENIPQPISNTSRANLNKLLTDYTEMKKAILHVYWEEFQKDPVGLMSRVAQPASKKIDQNKLKPEMDEKGNLTTAGFACSQCGQPLFVYKLEQVSEKGKAYTNYFGRCNVAEHEKLILLAQLKPEKDSDEAVTYSLGKFGQRALDFYSIHVTKESTHPVKPLAQIAGNRYASAPVGKALSDACMGTIASFLSKYQDIIIEHQKVVKGNQKRLESLRELAGKENLEYPSVTLPPQPHTSEGVDAYNEVIARVRMWVNLNLWQKLKLSRDDAKPLLRLKGFPSFPLVERQANEVDWWDMVCNVKKLINEKKEDGKVFWQNLAGYKRQEALRPYLSSEEDRKKGKKFARYQLGDLLLHLEKKHGEDWGKVYDEAWERIDKKVEGLSKHIKLEEERRSEDAQSKAALTDWLRAKASFVIEGLKEADDKDEFCRCELKLQKWYGDLRGKPFAIEAENSILDISGFSKQYNCAFIWQKDGVKKLNLYLIINYFKGGKLRFKKIKPEAFEANRFYTVINKKSGEIVPMEVNFNFDDPNLIILPLAFGKRQGREFIWNDLLSLETGSLKLANGRVIEKTLYNRRTRQDEPALFVALTFERREVLDSSNIKPMNLIGVDRGENIPAVIALTDPEGCPLSRFKDSLGNPTHILRIGESYKEKQRTIQAKKEVEQRRAGGYSRKYASKAKNLADDMVRNTARDLLYYAVTQDAMLIFENLSRGFGRQGKRTFMAERQYTRMEDWLTAKLAYEGLPSKTYLSKTLAQYTSKTCSNCGFTITSADYDRVLEKLKKTATGWMTTINGKELKVEGQITYYNRYKRQNVVKDLSVELDRLSEESVNNDISSWTKGRSGEALSLLKKRFSHRPVQEKFVCLNCGFETHADEQAALNIARSWLFLRSQEYKKYQTNKTTGNTDKRAFVETWQSFYRKKLKEVWKPAV

SEQ ID NO: 43493 - protein, 979 aa, synthetic construct
  REGION 1..979: note = engineered CasX variant
QEIKRINKIRRRLVKDSNTKKAGKTGPMKTLLVRVMTPDLRERLENLRKKPENIPQPISNTSRANLNKLLTDYTEMKKAILHVYWEEFQKDPVGLMSRVAQPASKKIDQNKLKPEMDEKGNLTTAGFACSQCGQPLFVYKLEQVSEKGKAYTNYFGRCNVAEHEKLILLAQLKPEKDSDEAVTYSLGKFGQRALDFYSIHVTKESTHPVKPLAQIAGNRYASVPVGKALSDACMGTIASFLSKYQDIIIEHQKVVKGNQKRLESLRELAGKENLEYPSVTLPPQPHTSEGVDAYNEVIARVRMWVNLNLWQKLKLSRDDAKPLLRLKGFPSFPLVERQANEVDWWDMVCNVKKLINEKKEDGKVFWQNLAGYKRQEALRPYLSSEEDRKKGKKFARYQLGDLLLHLEKKHGEDWGKVYDEAWERIDKKVEGLSKHIKLEEERRSEDAQSKAALTDWLRAKASFVIEGLKEADDKDEFCRCELKLQKWYGDLRGKPFAIEAENSILDISGFSKQYNCAFIWQKDGVKKLNLYLIINYFKGGKLRFKKIKPEAFEANRFYTVINKKSGEIVPMEVNFNFDDPNLIILPLAFGKRQGREFIWNDLLSLETGSLKLANGRVIEKTLYNRRTRQDEPALFVALTFERREVLDSSNIKPMNLIGVDRGENIPAVIALTDPEGCPLSRFKDSLGNPTHILRIGESYKEKQRTIQAKKEVEQRRAGGYSRKYASKAKNLADDMVRNTARDLLYYAVTQDAMLIFENLSRGFGRQGKRTFMAERQYTRMEDWLTAKLAYEGLPSKTYLSKTLAQYTSKTCSNCGFTITSADYDRVLEKLKKTATGWMTTINGKELKVEGQITYYNRYKRQNVVKDLSVELDRLSEESVNNDISSWTKGRSGEALSLLKKRFSHRPVQEKFVCLNCGFETHADEQAALNIARSWLFLRSQEYKKYQTNKTTGNTDKRAFVETWQSFYRKKLKEVWKPAV

SEQ ID NO: 43494 - protein, 979 aa, synthetic construct
  REGION 1..979: note = engineered CasX variant
QEIKRINKIRRRLVKDSNTKKAGKTGPMKTLLVRVMTPDLRERLENLRKKPENIPQPISNTSRANLNKLLTDYTEMKKAILHVYWEEFQKDPVGLMSRVAQPASKKIDQNKLKPEMDEKGNLTTAGFACSQCGQPLFVYKLEQVSEKGKAYTNYFGRCNVAEHEKLIKLAQLKPEKDSDEAVTYSLGKFGQRALDFYSIHVTKESTHPVKPLAQIAGNRYASGPVGKALSDACMGTIASFLSKYQDIIIEHQKVVKGNQKRLESLRELAGKENLEYPSVTLPPQPHTSEGVDAYNEVIARVRMWVNLNLWQKLKLSRDDAKPLLRLKGFPSFPLVERQANEVDWWDMVCNVKKLINEKKEDGKVFWQNLAGYKRQEALRPYLSSEEDRKKGKKFARYQLGDLLLHLEKKHGEDWGKVYDEAWERIDKKVEGLSKHIKLEEERRSEDAQSKAALTDWLRAKASFVIEGLKEADDKDEFCRCELKLQKWYGDLRGKPFAIEAENSILDISGFSKQYNCAFIWQKDGVKKLNLYLIINYFKGGKLRFKKIKPEAFEANRFYTVINKKSGEIVPMEVNFNFDDPNLIILPLAFGKRQGREFIWNDLLSLETGSLKLANGRVIEKTLYNRRTRQDEPALFVALTFERREVLDSSNIKPMNLIGVDRGENIPAVIALTDPEGCPLSRFKDSLGNPTHILRIGESYKEKQRTIQAKKEVEQRRAGGYSRKYASKAKNLADDMVRNTARDLLYYAVTQDAMLIFENLSRGFGRQGKRTFMAERQYTRMEDWLTAKLAYEGLPSKTYLSKTLAQYTSKTCSNCGFTITSADYDRVLEKLKKTATGWMTTINGKELKVEGQITYYNRYKRQNVVKDLSVELDRLSEESVNNDISSWTKGRSGEALSLLKKRFSHRPVQEKFVCLNCGFETHADEQAALNIARSWLFLRSQEYKKYQTNKTTGNTDKRAFVETWQSFYRKKLKEVWKPAV

SEQ ID NO: 43495 - protein, 978 aa, synthetic construct
  REGION 1..978: note = engineered CasX variant
QEIKRINKIRRRLVKDSNTKKAGKTGPMKTLLVRVMTPDLRERLENLRKKPENIPQPISNTSRANLNKLLTDYTEMKKAILHVYWEEFQKDPVGLMSRVAQPASKKIDQNKLKPEMDEKGNLTTAGFACSQCGQPLFVYKLEQVSEKGKAYTNYFGRCNVAEHEKLILLAQLKPEKDSDEAVTYSLGKFGQRALDFYSIHVTKESTHPVKPLAQIAGNRYASPVGKALSDACMGTIASFLSKYQDIIIEHQKVVKGNQKRLESLRELAGKENLEYPSVTLPPQPHTSEGVDAYNEVIARVRMWVNLNLWQKLKLSRDDAKPLLRLKGFPSFPLVERQANEVDWWDMVCNVKKLINEKKEDGKVFWQNLAGYKRQEALRPYLSSEEDRKKGKKFARYQLGDLLLHLEKKHGEDWGKVYDEAWERIDKKVEGLSKHIKLEEERRSEDAQSKAALTDWLRAKASFVIEGLKEADDKDEFCRCELKLQKWYGDLRGKPFAIEAENSILDISGFSKQYNCAFIWQKDGVKKLNLYLIINYFKGGKLRFKKIKPEAFEANRFYTVINKKSGEIVPMEVNFNFDDPNLIILPLAFGKRQGREFIWNDLLSLETGSLKLANGRVIEKTLYNRRTRQDEPALFVALTFERREVLDSSNIKPMNLIGVDRGENIPAVIALTDPEGCPLSRFKDSLGNPTHILRIGESYKEKQRTIQAKKEVEQRRAGGYSRKYASKAKNLADDMVRNTARDLLYYAVTQDAMLIFENLSRGFGRQGKRTFMAERQYTRMEDWLTAKLAYEGLPSKTYLSKTLAQYTSKTCSNCGFTITSADYDRVLEKLKKTATGWMTTINGKELKVEGQITYYNRYKRQNVVKDLSVELDRLSEESVNNDISSWTKGRSGEALSLLKKRFSHRPVQEKFVCLNCGFETHADEQAALNIARSWLFLRSQEYKKYQTNKTTGNTDKRAFVETWQSFYRKKLKEVWKPAV

SEQ ID NO: 43496 - protein, 979 aa, synthetic construct
  REGION 1..979: note = engineered CasX variant
QEIKRINKIRRRLVKDSNTKKAGKTGPMKTLLVRVMTPDLRERLENLRKKPENIPQPISNTSRANLNKLLTDYTEMKKAILHVYWEEFQKDPVGLMSRVAQPASKKIDQNKLKPEMDEKGNLTTAGFACSQCGQPLFVYKLEQVSEKGKAYTNYFGRCNVAEHEKLILLAQLKPEKDSDEAVTYSLGKFGQRALDFYSIHVTKESTHPVKPLAQIAGNRYASYPVGKALSDACMGTIASFLSKYQDIIIEHQKVVKGNQKRLESLRELAGKENLEYPSVTLPPQPHTSEGVDAYNEVIARVRMWVNLNLWQKLKLSRDDAKPLLRLKGFPSFPLVERQANEVDWWDMVCNVKKLINEKKEDGKVFWQNLAGYKRQEALRPYLSSEEDRKKGKKFARYQLGDLLLHLEKKHGEDWGKVYDEAWERIDKKVEGLSKHIKLEEERRSEDAQSKAALTDWLRAKASFVIEGLKEADKDEFCRCELKLQKWYGDLRGKPFAIEAENSILDISGFSKQYNCAFIWQKDGVKKLNLYLIINYFKGGKLRFKKIKPEAFEANRFYTVINKKSGEIVPMEVNFNFDDPNLIILPLAFGKRQGREFIWNDLLSLETGSLKLANGRVIEKTLYNRRTRQDEPALFVALTFERREVLDSSNIKPMNLIGVDRGENIPAVIALTDPEGCPLSRFKDSLGNPTHILRIGESYKEKQRTIQAKKEVEQRRAGGYSRKYASKAKNLADDMVRNTARDLLYYAVTQDAMLIFENLSRGFGRQGKRTFMAERQYTRMEDWLTAKLAYEGLPSKTYLSKTLAQYTSKTCSNCGFTITSADYDRVLEKLKKTATGWMTTINGKELKVEGQITYYNRYKRQNVVKDLSVELDRLSEESVNNDISSWTKGRSGNEALSLLKKRFSHRPVQEKFVCLNCGFETHADEQAALNIARSWLFLRSQEYKKYQTNKTTGNTDKRAFVETWQSFYRKKLKEVWKPAV

SEQ ID NO: 43497 - protein, 979 aa, synthetic construct
  REGION 1..979: note = engineered CasX variant
QEIKRINKIRRRLVKDSNTKKAGKTGPMKTLLVRVMTPDLRERLENLRKKPENIPQPISNTSRANLNKLLTDYTEMKKAILHVYWEEFQKDPVGLMSRVAQPASKKIDQNKLKPEMDEKGNLTTAGFACSQCGQPLFVYKLEQVSEKGKAYTNYFGRCNVAEHEKLILLAQLKPEKDSDEAVTYSLGKFGQRALDFYSIHVTKESTHPVKPLAQIAGNRYASHPVGKALSDACMGTIASFLSKYQDIIIEHQKVVKGNQKRLESLRELAGKENLEYPSVTLPPQPHTSEGVDAYNEVIARVRMWVNLNLWQKLKLSRDDAKPLLRLKGFPSFPLVERQANEVDWWDMVCNVKKLINEKKEDGKVFWQNLAGYKRQEALRPYLSSEEDRKKGKKFARYQLGDLLLHLEKKHGEDWGKVYDEAWERIDKKVEGLSKHIKLEEERRSEDAQSKAALTDWLRAKASFVIEGLKEADKDEFCRCELKLQKWYGDLRGKPFAIEAENSILDISGFSKQYNCAFIWQKDGVKKLNLYLIINYFKGGKLRFKKIKPEAFEANRFYTVINKKSGEIVPMEVNFNFDDPNLIILPLAFGKRQGREFIWNDLLSLETGSLKLANGRVIEKTLYNRRTRQDEPALFVALTFERREVLDSSNIKPMNLIGVDRGENIPAVIALTDPEGCPLSRFKDSLGNPTHILRIGESYKEKQRTIQAKKEVEQRRAGGYSRKYASKAKNLADDMVRNTARDLLYYAVTQDAMLIFENLSRGFGRQGKRTFMAERQYTRMEDWLTAKLAYEGLPSKTYLSKTLAQYTSKTCSNCGFTITSADYDRVLEKLKKTATGWMTTINGKELKVEGQITYYNRYKRQNVVKDLSVELDRLSEESVNNDISSWTKGRSGNEALSLLKKRFSHRPVQEKFVCLNCGFETHADEQAALNIARSWLFLRSQEYKKYQTNKTTGNTDKRAFVETWQSFYRKKLKEVWKPAV

SEQ ID NO: 43498 - protein, 979 aa, synthetic construct
  REGION 1..979: note = engineered CasX variant
QEIKRINKIRRRLVKDSNTKKAGKTGPMKTLLVRVMTPDLRERLENLRKKPENIPQPISNTSRANLNKLLTDYTEMKKAILHVYWEEFQKDPVGLMSRVAQPASKKIDQNKLKPEMDEKGNLTTAGFACSQCGQPLFVYKLEQVSEKGKAYTNYFGRCNVAEHEKLILLAQLKPEKDSDEAVTYSLGKFGQRALDFYSIHVTKESTHPVKPLAQIAGNRYASSPVGKALSDACMGTIASFLSKYQDIIIEHQKVVKGNQKRLESLRELAGKENLEYPSVTLPPQPHTSEGVDAYNEVIARVRMWVNLNLWQKLKLSRDDAKPLLRLKGFPSFPLVERQANEVDWWDMVCNVKKLINEKKEDGKVFWQNLAGYKRQEALRPYLSSEEDRKKGKKFARYQLGDLLLHLEKKHGEDWGKVYDEAWERIDKKVEGLSKHIKLEEERRSEDAQSKAALTDWLRAKASFVIEGLKEADKDEFCRCELKLQKWYGDLRGKPFAIEAENSILDISGFSKQYNCAFIWQKDGVKKLNLYLIINYFKGGKLRFKKIKPEAFEANRFYTVINKKSGEIVPMEVNFNFDDPNLIILPLAFGKRQGREFIWNDLLSLETGSLKLANGRVIEKTLYNRRTRQDEPALFVALTFERREVLDSSNIKPMNLIGVDRGENIPAVIALTDPEGCPLSRFKDSLGNPTHILRIGESYKEKQRTIQAKKEVEQRRAGGYSRKYASKAKNLADDMVRNTARDLLYYAVTQDAMLIFENLSRGFGRQGKRTFMAERQYTRMEDWLTAKLAYEGLPSKTYLSKTLAQYTSKTCSNCGFTITSADYDRVLEKLKKTATGWMTTINGKELKVEGQITYYNRYKRQNVVKDLSVELDRLSEESVNNDISSWTKGRSGNEALSLLKKRFSHRPVQEKFVCLNCGFETHADEQAALNIARSWLFLRSQEYKKYQTNKTTGNTDKRAFVETWQSFYRKKLKEVWKPAV

SEQ ID NO: 43499 - protein, 979 aa, synthetic construct
  REGION 1..979: note = engineered CasX variant
QEIKRINKIRRRLVKDSNTKKAGKTGPMKTLLVRVMTPDLRERLENLRKKPENIPQPISNTSRANLNKLLTDYTEMKKAILHVYWEEFQKDPVGLMSRVAQPASKKIDQNKLKPEMDEKGNLTTAGFACSQCGQPLFVYKLEQVSEKGKAYTNYFGRCNVAEHEKLILLAQLKPEKDSDEAVTYSLGKFGQRALDFYSIHVTKESTHPVKPLAQIAGNRYASTPVGKALSDACMGTIASFLSKYQDIIIEHQKVVKGNQKRLESLRELAGKENLEYPSVTLPPQPHTSEGVDAYNEVIARVRMWVNLNLWQKLKLSRDDAKPLLRLKGFPSFPLVERQANEVDWWDMVCNVKKLINEKKEDGKVFWQNLAGYKRQEALRPYLSSEEDRKKGKKFARYQLGDLLLHLEKKHGEDWGKVYDEAWERIDKKVEGLSKHIKLEEERRSEDAQSKAALTDWLRAKASFVIEGLKEADKDEFCRCELKLQKWYGDLRGKPFAIEAENSILDISGFSKQYNCAFIWQKDGVKKLNLYLIINYFKGGKLRFKKIKPEAFEANRFYTVINKKSGEIVPMEVNFNFDDPNLIILPLAFGKRQGREFIWNDLLSLETGSLKLANGRVIEKTLYNRRTRQDEPALFVALTFERREVLDSSNIKPMNLIGVDRGENIPAVIALTDPEGCPLSRFKDSLGNPTHILRIGESYKEKQRTIQAKKEVEQRRAGGYSRKYASKAKNLADDMVRNTARDLLYYAVTQDAMLIFENLSRGFGRQGKRTFMAERQYTRMEDWLTAKLAYEGLPSKTYLSKTLAQYTSKTCSNCGFTITSADYDRVLEKLKKTATGWMTTINGKELKVEGQITYYNRYKRQNVVKDLSVELDRLSEESVNNDISSWTKGRSGNEALSLLKKRFSHRPVQEKFVCLNCGFETHADEQAALNIARSWLFLRSQEYKKYQTNKTTGNTDKRAFVETWQSFYRKKLKEVWKPAV

SEQ ID NO: 43500 - protein, 979 aa, synthetic construct
  REGION 1..979: note = engineered CasX variant
QEIKRINKIRRRLVKDSNTKKAGKTGPMKTLLVRVMTPDLRERLENLRKKPENIPQPISNTSRANLNKLLTDYTEMKKAILHVYWEEFQKDPVGLMSRVAQPASKKIDQNKLKPEMDEKGNLTTAGFACSQCGQPLFVYKLEQVSEKGKAYTNYFGRCNVAEHEKLILLAQLKPEKDSDEAVTYSLGKFGQRALDFYSIHVTKESTHPVKPLAQIAGNRYASAPVGKALSDACMGTIASFLSKYQDIIIEHQKVVKGNQKRLESLRELAGKENLEYPSVTLPPQPHTSEGVDAYNEVIARVRMWVNLNLWQKLKLSRDDAKPLLRLKGFPSFPLVERQANEVDWWDMVCNVKKLINEKKEDGKVFWQNLAGYKRQEALRPYLSSEEDRKKGKKFARYQLGDLLLHLEKKHGEDWGKVYDEAWERIDKKVEGLSKHIKLEEERRSEDAQSKAALTDWLRAKASFVIEGLKEADKDEFCRCELKLQKWYGDLRGKPFAIEAENSILDISGFSKQYNCAFIWQKDGVKKLNLYLIINYFKGGKLRFKKIKPEAFEANRFYTVINKKSGEIVPMEVNFNFDDPNLIILPLAFGKRQGREFIWNDLLSLETGSLKLANGRVIEKTLYNRRTRQDEPALFVALTFERREVLDSSNIKPMNLIGVDRGENIPAVIALTDPEGCPLSRFKDSLGNPTHILRIGESYKEKQRTIQAKKEVEQRRAGGYSRKYASKAKNLADDMVRNTARDLLYYAVTQDAMLIFENLSRGFGRQGKRTFMAERQYTRMEDWLTAKLAYEGLPSKTYLSKTLAQYTSKTCSNCGFTITSADYDRVLEKLKKTATGWMTTINGKELKVEGQITYYNRYKRQNVVKDLSVELDRLSEESVNNDISSWTKGRSGNEALSLLKKRFSHRPVQEKFVCLNCGFETHADEQAALNIARSWLFLRSQEYKKYQTNKTTGNTDKRAFVETWQSFYRKKLKEVWKPAV

SEQ ID NO: 43501 - protein, 979 aa, synthetic construct
  REGION 1..979: note = engineered CasX variant
QEIKRINKIRRRLVKDSNTKKAGKTGPMKTLLVRVMTPDLRERLENLRKKPENIPQPISNTSRANLNKLLTDYTEMKKAILHVYWEEFQKDPVGLMSRVAQPASKKIDQNKLKPEMDEKGNLTTAGFACSQCGQPLFVYKLEQVSEKGKAYTNYFGRCNVAEHEKLILLAQLKPEKDSDEAVTYSLGKFGQRALDFYSIHVTKESTHPVKPLAQIAGNRYASVPVGKALSDACMGTIASFLSKYQDIIIEHQKVVKGNQKRLESLRELAGKENLEYPSVTLPPQPHTSEGVDAYNEVIARVRMWVNLNLWQKLKLSRDDAKPLLRLKGFPSFPLVERQANEVDWWDMVCNVKKLINEKKEDGKVFWQNLAGYKRQEALRPYLSSEEDRKKGKKFARYQLGDLLLHLEKKHGEDWGKVYDEAWERIDKKVEGLSKHIKLEEERRSEDAQSKAALTDWLRAKASFVIEGLKEADKDEFCRCELKLQKWYGDLRGKPFAIEAENSILDISGFSKQYNCAFIWQKDGVKKLNLYLIINYFKGGKLRFKKIKPEAFEANRFYTVINKKSGEIVPMEVNFNFDDPNLIILPLAFGKRQGREFIWNDLLSLETGSLKLANGRVIEKTLYNRRTRQDEPALFVALTFERREVLDSSNIKPMNLIGVDRGENIPAVIALTDPEGCPLSRFKDSLGNPTHILRIGESYKEKQRTIQAKKEVEQRRAGGYSRKYASKAKNLADDMVRNTARDLLYYAVTQDAMLIFENLSRGFGRQGKRTFMAERQYTRMEDWLTAKLAYEGLPSKTYLSKTLAQYTSKTCSNCGFTITSADYDRVLEKLKKTATGWMTTINGKELKVEGQITYYNRYKRQNVVKDLSVELDRLSEESVNNDISSWTKGRSGNEALSLLKKRFSHRPVQEKFVCLNCGFETHADEQAALNIARSWLFLRSQEYKKYQTNKTTGNTDKRAFVETWQSFYRKKLKEVWKPAV

SEQ ID NO: 43502 - protein, 979 aa, synthetic construct
  REGION 1..979: note = engineered CasX variant
QEIKRINKIRRRLVKDSNTKKAGKTGPMKTLLVRVMTPDLRERLENLRKKPENIPQPISNTSRANLNKLLTDYTEMKKAILHVYWEEFQKDPVGLMSRVAQPASKKIDQNKLKPEMDEKGNLTTAGFACSQCGQPLFVYKLEQVSEKGKAYTNYFGRCNVAEHEKLIKLAQLKPEKDSDEAVTYSLGKFGQRALDFYSIHVTKESTHPVKPLAQIAGNRYASGPVGKALSDACMGTIASFLSKYQDIIIEHQKVVKGNQKRLESLRELAGKENLEYPSVTLPPQPHTSEGVDAYNEVIARVRMWVNLNLWQKLKLSRDDAKPLLRLKGFPSFPLVERQANEVDWWDMVCNVKKLINEKKEDGKVFWQNLAGYKRQEALRPYLSSEEDRKKGKKFARYQLGDLLLHLEKKHGEDWGKVYDEAWERIDKKVEGLSKHIKLEEERRSEDAQSKAALTDWLRAKASFVIEGLKEADKDEFCRCELKLQKWYGDLRGKPFAIEAENSILDISGFSKQYNCAFIWQKDGVKKLNLYLIINYFKGGKLRFKKIKPEAFEANRFYTVINKKSGEIVPMEVNFNFDDPNLIILPLAFGKRQGREFIWNDLLSLETGSLKLANGRVIEKTLYNRRTRQDEPALFVALTFERREVLDSSNIKPMNLIGVDRGENIPAVIALTDPEGCPLSRFKDSLGNPTHILRIGESYKEKQRTIQAKKEVEQRRAGGYSRKYASKAKNLADDMVRNTARDLLYYAVTQDAMLIFENLSRGFGRQGKRTFMAERQYTRMEDWLTAKLAYEGLPSKTYLSKTLAQYTSKTCSNCGFTITSADYDRVLEKLKKTATGWMTTINGKELKVEGQITYYNRYKRQNVVKDLSVELDRLSEESVNNDISSWTKGRSGNEALSLLKKRFSHRPVQEKFVCLNCGFETHADEQAALNIARSWLFLRSQEYKKYQTNKTTGNTDKRAFVETWQSFYRKKLKEVWKPAV

SEQ ID NO: 43503 - protein, 978 aa, synthetic construct
  REGION 1..978: note = engineered CasX variant
QEIKRINKIRRRLVKDSNTKKAGKTGPMKTLLVRVMTPDLRERLENLRKKPENIPQPISNTSRANLNKLLTDYTEMKKAILHVYWEEFQKDPVGLMSRVAQPASKKIDQNKLKPEMDEKGNLTTAGFACSQCGQPLFVYKLEQVSEKGKAYTNYFGRCNVAEHEKLILLAQLKPEKDSDEAVTYSLGKFGQRALDFYSIHVTKESTHPVKPLAQIAGNRYASPVGKALSDACMGTIASFLSKYQDIIIEHQKVVKGNQKRLESLRELAGKENLEYPSVTLPPQPHTSEGVDAYNEVIARVRMWVNLNLWQKLKLSRDDAKPLLRLKGFPSFPLVERQANEVDWWDMVCNVKKLINEKKEDGKVFWQNLAGYKRQEALRPYLSSEEDRKKGKKFARYQLGDLLLHLEKKHGEDWGKVYDEAWERIDKKVEGLSKHIKLEEERRSEDAQSKAALTDWLRAKASFVIEGLKEADKDEFCRCELKLQKWYGDLRGKPFAIEAENSILDISGFSKQYNCAFIWQKDGVKKLNLYLIINYFKGGKLRFKKIKPEAFEANRFYTVINKKSGEIVPMEVNFNFDDPNLIILPLAFGKRQGREFIWNDLLSLETGSLKLANGRVIEKTLYNRRTRQDEPALFVALTFERREVLDSSNIKPMNLIGVDRGENIPAVIALTDPEGCPLSRFKDSLGNPTHILRIGESYKEKQRTIQAKKEVEQRRAGGYSRKYASKAKNLADDMVRNTARDLLYYAVTQDAMLIFENLSRGFGRQGKRTFMAERQYTRMEDWLTAKLAYEGLPSKTYLSKTLAQYTSKTCSNCGFTITSADYDRVLEKLKKTATGWMTTINGKELKVEGQITYYNRYKRQNVVKDLSVELDRLSEESVNNDISSWTKGRSGNEALSLLKKRFSHRPVQEKFVCLNCGFETHADEQAALNIARSWLFLRSQEYKKYQTNKTTGNTDKRAFVETWQSFYRKKLKEVWKPAV

SEQ ID NO: 43504 - protein, 978 aa, synthetic construct
  REGION 1..978: note = engineered CasX variant
QEIKRINKIRRRLVKDSNTKKAGKTGPMKTLLVRVMTPDLRERLENLRKKPENIPQPISNTSRANLNKLLTDYTEMKKAILHVYWEEFQKDPVGLMSRVAQPASKKIDQNKLKPEMDEKGNLTTAGFACSQCGQPLFVYKLEQVSEKGKAYTNYFGRCNVAEHEKLILLAQLKPEKDSDEAVTYSLGKFGQRALDFYSIHVTKESTHPVKPLAQIAGNRYASYPVGKALSDACMGTIASFLSKYQDIIIEHQKVVKGNQKRLESLRELAGKENLEYPSVTLPPQPHTSEGVDAYNEVIARVRMWVNLNLWQKLKLSRDDAKPLLRLKGFPSFPLVERQANEVDWWDMVCNVKKLINEKKEDGKVFWQNLAGYKRQEALRPYLSSEEDRQKGKKFARYQLGDLLLHLEKKHGEDWGKVYDEAWERIDKKVEGLSKHIKLEEERRSEDAQSKAALTDWLRAKASFVIEGLKEADKDEFCRCELKLQKWYGDLRGKPFAIEAENSILDISGFSKQYNCAFIWQKDGVKKLNLYLIINYFKGGKLRFKKIKPEAFEANRFYTVINKKSGEIVPMEVNFNFDDPNLIILPLAFGKRQGREFIWNDLLSLETGSLKLANGRVIEKTLYNRRTRQDEPALFVALTFERREVLDSSNIKPMNLIGVDRGENIPAVIALTDPEGCPLSRFKDSLGNPTHILRIGESYKEKQRTIQAKKEVEQRRAGGYSRKYASKAKNLADDMVRNTARDLLYYAVTQDAMLIFENLSRGFGRQGKRTFMAERQYTRMEDWLTAKLAYEGLPSKTYLSKTLAQYTSKTCSNCGFTITSADYDRVLEKLKKTATGWMTTINGKELKVEGQITYYNRYKRQNVVKDLSVELDRLSEESVNNDISSWTKGRSGEALSLLKKRFSHRPVQEKFVCLNCGFETHADEQAALNIARSWLFLRSQEYKKYQTNKTTGNTDKRAFVETWQSFYRKKLKEVWKPAV

SEQ ID NO: 43505 - protein, 978 aa, synthetic construct
  REGION 1..978: note = engineered CasX variant
QEIKRINKIRRRLVKDSNTKKAGKTGPMKTLLVRVMTPDLRERLENLRKKPENIPQPISNTSRANLNKLLTDYTEMKKAILHVYWEEFQKDPVGLMSRVAQPASKKIDQNKLKPEMDEKGNLTTAGFACSQCGQPLFVYKLEQVSEKGKAYTNYFGRCNVAEHEKLILLAQLKPEKDSDEAVTYSLGKFGQRALDFYSIHVTKESTHPVKPLAQIAGNRYASHPVGKALSDACMGTIASFLSKYQDIIIEHQKVVKGNQKRLESLRELAGKENLEYPSVTLPPQPHTSEGVDAYNEVIARVRMWVNLNLWQKLKLSRDDAKPLLRLKGFPSFPLVERQANEVDWWDMVCNVKKLINEKKEDGKVFWQNLAGYKRQEALRPYLSSEEDRQKGKKFARYQLGDLLLHLEKKHGEDWGKVYDEAWERIDKKVEGLSKHIKLEEERRSEDAQSKAALTDWLRAKASFVIEGLKEADKDEFCRCELKLQKWYGDLRGKPFAIEAENSILDISGFSKQYNCAFIWQKDGVKKLNLYLIINYFKGGKLRFKKIKPEAFEANRFYTVINKKSGEIVPMEVNFNFDDPNLIILPLAFGKRQGREFIWNDLLSLETGSLKLANGRVIEKTLYNRRTRQDEPALFVALTFERREVLDSSNIKPMNLIGVDRGENIPAVIALTDPEGCPLSRFKDSLGNPTHILRIGESYKEKQRTIQAKKEVEQRRAGGYSRKYASKAKNLADDMVRNTARDLLYYAVTQDAMLIFENLSRGFGRQGKRTFMAERQYTRMEDWLTAKLAYEGLPSKTYLSKTLAQYTSKTCSNCGFTITSADYDRVLEKLKKTATGWMTTINGKELKVEGQITYYNRYKRQNVVKDLSVELDRLSEESVNNDISSWTKGRSGEALSLLKKRFSHRPVQEKFVCLNCGFETHADEQAALNIARSWLFLRSQEYKKYQTNKTTGNTDKRAFVETWQSFYRKKLKEVWKPAV

SEQ ID NO: 43506 - protein, 978 aa, synthetic construct
  REGION 1..978: note = engineered CasX variant
QEIKRINKIRRRLVKDSNTKKAGKTGPMKTLLVRVMTPDLRERLENLRKKPENIPQPISNTSRANLNKLLTDYTEMKKAILHVYWEEFQKDPVGLMSRVAQPASKKIDQNKLKPEMDEKGNLTTAGFACSQCGQPLFVYKLEQVSEKGKAYTNYFGRCNVAEHEKLILLAQLKPEKDSDEAVTYSLGKFGQRALDFYSIHVTKESTHPVKPLAQIAGNRYASSPVGKALSDACMGTIASFLSKYQDIIIEHQKVVKGNQKRLESLRELAGKENLEYPSVTLPPQPHTSEGVDAYNEVIARVRMWVNLNLWQKLKLSRDDAKPLLRLKGFPSFPLVERQANEVDWWDMVCNVKKLINEKKEDGKVFWQNLAGYKRQEALRPYLSSEEDRQKGKKFARYQLGDLLLHLEKKHGEDWGKVYDEAWERIDKKVEGLSKHIKLEEERRSEDAQSKAALTDWLRAKASFVIEGLKEADKDEFCRCELKLQKWYGDLRGKPFAIEAENSILDISGFSKQYNCAFIWQKDGVKKLNLYLIINYFKGGKLRFKKIKPEAFEANRFYTVINKKSGEIVPMEVNFNFDDPNLIILPLAFGKRQGREFIWNDLLSLETGSLKLANGRVIEKTLYNRRTRQDEPALFVALTFERREVLDSSNIKPMNLIGVDRGENIPAVIALTDPEGCPLSRFKDSLGNPTHILRIGESYKEKQRTIQAKKEVEQRRAGGYSRKYASKAKNLADDMVRNTARDLLYYAVTQDAMLIFENLSRGFGRQGKRTFMAERQYTRMEDWLTAKLAYEGLPSKTYLSKTLAQYTSKTCSNCGFTITSADYDRVLEKLKKTATGWMTTINGKELKVEGQITYYNRYKRQNVVKDLSVELDRLSEESVNNDISSWTKGRSGEALSLLKKRFSHRPVQEKFVCLNCGFETHADEQAALNIARSWLFLRSQEYKKYQTNKTTGNTDKRAFVETWQSFYRKKLKEVWKPAV

SEQ ID NO: 43507 - protein, 978 aa, synthetic construct
  REGION 1..978: note = engineered CasX variant
QEIKRINKIRRRLVKDSNTKKAGKTGPMKTLLVRVMTPDLRERLENLRKKPENIPQPISNTSRANLNKLLTDYTEMKKAILHVYWEEFQKDPVGLMSRVAQPASKKIDQNKLKPEMDEKGNLTTAGFACSQCGQPLFVYKLEQVSEKGKAYTNYFGRCNVAEHEKLILLAQLKPEKDSDEAVTYSLGKFGQRALDFYSIHVTKESTHPVKPLAQIAGNRYASTPVGKALSDACMGTIASFLSKYQDIIIEHQKVVKGNQKRLESLRELAGKENLEYPSVTLPPQPHTSEGVDAYNEVIARVRMWVNLNLWQKLKLSRDDAKPLLRLKGFPSFPLVERQANEVDWWDMVCNVKKLINEKKEDGKVFWQNLAGYKRQEALRPYLSSEEDRQKGKKFARYQLGDLLLHLEKKHGEDWGKVYDEAWERIDKKVEGLSKHIKLEEERRSEDAQSKAALTDWLRAKASFVIEGLKEADKDEFCRCELKLQKWYGDLRGKPFAIEAENSILDISGFSKQYNCAFIWQKDGVKKLNLYLIINYFKGGKLRFKKIKPEAFEANRFYTVINKKSGEIVPMEVNFNFDDPNLIILPLAFGKRQGREFIWNDLLSLETGSLKLANGRVIEKTLYNRRTRQDEPALFVALTFERREVLDSSNIKPMNLIGVDRGENIPAVIALTDPEGCPLSRFKDSLGNPTHILRIGESYKEKQRTIQAKKEVEQRRAGGYSRKYASKAKNLADDMVRNTARDLLYYAVTQDAMLIFENLSRGFGRQGKRTFMAERQYTRMEDWLTAKLAYEGLPSKTYLSKTLAQYTSKTCSNCGFTITSADYDRVLEKLKKTATGWMTTINGKELKVEGQITYYNRYKRQNVVKDLSVELDRLSEESVNNDISSWTKGRSGEALSLLKKRFSHRPVQEKFVCLNCGFETHADEQAALNIARSWLFLRSQEYKKYQTNKTTGNTDKRAFVETWQSFYRKKLKEVWKPAV

SEQ ID NO: 43508 - protein, 978 aa, synthetic construct
  REGION 1..978: note = engineered CasX variant
QEIKRINKIRRRLVKDSNTKKAGKTGPMKTLLVRVMTPDLRERLENLRKKPENIPQPISNTSRANLNKLLTDYTEMKKAILHVYWEEFQKDPVGLMSRVAQPASKKIDQNKLKPEMDEKGNLTTAGFACSQCGQPLFVYKLEQVSEKGKAYTNYFGRCNVAEHEKLILLAQLKPEKDSDEAVTYSLGKFGQRALDFYSIHVTKESTHPVKPLAQIAGNRYASAPVGKALSDACMGTIASFLSKYQDIIIEHQKVVKGNQKRLESLRELAGKENLEYPSVTLPPQPHTSEGVDAYNEVIARVRMWVNLNLWQKLKLSRDDAKPLLRLKGFPSFPLVERQANEVDWWDMVCNVKKLINEKKEDGKVFWQNLAGYKRQEALRPYLSSEEDRQKGKKFARYQLGDLLLHLEKKHGEDWGKVYDEAWERIDKKVEGLSKHIKLEEERRSEDAQSKAALTDWLRAKASFVIEGLKEADKDEFCRCELKLQKWYGDLRGKPFAIEAENSILDISGFSKQYNCAFIWQKDGVKKLNLYLIINYFKGGKLRFKKIKPEAFEANRFYTVINKKSGEIVPMEVNFNFDDPNLIILPLAFGKRQGREFIWNDLLSLETGSLKLANGRVIEKTLYNRRTRQDEPALFVALTFERREVLDSSNIKPMNLIGVDRGENIPAVIALTDPEGCPLSRFKDSLGNPTHILRIGESYKEKQRTIQAKKEVEQRRAGGYSRKYASKAKNLADDMVRNTARDLLYYAVTQDAMLIFENLSRGFGRQGKRTFMAERQYTRMEDWLTAKLAYEGLPSKTYLSKTLAQYTSKTCSNCGFTITSADYDRVLEKLKKTATGWMTTINGKELKVEGQITYYNRYKRQNVVKDLSVELDRLSEESVNNDISSWTKGRSGEALSLLKKRFSHRPVQEKFVCLNCGFETHADEQAALNIARSWLFLRSQEYKKYQTNKTTGNTDKRAFVETWQSFYRKKLKEVWKPAV

SEQ ID NO: 43509 - protein, 978 aa, synthetic construct
  REGION 1..978: note = engineered CasX variant
QEIKRINKIRRRLVKDSNTKKAGKTGPMKTLLVRVMTPDLRERLENLRKKPENIPQPISNTSRANLNKLLTDYTEMKKAILHVYWEEFQKDPVGLMSRVAQPASKKIDQNKLKPEMDEKGNLTTAGFACSQCGQPLFVYKLEQVSEKGKAYTNYFGRCNVAEHEKLILLAQLKPEKDSDEAVTYSLGKFGQRALDFYSIHVTKESTHPVKPLAQIAGNRYASVPVGKALSDACMGTIASFLSKYQDIIIEHQKVVKGNQKRLESLRELAGKENLEYPSVTLPPQPHTSEGVDAYNEVIARVRMWVNLNLWQKLKLSRDDAKPLLRLKGFPSFPLVERQANEVDWWDMVCNVKKLINEKKEDGKVFWQNLAGYKRQEALRPYLSSEEDRQKGKKFARYQLGDLLLHLEKKHGEDWGKVYDEAWERIDKKVEGLSKHIKLEEERRSEDAQSKAALTDWLRAKASFVIEGLKEADKDEFCRCELKLQKWYGDLRGKPFAIEAENSILDISGFSKQYNCAFIWQKDGVKKLNLYLIINYFKGGKLRFKKIKPEAFEANRFYTVINKKSGEIVPMEVNFNFDDPNLIILPLAFGKRQGREFIWNDLLSLETGSLKLANGRVIEKTLYNRRTRQDEPALFVALTFERREVLDSSNIKPMNLIGVDRGENIPAVIALTDPEGCPLSRFKDSLGNPTHILRIGESYKEKQRTIQAKKEVEQRRAGGYSRKYASKAKNLADDMVRNTARDLLYYAVTQDAMLIFENLSRGFGRQGKRTFMAERQYTRMEDWLTAKLAYEGLPSKTYLSKTLAQYTSKTCSNCGFTITSADYDRVLEKLKKTATGWMTTINGKELKVEGQITYYNRYKRQNVVKDLSVELDRLSEESVNNDISSWTKGRSGEALSLLKKRFSHRPVQEKFVCLNCGFETHADEQAALNIARSWLFLRSQEYKKYQTNKTTGNTDKRAFVETWQSFYRKKLKEVWKPAV

SEQ ID NO: 43510 - protein, 978 aa, synthetic construct
  REGION 1..978: note = engineered CasX variant
QEIKRINKIRRRLVKDSNTKKAGKTGPMKTLLVRVMTPDLRERLENLRKKPENIPQPISNTSRANLNKLLTDYTEMKKAILHVYWEEFQKDPVGLMSRVAQPASKKIDQNKLKPEMDEKGNLTTAGFACSQCGQPLFVYKLEQVSEKGKAYTNYFGRCNVAEHEKLIKLAQLKPEKDSDEAVTYSLGKFGQRALDFYSIHVTKESTHPVKPLAQIAGNRYASGPVGKALSDACMGTIASFLSKYQDIIIEHQKVVKGNQKRLESLRELAGKENLEYPSVTLPPQPHTSEGVDAYNEVIARVRMWVNLNLWQKLKLSRDDAKPLLRLKGFPSFPLVERQANEVDWWDMVCNVKKLINEKKEDGKVFWQNLAGYKRQEALRPYLSSEEDRQKGKKFARYQLGDLLLHLEKKHGEDWGKVYDEAWERIDKKVEGLSKHIKLEEERRSEDAQSKAALTDWLRAKASFVIEGLKEADKDEFCRCELKLQKWYGDLRGKPFAIEAENSILDISGFSKQYNCAFIWQKDGVKKLNLYLIINYFKGGKLRFKKIKPEAFEANRFYTVINKKSGEIVPMEVNFNFDDPNLIILPLAFGKRQGREFIWNDLLSLETGSLKLANGRVIEKTLYNRRTRQDEPALFVALTFERREVLDSSNIKPMNLIGVDRGENIPAVIALTDPEGCPLSRFKDSLGNPTHILRIGESYKEKQRTIQAKKEVEQRRAGGYSRKYASKAKNLADDMVRNTARDLLYYAVTQDAMLIFENLSRGFGRQGKRTFMAERQYTRMEDWLTAKLAYEGLPSKTYLSKTLAQYTSKTCSNCGFTITSADYDRVLEKLKKTATGWMTTINGKELKVEGQITYYNRYKRQNVVKDLSVELDRLSEESVNNDISSWTKGRSGEALSLLKKRFSHRPVQEKFVCLNCGFETHADEQAALNIARSWLFLRSQEYKKYQTNKTTGNTDKRAFVETWQSFYRKKLKEVWKPAV

SEQ ID NO: 43511 - protein, 977 aa, synthetic construct
  REGION 1..977: note = engineered CasX variant
QEIKRINKIRRRLVKDSNTKKAGKTGPMKTLLVRVMTPDLRERLENLRKKPENIPQPISNTSRANLNKLLTDYTEMKKAILHVYWEEFQKDPVGLMSRVAQPASKKIDQNKLKPEMDEKGNLTTAGFACSQCGQPLFVYKLEQVSEKGKAYTNYFGRCNVAEHEKLILLAQLKPEKDSDEAVTYSLGKFGQRALDFYSIHVTKESTHPVKPLAQIAGNRYASPVGKALSDACMGTIASFLSKYQDIIIEHQKVVKGNQKRLESLRELAGKENLEYPSVTLPPQPHTSEGVDAYNEVIARVRMWVNLNLWQKLKLSRDDAKPLLRLKGFPSFPLVERQANEVDWWDMVCNVKKLINEKKEDGKVFWQNLAGYKRQEALRPYLSSEEDRQKGKKFARYQLGDLLLHLEKKHGEDWGKVYDEAWERIDKKVEGLSKHIKLEEERRSEDAQSKAALTDWLRAKASFVIEGLKEADKDEFCRCELKLQKWYGDLRGKPFAIEAENSILDISGFSKQYNCAFIWQKDGVKKLNLYLIINYFKGGKLRFKKIKPEAFEANRFYTVINKKSGEIVPMEVNFNFDDPNLIILPLAFGKRQGREFIWNDLLSLETGSLKLANGRVIEKTLYNRRTRQDEPALFVALTFERREVLDSSNIKPMNLIGVDRGENIPAVIALTDPEGCPLSRFKDSLGNPTHILRIGESYKEKQRTIQAKKEVEQRRAGGYSRKYASKAKNLADDMVRNTARDLLYYAVTQDAMLIFENLSRGFGRQGKRTFMAERQYTRMEDWLTAKLAYEGLPSKTYLSKTLAQYTSKTCSNCGFTITSADYDRVLEKLKKTATGWMTTINGKELKVEGQITYYNRYKRQNVVKDLSVELDRLSEESVNNDISSWTKGRSGEALSLLKKRFSHRPVQEKFVCLNCGFETHADEQAALNIARSWLFLRSQEYKKYQTNKTTGNTDKRAFVETWQSFYRKKLKEVWKPAV

SEQ ID NO: 43512 - protein, 978 aa, synthetic construct
  REGION 1..978: note = engineered CasX variant
QEIKRINKIRRRLVKDSNTKKAGKTGPMKTLLVRVMTPDLRERLENLRKKPENIPQPISNTSRANLNKLLTDYTEMKKAILHVYWEEFQKDPVGLMSRVAQPASKKIDQNKLKPEMDEKGNLTTAGFACSQCGQPLFVYKLEQVSEKGKAYTNYFGRCNVAEHEKLILLAQLKPEKDSDEAVTYSLGKFGQRALDFYSIHVTKESTHPVKPLAQIAGNRYASYPVGKALSDACMGTIASFLSKYQDIIIEHQKVVKGNQKRLESLRELAGKENLEYPSVTLPPQPHTSEGVDAYNEVIARVRMWVNLNLWQKLKLSRDDAKPLLRLKGFPSFPLVERQANEVDWWDMVCNVKKLINEKKEDGKVFWQNLAGYKRQEALRPYLSSEEDRKKGKKFARYQLGDLLLHLEKKHGEDWGKVYDEAWERIDKKVEGLSKHIKLEEERRSEDAQSKAALTDWLRAKASFVIEGLKEADKDEFCRCELKLQKWYGDLRGKPFAIEAENSILDISGFSKQYNCAFIWQKDGVKKLNLYLIINYFKGGKLRFKKIKPEAFEANRFYTVINKKSGEIVPMEVNFNFDDPNLIILPLAFGKRQGREFIWNDLLSLETGSLKLANGRVIEKTLYNRRTRQDEPALFVALTFERREVLDSSNIKPMNLIGVDRGENIPAVIALTDPEGCPLSRFKDSLGNPTHILRIGESYKEKQRTIQAKKEVEQRRAGGYSRKYASKAKNLADDMVRNTARDLLYYAVTQDAMLIFENLSRGFGRQGKRTFMAERQYTRMEDWLTAKLAYEGLPSQTYLSKTLAQYTSKTCSNCGFTITSADYDRVLEKLKKTATGWMTTINGKELKVEGQITYYNRYKRQNVVKDLSVELDRLSEESVNNDISSWTKGRSGEALSLLKKRFSHRPVQEKFVCLNCGFETHADEQAALNIARSWLFLRSQEYKKYQTNKTTGNTDKRAFVETWQSFYRKKLKEVWKPAV

SEQ ID NO: 43513 - protein, 978 aa, synthetic construct
  REGION 1..978: note = engineered CasX variant
QEIKRINKIRRRLVKDSNTKKAGKTGPMKTLLVRVMTPDLRERLENLRKKPENIPQPISNTSRANLNKLLTDYTEMKKAILHVYWEEFQKDPVGLMSRVAQPASKKIDQNKLKPEMDEKGNLTTAGFACSQCGQPLFVYKLEQVSEKGKAYTNYFGRCNVAEHEKLILLAQLKPEKDSDEAVTYSLGKFGQRALDFYSIHVTKESTHPVKPLAQIAGNRYASHPVGKALSDACMGTIASFLSKYQDIIIEHQKVVKGNQKRLESLRELAGKENLEYPSVTLPPQPHTSEGVDAYNEVIARVRMWVNLNLWQKLKLSRDDAKPLLRLKGFPSFPLVERQANEVDWWDMVCNVKKLINEKKEDGKVFWQNLAGYKRQEALRPYLSSEEDRKKGKKFARYQLGDLLLHLEKKHGEDWGKVYDEAWERIDKKVEGLSKHIKLEEERRSEDAQSKAALTDWLRAKASFVIEGLKEADKDEFCRCELKLQKWYGDLRGKPFAIEAENSILDISGFSKQYNCAFIWQKDGVKKLNLYLIINYFKGGKLRFKKIKPEAFEANRFYTVINKKSGEIVPMEVNFNFDDPNLIILPLAFGKRQGREFIWNDLLSLETGSLKLANGRVIEKTLYNRRTRQDEPALFVALTFERREVLDSSNIKPMNLIGVDRGENIPAVIALTDPEGCPLSRFKDSLGNPTHILRIGESYKEKQRTIQAKKEVEQRRAGGYSRKYASKAKNLADDMVRNTARDLLYYAVTQDAMLIFENLSRGFGRQGKRTFMAERQYTRMEDWLTAKLAYEGLPSQTYLSKTLAQYTSKTCSNCGFTITSADYDRVLEKLKKTATGWMTTINGKELKVEGQITYYNRYKRQNVVKDLSVELDRLSEESVNNDISSWTKGRSGEALSLLKKRFSHRPVQEKFVCLNCGFETHADEQAALNIARSWLFLRSQEYKKYQTNKTTGNTDKRAFVETWQSFYRKKLKEVWKPAV

SEQ ID NO: 43514 - protein, 978 aa, synthetic construct
  REGION 1..978: note = engineered CasX variant
QEIKRINKIRRRLVKDSNTKKAGKTGPMKTLLVRVMTPDLRERLENLRKKPENIPQPISNTSRANLNKLLTDYTEMKKAILHVYWEEFQKDPVGLMSRVAQPASKKIDQNKLKPEMDEKGNLTTAGFACSQCGQPLFVYKLEQVSEKGKAYTNYFGRCNVAEHEKLILLAQLKPEKDSDEAVTYSLGKFGQRALDFYSIHVTKESTHPVKPLAQIAGNRYASSPVGKALSDACMGTIASFLSKYQDIIIEHQKVVKGNQKRLESLRELAGKENLEYPSVTLPPQPHTSEGVDAYNEVIARVRMWVNLNLWQKLKLSRDDAKPLLRLKGFPSFPLVERQANEVDWWDMVCNVKKLINEKKEDGKVFWQNLAGYKRQEALRPYLSSEEDRKKGKKFARYQLGDLLLHLEKKHGEDWGKVYDEAWERIDKKVEGLSKHIKLEEERRSEDAQSKAALTDWLRAKASFVIEGLKEADKDEFCRCELKLQKWYGDLRGKPFAIEAENSILDISGFSKQYNCAFIWQKDGVKKLNLYLIINYFKGGKLRFKKIKPEAFEANRFYTVINKKSGEIVPMEVNFNFDDPNLIILPLAFGKRQGREFIWNDLLSLETGSLKLANGRVIEKTLYNRRTRQDEPALFVALTFERREVLDSSNIKPMNLIGVDRGENIPAVIALTDPEGCPLSRFKDSLGNPTHILRIGESYKEKQRTIQAKKEVEQRRAGGYSRKYASKAKNLADDMVRNTARDLLYYAVTQDAMLIFENLSRGFGRQGKRTFMAERQYTRMEDWLTAKLAYEGLPSQTYLSKTLAQYTSKTCSNCGFTITSADYDRVLEKLKKTATGWMTTINGKELKVEGQITYYNRYKRQNVVKDLSVELDRLSEESVNNDISSWTKGRSGEALSLLKKRFSHRPVQEKFVCLNCGFETHADEQAALNIARSWLFLRSQEYKKYQTNKTTGNTDKRAFVETWQSFYRKKLKEVWKPAV

SEQ ID NO: 43515 - protein, 978 aa, synthetic construct
  REGION 1..978: note = engineered CasX variant
QEIKRINKIRRRLVKDSNTKKAGKTGPMKTLLVRVMTPDLRERLENLRKKPENIPQPISNTSRANLNKLLTDYTEMKKAILHVYWEEFQKDPVGLMSRVAQPASKKIDQNKLKPEMDEKGNLTTAGFACSQCGQPLFVYKLEQVSEKGKAYTNYFGRCNVAEHEKLILLAQLKPEKDSDEAVTYSLGKFGQRALDFYSIHVTKESTHPVKPLAQIAGNRYASTPVGKALSDACMGTIASFLSKYQDIIIEHQKVVKGNQKRLESLRELAGKENLEYPSVTLPPQPHTSEGVDAYNEVIARVRMWVNLNLWQKLKLSRDDAKPLLRLKGFPSFPLVERQANEVDWWDMVCNVKKLINEKKEDGKVFWQNLAGYKRQEALRPYLSSEEDRKKGKKFARYQLGDLLLHLEKKHGEDWGKVYDEAWERIDKKVEGLSKHIKLEEERRSEDAQSKAALTDWLRAKASFVIEGLKEADKDEFCRCELKLQKWYGDLRGKPFAIEAENSILDISGFSKQYNCAFIWQKDGVKKLNLYLIINYFKGGKLRFKKIKPEAFEANRFYTVINKKSGEIVPMEVNFNFDDPNLIILPLAFGKRQGREFIWNDLLSLETGSLKLANGRVIEKTLYNRRTRQDEPALFVALTFERREVLDSSNIKPMNLIGVDRGENIPAVIALTDPEGCPLSRFKDSLGNPTHILRIGESYKEKQRTIQAKKEVEQRRAGGYSRKYASKAKNLADDMVRNTARDLLYYAVTQDAMLIFENLSRGFGRQGKRTFMAERQYTRMEDWLTAKLAYEGLPSQTYLSKTLAQYTSKTCSNCGFTITSADYDRVLEKLKKTATGWMTTINGKELKVEGQITYYNRYKRQNVVKDLSVELDRLSEESVNNDISSWTKGRSGEALSLLKKRFSHRPVQEKFVCLNCGFETHADEQAALNIARSWLFLRSQEYKKYQTNKTTGNTDKRAFVETWQSFYRKKLKEVWKPAV

SEQ ID NO: 43516 - protein, 978 aa, synthetic construct
  REGION 1..978: note = engineered CasX variant
QEIKRINKIRRRLVKDSNTKKAGKTGPMKTLLVRVMTPDLRERLENLRKKPENIPQPISNTSRANLNKLLTDYTEMKKAILHVYWEEFQKDPVGLMSRVAQPASKKIDQNKLKPEMDEKGNLTTAGFACSQCGQPLFVYKLEQVSEKGKAYTNYFGRCNVAEHEKLILLAQLKPEKDSDEAVTYSLGKFGQRALDFYSIHVTKESTHPVKPLAQIAGNRYASAPVGKALSDACMGTIASFLSKYQDIIIEHQKVVKGNQKRLESLRELAGKENLEYPSVTLPPQPHTSEGVDAYNEVIARVRMWVNLNLWQKLKLSRDDAKPLLRLKGFPSFPLVERQANEVDWWDMVCNVKKLINEKKEDGKVFWQNLAGYKRQEALRPYLSSEEDRKKGKKFARYQLGDLLLHLEKKHGEDWGKVYDEAWERIDKKVEGLSKHIKLEEERRSEDAQSKAALTDWLRAKASFVIEGLKEADKDEFCRCELKLQKWYGDLRGKPFAIEAENSILDISGFSKQYNCAFIWQKDGVKKLNLYLIINYFKGGKLRFKKIKPEAFEANRFYTVINKKSGEIVPMEVNFNFDDPNLIILPLAFGKRQGREFIWNDLLSLETGSLKLANGRVIEKTLYNRRTRQDEPALFVALTFERREVLDSSNIKPMNLIGVDRGENIPAVIALTDPEGCPLSRFKDSLGNPTHILRIGESYKEKQRTIQAKKEVEQRRAGGYSRKYASKAKNLADDMVRNTARDLLYYAVTQDAMLIFENLSRGFGRQGKRTFMAERQYTRMEDWLTAKLAYEGLPSQTYLSKTLAQYTSKTCSNCGFTITSADYDRVLEKLKKTATGWMTTINGKELKVEGQITYYNRYKRQNVVKDLSVELDRLSEESVNNDISSWTKGRSGEALSLLKKRFSHRPVQEKFVCLNCGFETHADEQAALNIARSWLFLRSQEYKKYQTNKTTGNTDKRAFVETWQSFYRKKLKEVWKPAV

SEQ ID NO: 43517 - protein, 978 aa, synthetic construct
  REGION 1..978: note = engineered CasX variant
QEIKRINKIRRRLVKDSNTKKAGKTGPMKTLLVRVMTPDLRERLENLRKKPENIPQPISNTSRANLNKLLTDYTEMKKAILHVYWEEFQKDPVGLMSRVAQPASKKIDQNKLKPEMDEKGNLTTAGFACSQCGQPLFVYKLEQVSEKGKAYTNYFGRCNVAEHEKLILLAQLKPEKDSDEAVTYSLGKFGQRALDFYSIHVTKESTHPVKPLAQIAGNRYASVPVGKALSDACMGTIASFLSKYQDIIIEHQKVVKGNQKRLESLRELAGKENLEYPSVTLPPQPHTSEGVDAYNEVIARVRMWVNLNLWQKLKLSRDDAKPLLRLKGFPSFPLVERQANEVDWWDMVCNVKKLINEKKEDGKVFWQNLAGYKRQEALRPYLSSEEDRKKGKKFARYQLGDLLLHLEKKHGEDWGKVYDEAWERIDKKVEGLSKHIKLEEERRSEDAQSKAALTDWLRAKASFVIEGLKEADKDEFCRCELKLQKWYGDLRGKPFAIEAENSILDISGFSKQYNCAFIWQKDGVKKLNLYLIINYFKGGKLRFKKIKPEAFEANRFYTVINKKSGEIVPMEVNFNFDDPNLIILPLAFGKRQGREFIWNDLLSLETGSLKLANGRVIEKTLYNRRTRQDEPALFVALTFERREVLDSSNIKPMNLIGVDRGENIPAVIALTDPEGCPLSRFKDSLGNPTHILRIGESYKEKQRTIQAKKEVEQRRAGGYSRKYASKAKNLADDMVRNTARDLLYYAVTQDAMLIFENLSRGFGRQGKRTFMAERQYTRMEDWLTAKLAYEGLPSQTYLSKTLAQYTSKTCSNCGFTITSADYDRVLEKLKKTATGWMTTINGKELKVEGQITYYNRYKRQNVVKDLSVELDRLSEESVNNDISSWTKGRSGEALSLLKKRFSHRPVQEKFVCLNCGFETHADEQAALNIARSWLFLRSQEYKKYQTNKTTGNTDKRAFVETWQSFYRKKLKEVWKPAV

SEQ ID NO: 43518 - protein, 978 aa, synthetic construct
  REGION 1..978: note = engineered CasX variant
QEIKRINKIRRRLVKDSNTKKAGKTGPMKTLLVRVMTPDLRERLENLRKKPENIPQPISNTSRANLNKLLTDYTEMKKAILHVYWEEFQKDPVGLMSRVAQPASKKIDQNKLKPEMDEKGNLTTAGFACSQCGQPLFVYKLEQVSEKGKAYTNYFGRCNVAEHEKLIKLAQLKPEKDSDEAVTYSLGKFGQRALDFYSIHVTKESTHPVKPLAQIAGNRYASGPVGKALSDACMGTIASFLSKYQDIIIEHQKVVKGNQKRLESLRELAGKENLEYPSVTLPPQPHTSEGVDAYNEVIARVRMWVNLNLWQKLKLSRDDAKPLLRLKGFPSFPLVERQANEVDWWDMVCNVKKLINEKKEDGKVFWQNLAGYKRQEALRPYLSSEEDRKKGKKFARYQLGDLLLHLEKKHGEDWGKVYDEAWERIDKKVEGLSKHIKLEEERRSEDAQSKAALTDWLRAKASFVIEGLKEADKDEFCRCELKLQKWYGDLRGKPFAIEAENSILDISGFSKQYNCAFIWQKDGVKKLNLYLIINYFKGGKLRFKKIKPEAFEANRFYTVINKKSGEIVPMEVNFNFDDPNLIILPLAFGKRQGREFIWNDLLSLETGSLKLANGRVIEKTLYNRRTRQDEPALFVALTFERREVLDSSNIKPMNLIGVDRGENIPAVIALTDPEGCPLSRFKDSLGNPTHILRIGESYKEKQRTIQAKKEVEQRRAGGYSRKYASKAKNLADDMVRNTARDLLYYAVTQDAMLIFENLSRGFGRQGKRTFMAERQYTRMEDWLTAKLAYEGLPSQTYLSKTLAQYTSKTCSNCGFTITSADYDRVLEKLKKTATGWMTTINGKELKVEGQITYYNRYKRQNVVKDLSVELDRLSEESVNNDISSWTKGRSGEALSLLKKRFSHRPVQEKFVCLNCGFETHADEQAALNIARSWLFLRSQEYKKYQTNKTTGNTDKRAFVETWQSFYRKKLKEVWKPAV

SEQ ID NO: 43519 - protein, 977 aa, synthetic construct
  REGION 1..977: note = engineered CasX variant
QEIKRINKIRRRLVKDSNTKKAGKTGPMKTLLVRVMTPDLRERLENLRKKPENIPQPISNTSRANLNKLLTDYTEMKKAILHVYWEEFQKDPVGLMSRVAQPASKKIDQNKLKPEMDEKGNLTTAGFACSQCGQPLFVYKLEQVSEKGKAYTNYFGRCNVAEHEKLILLAQLKPEKDSDEAVTYSLGKFGQRALDFYSIHVTKESTHPVKPLAQIAGNRYASPVGKALSDACMGTIASFLSKYQDIIIEHQKVVKGNQKRLESLRELAGKENLEYPSVTLPPQPHTSEGVDAYNEVIARVRMWVNLNLWQKLKLSRDDAKPLLRLKGFPSFPLVERQANEVDWWDMVCNVKKLINEKKEDGKVFWQNLAGYKRQEALRPYLSSEEDRKKGKKFARYQLGDLLLHLEKKHGEDWGKVYDEAWERIDKKVEGLSKHIKLEEERRSEDAQSKAALTDWLRAKASFVIEGLKEADKDEFCRCELKLQKWYGDLRGKPFAIEAENSILDISGFSKQYNCAFIWQKDGVKKLNLYLIINYFKGGKLRFKKIKPEAFEANRFYTVINKKSGEIVPMEVNFNFDDPNLIILPLAFGKRQGREFIWNDLLSLETGSLKLANGRVIEKTLYNRRTRQDEPALFVALTFERREVLDSSNIKPMNLIGVDRGENIPAVIALTDPEGCPLSRFKDSLGNPTHILRIGESYKEKQRTIQAKKEVEQRRAGGYSRKYASKAKNLADDMVRNTARDLLYYAVTQDAMLIFENLSRGFGRQGKRTFMAERQYTRMEDWLTAKLAYEGLPSQTYLSKTLAQYTSKTCSNCGFTITSADYDRVLEKLKKTATGWMTTINGKELKVEGQITYYNRYKRQNVVKDLSVELDRLSEESVNNDISSWTKGRSGEALSLLKKRFSHRPVQEKFVCLNCGFETHADEQAALNIARSWLFLRSQEYKKYQTNKTTGNTDKRAFVETWQSFYRKKLKEVWKPAV

SEQ ID NO: 43520 - protein, 978 aa, synthetic construct
  REGION 1..978: note = engineered CasX variant
QEIKRINKIRRRLVKDSNTKKAGKTGPMKTLLVRVMTPDLRERLENLRKKPENIPQPISNTSRANLNKLLTDYTEMKKAILHVYWEEFQKDPVGLMSRVAQPASKKIDQNKLKPEMDEKGNLTTAGFACSQCGQPLFVYKLEQVSEKGKAYTNYFGRCNVAEHEKLILLAQLKPEKDSDEAVTYSLGKFGQRALDFYSIHVTKESTHPVKPLAQIAGNRYASYPVGKALSDACMGTIASFLSKYQDIIIEHQKVVKGNQKRLESLRELAGKENLEYPSVTLPPQPHTSEGVDAYNEVIARVRMWVNLNLWQKLKLSRDDAKPLLRLKGFPSFPLVERQANEVDWWDMVCNVKKLINEKKEDGKVFWQNLAGYKRQEALRPYLSSEEDRKKGKKFARYQLGDLLLHLEKKHGEDWGKVYDEAWERIDKKVEGLSKHIKLEEERRSEDAQSKAALTDWLRAKASFVIEGLKEADKDEFCRCELKLQKWYGDLRGKPFAIEAENSILDISGFSKQYNCAFIWQKDGVKKLNLYLIINYFKGGKLRFKKIKPEAFEANRFYTVINKKSGEIVPMEVNFNFDDPNLIILPLAFGKRQGREFIWNDLLSLETGSLKLANGRVIEKTLYNRRTRQDEPALFVALTFERREVLDSSNIKPMNLIGVDRGENIPAVIALTDPEGCPLSRFKDSLGNPTHILRIGESYKEKQRTIQAKKEVEQRRAGGYSRKYASKAKNLADDMVRNTARDLLYYAVTQDAMLIFENLSRGFGRQGKRTFMAERQYTRMEDWLTAKLAYNGLPSKTYLSKTLAQYTSKTCSNCGFTITSADYDRVLEKLKKTATGWMTTINGKELKVEGQITYYNRYKRQNVVKDLSVELDRLSEESVNNDISSWTKGRSGEALSLLKKRFSHRPVQEKFVCLNCGFETHADEQAALNIARSWLFLRSQEYKKYQTNKTTGNTDKRAFVETWQSFYRKKLKEVWKPAV

SEQ ID NO: 43521 - protein, 978 aa, synthetic construct
  REGION 1..978: note = engineered CasX variant
QEIKRINKIRRRLVKDSNTKKAGKTGPMKTLLVRVMTPDLRERLENLRKKPENIPQPISNTSRANLNKLLTDYTEMKKAILHVYWEEFQKDPVGLMSRVAQPASKKIDQNKLKPEMDEKGNLTTAGFACSQCGQPLFVYKLEQVSEKGKAYTNYFGRCNVAEHEKLILLAQLKPEKDSDEAVTYSLGKFGQRALDFYSIHVTKESTHPVKPLAQIAGNRYASHPVGKALSDACMGTIASFLSKYQDIIIEHQKVVKGNQKRLESLRELAGKENLEYPSVTLPPQPHTSEGVDAYNEVIARVRMWVNLNLWQKLKLSRDDAKPLLRLKGFPSFPLVERQANEVDWWDMVCNVKKLINEKKEDGKVFWQNLAGYKRQEALRPYLSSEEDRKKGKKFARYQLGDLLLHLEKKHGEDWGKVYDEAWERIDKKVEGLSKHIKLEEERRSEDAQSKAALTDWLRAKASFVIEGLKEADKDEFCRCELKLQKWYGDLRGKPFAIEAENSILDISGFSKQYNCAFIWQKDGVKKLNLYLIINYFKGGKLRFKKIKPEAFEANRFYTVINKKSGEIVPMEVNFNFDDPNLIILPLAFGKRQGREFIWNDLLSLETGSLKLANGRVIEKTLYNRRTRQDEPALFVALTFERREVLDSSNIKPMNLIGVDRGENIPAVIALTDPEGCPLSRFKDSLGNPTHILRIGESYKEKQRTIQAKKEVEQRRAGGYSRKYASKAKNLADDMVRNTARDLLYYAVTQDAMLIFENLSRGFGRQGKRTFMAERQYTRMEDWLTAKLAYNGLPSKTYLSKTLAQYTSKTCSNCGFTITSADYDRVLEKLKKTATGWMTTINGKELKVEGQITYYNRYKRQNVVKDLSVELDRLSEESVNNDISSWTKGRSGEALSLLKKRFSHRPVQEKFVCLNCGFETHADEQAALNIARSWLFLRSQEYKKYQTNKTTGNTDKRAFVETWQSFYRKKLKEVWKPAV

SEQ ID NO: 43522 - protein, 978 aa, synthetic construct
  REGION 1..978: note = engineered CasX variant
QEIKRINKIRRRLVKDSNTKKAGKTGPMKTLLVRVMTPDLRERLENLRKKPENIPQPISNTSRANLNKLLTDYTEMKKAILHVYWEEFQKDPVGLMSRVAQPASKKIDQNKLKPEMDEKGNLTTAGFACSQCGQPLFVYKLEQVSEKGKAYTNYFGRCNVAEHEKLILLAQLKPEKDSDEAVTYSLGKFGQRALDFYSIHVTKESTHPVKPLAQIAGNRYASSPVGKALSDACMGTIASFLSKYQDIIIEHQKVVKGNQKRLESLRELAGKENLEYPSVTLPPQPHTSEGVDAYNEVIARVRMWVNLNLWQKLKLSRDDAKPLLRLKGFPSFPLVERQANEVDWWDMVCNVKKLINEKKEDGKVFWQNLAGYKRQEALRPYLSSEEDRKKGKKFARYQLGDLLLHLEKKHGEDWGKVYDEAWERIDKKVEGLSKHIKLEEERRSEDAQSKAALTDWLRAKASFVIEGLKEADKDEFCRCELKLQKWYGDLRGKPFAIEAENSILDISGFSKQYNCAFIWQKDGVKKLNLYLIINYFKGGKLRFKKIKPEAFEANRFYTVINKKSGEIVPMEVNFNFDDPNLIILPLAFGKRQGREFIWNDLLSLETGSLKLANGRVIEKTLYNRRTRQDEPALFVALTFERREVLDSSNIKPMNLIGVDRGENIPAVIALTDPEGCPLSRFKDSLGNPTHILRIGESYKEKQRTIQAKKEVEQRRAGGYSRKYASKAKNLADDMVRNTARDLLYYAVTQDAMLIFENLSRGFGRQGKRTFMAERQYTRMEDWLTAKLAYNGLPSKTYLSKTLAQYTSKTCSNCGFTITSADYDRVLEKLKKTATGWMTTINGKELKVEGQITYYNRYKRQNVVKDLSVELDRLSEESVNNDISSWTKGRSGEALSLLKKRFSHRPVQEKFVCLNCGFETHADEQAALNIARSWLFLRSQEYKKYQTNKTTGNTDKRAFVETWQSFYRKKLKEVWKPAV

SEQ ID NO: 43523 - protein, 978 aa, synthetic construct
  REGION 1..978: note = engineered CasX variant
QEIKRINKIRRRLVKDSNTKKAGKTGPMKTLLVRVMTPDLRERLENLRKKPENIPQPISNTSRANLNKLLTDYTEMKKAILHVYWEEFQKDPVGLMSRVAQPASKKIDQNKLKPEMDEKGNLTTAGFACSQCGQPLFVYKLEQVSEKGKAYTNYFGRCNVAEHEKLILLAQLKPEKDSDEAVTYSLGKFGQRALDFYSIHVTKESTHPVKPLAQIAGNRYASTPVGKALSDACMGTIASFLSKYQDIIIEHQKVVKGNQKRLESLRELAGKENLEYPSVTLPPQPHTSEGVDAYNEVIARVRMWVNLNLWQKLKLSRDDAKPLLRLKGFPSFPLVERQANEVDWWDMVCNVKKLINEKKEDGKVFWQNLAGYKRQEALRPYLSSEEDRKKGKKFARYQLGDLLLHLEKKHGEDWGKVYDEAWERIDKKVEGLSKHIKLEEERRSEDAQSKAALTDWLRAKASFVIEGLKEADKDEFCRCELKLQKWYGDLRGKPFAIEAENSILDISGFSKQYNCAFIWQKDGVKKLNLYLIINYFKGGKLRFKKIKPEAFEANRFYTVINKKSGEIVPMEVNFNFDDPNLIILPLAFGKRQGREFIWNDLLSLETGSLKLANGRVIEKTLYNRRTRQDEPALFVALTFERREVLDSSNIKPMNLIGVDRGENIPAVIALTDPEGCPLSRFKDSLGNPTHILRIGESYKEKQRTIQAKKEVEQRRAGGYSRKYASKAKNLADDMVRNTARDLLYYAVTQDAMLIFENLSRGFGRQGKRTFMAERQYTRMEDWLTAKLAYNGLPSKTYLSKTLAQYTSKTCSNCGFTITSADYDRVLEKLKKTATGWMTTINGKELKVEGQITYYNRYKRQNVVKDLSVELDRLSEESVNNDISSWTKGRSGEALSLLKKRFSHRPVQEKFVCLNCGFETHADEQAALNIARSWLFLRSQEYKKYQTNKTTGNTDKRAFVETWQSFYRKKLKEVWKPAV

SEQ ID NO: 43524 - protein, 978 aa, synthetic construct
  REGION 1..978: note = engineered CasX variant
QEIKRINKIRRRLVKDSNTKKAGKTGPMKTLLVRVMTPDLRERLENLRKKPENIPQPISNTSRANLNKLLTDYTEMKKAILHVYWEEFQKDPVGLMSRVAQPASKKIDQNKLKPEMDEKGNLTTAGFACSQCGQPLFVYKLEQVSEKGKAYTNYFGRCNVAEHEKLILLAQLKPEKDSDEAVTYSLGKFGQRALDFYSIHVTKESTHPVKPLAQIAGNRYASAPVGKALSDACMGTIASFLSKYQDIIIEHQKVVKGNQKRLESLRELAGKENLEYPSVTLPPQPHTSEGVDAYNEVIARVRMWVNLNLWQKLKLSRDDAKPLLRLKGFPSFPLVERQANEVDWWDMVCNVKKLINEKKEDGKVFWQNLAGYKRQEALRPYLSSEEDRKKGKKFARYQLGDLLLHLEKKHGEDWGKVYDEAWERIDKKVEGLSKHIKLEEERRSEDAQSKAALTDWLRAKASFVIEGLKEADKDEFCRCELKLQKWYGDLRGKPFAIEAENSILDISGFSKQYNCAFIWQKDGVKKLNLYLIINYFKGGKLRFKKIKPEAFEANRFYTVINKKSGEIVPMEVNFNFDDPNLIILPLAFGKRQGREFIWNDLLSLETGSLKLANGRVIEKTLYNRRTRQDEPALFVALTFERREVLDSSNIKPMNLIGVDRGENIPAVIALTDPEGCPLSRFKDSLGNPTHILRIGESYKEKQRTIQAKKEVEQRRAGGYSRKYASKAKNLADDMVRNTARDLLYYAVTQDAMLIFENLSRGFGRQGKRTFMAERQYTRMEDWLTAKLAYNGLPSKTYLSKTLAQYTSKTCSNCGFTITSADYDRVLEKLKKTATGWMTTINGKELKVEGQITYYNRYKRQNVVKDLSVELDRLSEESVNNDISSWTKGRSGEALSLLKKRFSHRPVQEKFVCLNCGFETHADEQAALNIARSWLFLRSQEYKKYQTNKTTGNTDKRAFVETWQSFYRKKLKEVWKPAV

SEQ ID NO: 43525 - protein, 978 aa, synthetic construct
  REGION 1..978: note = engineered CasX variant
QEIKRINKIRRRLVKDSNTKKAGKTGPMKTLLVRVMTPDLRERLENLRKKPENIPQPISNTSRANLNKLLTDYTEMKKAILHVYWEEFQKDPVGLMSRVAQPASKKIDQNKLKPEMDEKGNLTTAGFACSQCGQPLFVYKLEQVSEKGKAYTNYFGRCNVAEHEKLILLAQLKPEKDSDEAVTYSLGKFGQRALDFYSIHVTKESTHPVKPLAQIAGNRYASVPVGKALSDACMGTIASFLSKYQDIIIEHQKVVKGNQKRLESLRELAGKENLEYPSVTLPPQPHTSEGVDAYNEVIARVRMWVNLNLWQKLKLSRDDAKPLLRLKGFPSFPLVERQANEVDWWDMVCNVKKLINEKKEDGKVFWQNLAGYKRQEALRPYLSSEEDRKKGKKFARYQLGDLLLHLEKKHGEDWGKVYDEAWERIDKKVEGLSKHIKLEEERRSEDAQSKAALTDWLRAKASFVIEGLKEADKDEFCRCELKLQKWYGDLRGKPFAIEAENSILDISGFSKQYNCAFIWQKDGVKKLNLYLIINYFKGGKLRFKKIKPEAFEANRFYTVINKKSGEIVPMEVNFNFDDPNLIILPLAFGKRQGREFIWNDLLSLETGSLKLANGRVIEKTLYNRRTRQDEPALFVALTFERREVLDSSNIKPMNLIGVDRGENIPAVIALTDPEGCPLSRFKDSLGNPTHILRIGESYKEKQRTIQAKKEVEQRRAGGYSRKYASKAKNLADDMVRNTARDLLYYAVTQDAMLIFENLSRGFGRQGKRTFMAERQYTRMEDWLTAKLAYNGLPSKTYLSKTLAQYTSKTCSNCGFTITSADYDRVLEKLKKTATGWMTTINGKELKVEGQITYYNRYKRQNVVKDLSVELDRLSEESVNNDISSWTKGRSGEALSLLKKRFSHRPVQEKFVCLNCGFETHADEQAALNIARSWLFLRSQEYKKYQTNKTTGNTDKRAFVETWQSFYRKKLKEVWKPAV

SEQ ID NO: 43526 - protein, 978 aa, synthetic construct
  REGION 1..978: note = engineered CasX variant
QEIKRINKIRRRLVKDSNTKKAGKTGPMKTLLVRVMTPDLRERLENLRKKPENIPQPISNTSRANLNKLLTDYTEMKKAILHVYWEEFQKDPVGLMSRVAQPASKKIDQNKLKPEMDEKGNLTTAGFACSQCGQPLFVYKLEQVSEKGKAYTNYFGRCNVAEHEKLIKLAQLKPEKDSDEAVTYSLGKFGQRALDFYSIHVTKESTHPVKPLAQIAGNRYASGPVGKALSDACMGTIASFLSKYQDIIIEHQKVVKGNQKRLESLRELAGKENLEYPSVTLPPQPHTSEGVDAYNEVIARVRMWVNLNLWQKLKLSRDDAKPLLRLKGFPSFPLVERQANEVDWWDMVCNVKKLINEKKEDGKVFWQNLAGYKRQEALRPYLSSEEDRKKGKKFARYQLGDLLLHLEKKHGEDWGKVYDEAWERIDKKVEGLSKHIKLEEERRSEDAQSKAALTDWLRAKASFVIEGLKEADKDEFCRCELKLQKWYGDLRGKPFAIEAENSILDISGFSKQYNCAFIWQKDGVKKLNLYLIINYFKGGKLRFKKIKPEAFEANRFYTVINKKSGEIVPMEVNFNFDDPNLIILPLAFGKRQGREFIWNDLLSLETGSLKLANGRVIEKTLYNRRTRQDEPALFVALTFERREVLDSSNIKPMNLIGVDRGENIPAVIALTDPEGCPLSRFKDSLGNPTHILRIGESYKEKQRTIQAKKEVEQRRAGGYSRKYASKAKNLADDMVRNTARDLLYYAVTQDAMLIFENLSRGFGRQGKRTFMAERQYTRMEDWLTAKLAYNGLPSKTYLSKTLAQYTSKTCSNCGFTITSADYDRVLEKLKKTATGWMTTINGKELKVEGQITYYNRYKRQNVVKDLSVELDRLSEESVNNDISSWTKGRSGEALSLLKKRFSHRPVQEKFVCLNCGFETHADEQAALNIARSWLFLRSQEYKKYQTNKTTGNTDKRAFVETWQSFYRKKLKEVWKPAV

SEQ ID NO: 43527 - protein, 977 aa, synthetic construct
  REGION 1..977: note = engineered CasX variant
QEIKRINKIRRRLVKDSNTKKAGKTGPMKTLLVRVMTPDLRERLENLRKKPENIPQPISNTSRANLNKLLTDYTEMKKAILHVYWEEFQKDPVGLMSRVAQPASKKIDQNKLKPEMDEKGNLTTAGFACSQCGQPLFVYKLEQVSEKGKAYTNYFGRCNVAEHEKLILLAQLKPEKDSDEAVTYSLGKFGQRALDFYSIHVTKESTHPVKPLAQIAGNRYASPVGKALSDACMGTIASFLSKYQDIIIEHQKVVKGNQKRLESLRELAGKENLEYPSVTLPPQPHTSEGVDAYNEVIARVRMWVNLNLWQKLKLSRDDAKPLLRLKGFPSFPLVERQANEVDWWDMVCNVKKLINEKKEDGKVFWQNLAGYKRQEALRPYLSSEEDRKKGKKFARYQLGDLLLHLEKKHGEDWGKVYDEAWERIDKKVEGLSKHIKLEEERRSEDAQSKAALTDWLRAKASFVIEGLKEADKDEFCRCELKLQKWYGDLRGKPFAIEAENSILDISGFSKQYNCAFIWQKDGVKKLNLYLIINYFKGGKLRFKKIKPEAFEANRFYTVINKKSGEIVPMEVNFNFDDPNLIILPLAFGKRQGREFIWNDLLSLETGSLKLANGRVIEKTLYNRRTRQDEPALFVALTFERREVLDSSNIKPMNLIGVDRGENIPAVIALTDPEGCPLSRFKDSLGNPTHILRIGESYKEKQRTIQAKKEVEQRRAGGYSRKYASKAKNLADDMVRNTARDLLYYAVTQDAMLIFENLSRGFGRQGKRTFMAERQYTRMEDWLTAKLAYNGLPSKTYLSKTLAQYTSKTCSNCGFTITSADYDRVLEKLKKTATGWMTTINGKELKVEGQITYYNRYKRQNVVKDLSVELDRLSEESVNNDISSWTKGRSGEALSLLKKRFSHRPVQEKFVCLNCGFETHADEQAALNIARSWLFLRSQEYKKYQTNKTTGNTDKRAFVETWQSFYRKKLKEVWKPAV

SEQ ID NO: 43528 - protein, 978 aa, synthetic construct
  REGION 1..978: note = engineered CasX variant
QEIKRINKIRRRLVKDSNTKKAGKTGPMKTLLVRVMTPDLRERLENLRKKPENIPQPISNTSRANLNKLLTDYTEMKKAILHVYWEEFQKDPVGLMSRVAQPASKKIDQNKLKPEMDEKGNLTTAGFACSQCGQPLFVYKLEQVSEKGKAYTNYFGRCNVAEHEKLIQLAQLKPEKDSDEAVTYSLGKFGQRALDFYSIHVTKESTHPVKPLAQIAGNRYASYPVGKALSDACMGTIASFLSKYQDIIIEHQKVVKGNQKRLESLRELAGKENLEYPSVTLPPQPHTSEGVDAYNEVIARVRMWVNLNLWQKLKLSRDDAKPLLRLKGFPSFPLVERQANEVDWWDMVCNVKKLINEKKEDGKVFWQNLAGYKRQEALRPYLSSEEDRKKGKKFARYQLGDLLLHLEKKHGEDWGKVYDEAWERIDKKVEGLSKHIKLEEERRSEDAQSKAALTDWLRAKASFVIEGLKEADKDEFCRCELKLQKWYGDLRGKPFAIEAENSILDISGFSKQYNCAFIWQKDGVKKLNLYLIINYFKGGKLRFKKIKPEAFEANRFYTVINKKSGEIVPMEVNFNFDDPNLIILPLAFGKRQGREFIWNDLLSLETGSLKLANGRVIEKTLYNRRTRQDEPALFVALTFERREVLDSSNIKPMNLIGVDRGENIPAVIALTDPEGCPLSRFKDSLGNPTHILRIGESYKEKQRTIQAKKEVEQRRAGGYSRKYASKAKNLADDMVRNTARDLLYYAVTQDAMLIFENLSRGFGRQGKRTFMAERQYTRMEDWLTAKLAYEGLPSKTYLSKTLAQYTSKTCSNCGFTITSADYDRVLEKLKKTATGWMTTINGKELKVEGQITYYNRYKRQNVVKDLSVELDRLSEESVNNDISSWTKGRSGEALSLLKKRFSHRPVQEKFVCLNCGFETHADEQAALNIARSWLFLRSQEYKKYQTNKTTGNTDKRAFVETWQSFYRKKLKEVWKPAV

SEQ ID NO: 43529 - protein, 978 aa, synthetic construct
  REGION 1..978: note = engineered CasX variant
QEIKRINKIRRRLVKDSNTKKAGKTGPMKTLLVRVMTPDLRERLENLRKKPENIPQPISNTSRANLNKLLTDYTEMKKAILHVYWEEFQKDPVGLMSRVAQPASKKIDQNKLKPEMDEKGNLTTAGFACSQCGQPLFVYKLEQVSEKGKAYTNYFGRCNVAEHEKLIQLAQLKPEKDSDEAVTYSLGKFGQRALDFYSIHVTKESTHPVKPLAQIAGNRYASHPVGKALSDACMGTIASFLSKYQDIIIEHQKVVKGNQKRLESLRELAGKENLEYPSVTLPPQPHTSEGVDAYNEVIARVRMWVNLNLWQKLKLSRDDAKPLLRLKGFPSFPLVERQANEVDWWDMVCNVKKLINEKKEDGKVFWQNLAGYKRQEALRPYLSSEEDRKKGKKFARYQLGDLLLHLEKKHGEDWGKVYDEAWERIDKKVEGLSKHIKLEEERRSEDAQSKAALTDWLRAKASFVIEGLKEADKDEFCRCELKLQKWYGDLRGKPFAIEAENSILDISGFSKQYNCAFIWQKDGVKKLNLYLIINYFKGGKLRFKKIKPEAFEANRFYTVINKKSGEIVPMEVNFNFDDPNLIILPLAFGKRQGREFIWNDLLSLETGSLKLANGRVIEKTLYNRRTRQDEPALFVALTFERREVLDSSNIKPMNLIGVDRGENIPAVIALTDPEGCPLSRFKDSLGNPTHILRIGESYKEKQRTIQAKKEVEQRRAGGYSRKYASKAKNLADDMVRNTARDLLYYAVTQDAMLIFENLSRGFGRQGKRTFMAERQYTRMEDWLTAKLAYEGLPSKTYLSKTLAQYTSKTCSNCGFTITSADYDRVLEKLKKTATGWMTTINGKELKVEGQITYYNRYKRQNVVKDLSVELDRLSEESVNNDISSWTKGRSGEALSLLKKRFSHRPVQEKFVCLNCGFETHADEQAALNIARSWLFLRSQEYKKYQTNKTTGNTDKRAFVETWQSFYRKKLKEVWKPAV

SEQ ID NO: 43530 - protein, 978 aa, synthetic construct
  REGION 1..978: note = engineered CasX variant
QEIKRINKIRRRLVKDSNTKKAGKTGPMKTLLVRVMTPDLRERLENLRKKPENIPQPISNTSRANLNKLLTDYTEMKKAILHVYWEEFQKDPVGLMSRVAQPASKKIDQNKLKPEMDEKGNLTTAGFACSQCGQPLFVYKLEQVSEKGKAYTNYFGRCNVAEHEKLIQLAQLKPEKDSDEAVTYSLGKFGQRALDFYSIHVTKESTHPVKPLAQIAGNRYASSPVGKALSDACMGTIASFLSKYQDIIIEHQKVVKGNQKRLESLRELAGKENLEYPSVTLPPQPHTSEGVDAYNEVIARVRMWVNLNLWQKLKLSRDDAKPLLRLKGFPSFPLVERQANEVDWWDMVCNVKKLINEKKEDGKVFWQNLAGYKRQEALRPYLSSEEDRKKGKKFARYQLGDLLLHLEKKHGEDWGKVYDEAWERIDKKVEGLSKHIKLEEERRSEDAQSKAALTDWLRAKASFVIEGLKEADKDEFCRCELKLQKWYGDLRGKPFAIEAENSILDISGFSKQYNCAFIWQKDGVKKLNLYLIINYFKGGKLRFKKIKPEAFEANRFYTVINKKSGEIVPMEVNFNFDDPNLIILPLAFGKRQGREFIWNDLLSLETGSLKLANGRVIEKTLYNRRTRQDEPALFVALTFERREVLDSSNIKPMNLIGVDRGENIPAVIALTDPEGCPLSRFKDSLGNPTHILRIGESYKEKQRTIQAKKEVEQRRAGGYSRKYASKAKNLADDMVRNTARDLLYYAVTQDAMLIFENLSRGFGRQGKRTFMAERQYTRMEDWLTAKLAYEGLPSKTYLSKTLAQYTSKTCSNCGFTITSADYDRVLEKLKKTATGWMTTINGKELKVEGQITYYNRYKRQNVVKDLSVELDRLSEESVNNDISSWTKGRSGEALSLLKKRFSHRPVQEKFVCLNCGFETHADEQAALNIARSWLFLRSQEYKKYQTNKTTGNTDKRAFVETWQSFYRKKLKEVWKPAV

SEQ ID NO: 43531 - protein, 978 aa, synthetic construct
  REGION 1..978: note = engineered CasX variant
QEIKRINKIRRRLVKDSNTKKAGKTGPMKTLLVRVMTPDLRERLENLRKKPENIPQPISNTSRANLNKLLTDYTEMKKAILHVYWEEFQKDPVGLMSRVAQPASKKIDQNKLKPEMDEKGNLTTAGFACSQCGQPLFVYKLEQVSEKGKAYTNYFGRCNVAEHEKLIQLAQLKPEKDSDEAVTYSLGKFGQRALDFYSIHVTKESTHPVKPLAQIAGNRYASTPVGKALSDACMGTIASFLSKYQDIIIEHQKVVKGNQKRLESLRELAGKENLEYPSVTLPPQPHTSEGVDAYNEVIARVRMWVNLNLWQKLKLSRDDAKPLLRLKGFPSFPLVERQANEVDWWDMVCNVKKLINEKKEDGKVFWQNLAGYKRQEALRPYLSSEEDRKKGKKFARYQLGDLLLHLEKKHGEDWGKVYDEAWERIDKKVEGLSKHIKLEEERRSEDAQSKAALTDWLRAKASFVIEGLKEADKDEFCRCELKLQKWYGDLRGKPFAIEAENSILDISGFSKQYNCAFIWQKDGVKKLNLYLIINYFKGGKLRFKKIKPEAFEANRFYTVINKKSGEIVPMEVNFNFDDPNLIILPLAFGKRQGREFIWNDLLSLETGSLKLANGRVIEKTLYNRRTRQDEPALFVALTFERREVLDSSNIKPMNLIGVDRGENIPAVIALTDPEGCPLSRFKDSLGNPTHILRIGESYKEKQRTIQAKKEVEQRRAGGYSRKYASKAKNLADDMVRNTARDLLYYAVTQDAMLIFENLSRGFGRQGKRTFMAERQYTRMEDWLTAKLAYEGLPSKTYLSKTLAQYTSKTCSNCGFTITSADYDRVLEKLKKTATGWMTTINGKELKVEGQITYYNRYKRQNVVKDLSVELDRLSEESVNNDISSWTKGRSGEALSLLKKRFSHRPVQEKFVCLNCGFETHADEQAALNIARSWLFLRSQEYKKYQTNKTTGNTDKRAFVETWQSFYRKKLKEVWKPAV

SEQ ID NO: 43532 - protein, 978 aa, synthetic construct
  REGION 1..978: note = engineered CasX variant
QEIKRINKIRRRLVKDSNTKKAGKTGPMKTLLVRVMTPDLRERLENLRKKPENIPQPISNTSRANLNKLLTDYTEMKKAILHVYWEEFQKDPVGLMSRVAQPASKKIDQNKLKPEMDEKGNLTTAGFACSQCGQPLFVYKLEQVSEKGKAYTNYFGRCNVAEHEKLIQLAQLKPEKDSDEAVTYSLGKFGQRALDFYSIHVTKESTHPVKPLAQIAGNRYASAPVGKALSDACMGTIASFLSKYQDIIIEHQKVVKGNQKRLESLRELAGKENLEYPSVTLPPQPHTSEGVDAYNEVIARVRMWVNLNLWQKLKLSRDDAKPLLRLKGFPSFPLVERQANEVDWWDMVCNVKKLINEKKEDGKVFWQNLAGYKRQEALRPYLSSEEDRKKGKKFARYQLGDLLLHLEKKHGEDWGKVYDEAWERIDKKVEGLSKHIKLEEERRSEDAQSKAALTDWLRAKASFVIEGLKEADKDEFCRCELKLQKWYGDLRGKPFAIEAENSILDISGFSKQYNCAFIWQKDGVKKLNLYLIINYFKGGKLRFKKIKPEAFEANRFYTVINKKSGEIVPMEVNFNFDDPNLIILPLAFGKRQGREFIWNDLLSLETGSLKLANGRVIEKTLYNRRTRQDEPALFVALTFERREVLDSSNIKPMNLIGVDRGENIPAVIALTDPEGCPLSRFKDSLGNPTHILRIGESYKEKQRTIQAKKEVEQRRAGGYSRKYASKAKNLADDMVRNTARDLLYYAVTQDAMLIFENLSRGFGRQGKRTFMAERQYTRMEDWLTAKLAYEGLPSKTYLSKTLAQYTSKTCSNCGFTITSADYDRVLEKLKKTATGWMTTINGKELKVEGQITYYNRYKRQNVVKDLSVELDRLSEESVNNDISSWTKGRSGEALSLLKKRFSHRPVQEKFVCLNCGFETHADEQAALNIARSWLFLRSQEYKKYQTNKTTGNTDKRAFVETWQSFYRKKLKEVWKPAV

SEQ ID NO: 43533 - protein, 978 aa, synthetic construct
  REGION 1..978: note = engineered CasX variant
QEIKRINKIRRRLVKDSNTKKAGKTGPMKTLLVRVMTPDLRERLENLRKKPENIPQPISNTSRANLNKLLTDYTEMKKAILHVYWEEFQKDPVGLMSRVAQPASKKIDQNKLKPEMDEKGNLTTAGFACSQCGQPLFVYKLEQVSEKGKAYTNYFGRCNVAEHEKLIQLAQLKPEKDSDEAVTYSLGKFGQRALDFYSIHVTKESTHPVKPLAQIAGNRYASVPVGKALSDACMGTIASFLSKYQDIIIEHQKVVKGNQKRLESLRELAGKENLEYPSVTLPPQPHTSEGVDAYNEVIARVRMWVNLNLWQKLKLSRDDAKPLLRLKGFPSFPLVERQANEVDWWDMVCNVKKLINEKKEDGKVFWQNLAGYKRQEALRPYLSSEEDRKKGKKFARYQLGDLLLHLEKKHGEDWGKVYDEAWERIDKKVEGLSKHIKLEEERRSEDAQSKAALTDWLRAKASFVIEGLKEADKDEFCRCELKLQKWYGDLRGKPFAIEAENSILDISGFSKQYNCAFIWQKDGVKKLNLYLIINYFKGGKLRFKKIKPEAFEANRFYTVINKKSGEIVPMEVNFNFDDPNLIILPLAFGKRQGREFIWNDLLSLETGSLKLANGRVIEKTLYNRRTRQDEPALFVALTFERREVLDSSNIKPMNLIGVDRGENIPAVIALTDPEGCPLSRFKDSLGNPTHILRIGESYKEKQRTIQAKKEVEQRRAGGYSRKYASKAKNLADDMVRNTARDLLYYAVTQDAMLIFENLSRGFGRQGKRTFMAERQYTRMEDWLTAKLAYEGLPSKTYLSKTLAQYTSKTCSNCGFTITSADYDRVLEKLKKTATGWMTTINGKELKVEGQITYYNRYKRQNVVKDLSVELDRLSEESVNNDISSWTKGRSGEALSLLKKRFSHRPVQEKFVCLNCGFETHADEQAALNIARSWLFLRSQEYKKYQTNKTTGNTDKRAFVETWQSFYRKKLKEVWKPAV

SEQ ID NO: 43534 - protein, 979 aa, synthetic construct
  REGION 1..979: note = engineered CasX variant
QEIKRINKIRRRLVKDSNTKKAGKTGPMKTLLVRVMTPDLRERLENLRKKPENIPQPISNTSRANLNKLLTDYTEMKKAILHVYWEEFQKDPVGLMSRVAQPASKKIDQNKLKPEMDEKGNLTTAGFACSQCGQPLFVYKLEQVSEKGKAYTNYFGRCNVAEHEKLIQKLAQLKPEKDSDEAVTYSLGKFGQRALDFYSIHVTKESTHPVKPLAQIAGNRYASGPVGKALSDACMGTIASFLSKYQDIIIEHQKVVKGNQKRLESLRELAGKENLEYPSVTLPPQPHTSEGVDAYNEVIARVRMWVNLNLWQKLKLSRDDAKPLLRLKGFPSFPLVERQANEVDWWDMVCNVKKLINEKKEDGKVFWQNLAGYKRQEALRPYLSSEEDRKKGKKFARYQLGDLLLHLEKKHGEDWGKVYDEAWERIDKKVEGLSKHIKLEEERRSEDAQSKAALTDWLRAKASFVIEGLKEADKDEFCRCELKLQKWYGDLRGKPFAIEAENSILDISGFSKQYNCAFIWQKDGVKKLNLYLIINYFKGGKLRFKKIKPEAFEANRFYTVINKKSGEIVPMEVNFNFDDPNLIILPLAFGKRQGREFIWNDLLSLETGSLKLANGRVIEKTLYNRRTRQDEPALFVALTFERREVLDSSNIKPMNLIGVDRGENIPAVIALTDPEGCPLSRFKDSLGNPTHILRIGESYKEKQRTIQAKKEVEQRRAGGYSRKYASKAKNLADDMVRNTARDLLYYAVTQDAMLIFENLSRGFGRQGKRTFMAERQYTRMEDWLTAKLAYEGLPSKTYLSKTLAQYTSKTCSNCGFTITSADYDRVLEKLKKTATGWMTTINGKELKVEGQITYYNRYKRQNVVKDLSVELDRLSEESVNNDISSWTKGRSGEALSLLKKRFSHRPVQEKFVCLNCGFETHADEQAALNIARSWLFLRSQEYKKYQTNKTTGNTDKRAFVETWQSFYRKKLKEVWKPAV

SEQ ID NO: 43535 - protein, 977 aa, synthetic construct
  REGION 1..977: note = engineered CasX variant
QEIKRINKIRRRLVKDSNTKKAGKTGPMKTLLVRVMTPDLRERLENLRKKPENIPQPISNTSRANLNKLLTDYTEMKKAILHVYWEEFQKDPVGLMSRVAQPASKKIDQNKLKPEMDEKGNLTTAGFACSQCGQPLFVYKLEQVSEKGKAYTNYFGRCNVAEHEKLIQLAQLKPEKDSDEAVTYSLGKFGQRALDFYSIHVTKESTHPVKPLAQIAGNRYASPVGKALSDACMGTIASFLSKYQDIIIEHQKVVKGNQKRLESLRELAGKENLEYPSVTLPPQPHTSEGVDAYNEVIARVRMWVNLNLWQKLKLSRDDAKPLLRLKGFPSFPLVERQANEVDWWDMVCNVKKLINEKKEDGKVFWQNLAGYKRQEALRPYLSSEEDRKKGKKFARYQLGDLLLHLEKKHGEDWGKVYDEAWERIDKKVEGLSKHIKLEEERRSEDAQSKAALTDWLRAKASFVIEGLKEADKDEFCRCELKLQKWYGDLRGKPFAIEAENSILDISGFSKQYNCAFIWQKDGVKKLNLYLIINYFKGGKLRFKKIKPEAFEANRFYTVINKKSGEIVPMEVNFNFDDPNLIILPLAFGKRQGREFIWNDLLSLETGSLKLANGRVIEKTLYNRRTRQDEPALFVALTFERREVLDSSNIKPMNLIGVDRGENIPAVIALTDPEGCPLSRFKDSLGNPTHILRIGESYKEKQRTIQAKKEVEQRRAGGYSRKYASKAKNLADDMVRNTARDLLYYAVTQDAMLIFENLSRGFGRQGKRTFMAERQYTRMEDWLTAKLAYEGLPSKTYLSKTLAQYTSKTCSNCGFTITSADYDRVLEKLKKTATGWMTTINGKELKVEGQITYYNRYKRQNVVKDLSVELDRLSEESVNNDISSWTKGRSGEALSLLKKRFSHRPVQEKFVCLNCGFETHADEQAALNIARSWLFLRSQEYKKYQTNKTTGNTDKRAFVETWQSFYRKKLKEVWKPAV

SEQ ID NO: 43536 - protein, 978 aa, synthetic construct
  REGION 1..978: note = engineered CasX variant
QEIKRINKIRRRLVKDSNTKKAGKTGPMKTLLVRVMTPDLRERLENLRKKPENIPQPISNTSRANLNKLLTDYTEMKKAILHVYWEEFQKDPVGLMSRVAQPASKKIDQNKLKPEMDEKGNLTTAGFACSQCGQPLFVYKLEQVSEKGKAYTNYFGRCNVAEHEKLILLAQLKPEKDSDEAVTYSLGKFGQRALDFYSIHVTKESTHPVKPLAQIAGNRYASYPVGKALSDACMGTIASFLSKYQDIIIEHQKVVKGNQKRLESLRELAGKENLEYPSVTLPPQPHTSEGVDAYNEVIARVRMWVNLNLWQKLKLSRDDAKPLLRLKGFPSFPLVERQANEVDWWDMVCNVKKLINEKKEDGKVFWQNLAIYKRQEALRPYLSSEEDRKKGKKFARYQLGDLLLHLEKKHGEDWGKVYDEAWERIDKKVEGLSKHIKLEEERRSEDAQSKAALTDWLRAKASFVIEGLKEADKDEFCRCELKLQKWYGDLRGKPFAIEAENSILDISGFSKQYNCAFIWQKDGVKKLNLYLIINYFKGGKLRFKKIKPEAFEANRFYTVINKKSGEIVPMEVNFNFDDPNLIILPLAFGKRQGREFIWNDLLSLETGSLKLANGRVIEKTLYNRRTRQDEPALFVALTFERREVLDSSNIKPMNLIGVDRGENIPAVIALTDPEGCPLSRFKDSLGNPTHILRIGESYKEKQRTIQAKKEVEQRRAGGYSRKYASKAKNLADDMVRNTARDLLYYAVTQDAMLIFENLSRGFGRQGKRTFMAERQYTRMEDWLTAKLAYEGLPSKTYLSKTLAQYTSKTCSNCGFTITSADYDRVLEKLKKTATGWMTTINGKELKVEGQITYYNRYKRQNVVKDLSVELDRLSEESVNNDISSWTKGRSGEALSLLKKRFSHRPVQEKFVCLNCGFETHADEQAALNIARSWLFLRSQEYKKYQTNKTTGNTDKRAFVETWQSFYRKKLKEVWKPAV

SEQ ID NO: 43537 - protein, 978 aa, synthetic construct
  REGION 1..978: note = engineered CasX variant
QEIKRINKIRRRLVKDSNTKKAGKTGPMKTLLVRVMTPDLRERLENLRKKPENIPQPISNTSRANLNKLLTDYTEMKKAILHVYWEEFQKDPVGLMSRVAQPASKKIDQNKLKPEMDEKGNLTTAGFACSQCGQPLFVYKLEQVSEKGKAYTNYFGRCNVAEHEKLILLAQLKPEKDSDEAVTYSLGKFGQRALDFYSIHVTKESTHPVKPLAQIAGNRYASHPVGKALSDACMGTIASFLSKYQDIIIEHQKVVKGNQKRLESLRELAGKENLEYPSVTLPPQPHTSEGVDAYNEVIARVRMWVNLNLWQKLKLSRDDAKPLLRLKGFPSFPLVERQANEVDWWDMVCNVKKLINEKKEDGKVFWQNLAIYKRQEALRPYLSSEEDRKKGKKFARYQLGDLLLHLEKKHGEDWGKVYDEAWERIDKKVEGLSKHIKLEEERRSEDAQSKAALTDWLRAKASFVIEGLKEADKDEFCRCELKLQKWYGDLRGKPFAIEAENSILDISGFSKQYNCAFIWQKDGVKKLNLYLIINYFKGGKLRFKKIKPEAFEANRFYTVINKKSGEIVPMEVNFNFDDPNLIILPLAFGKRQGREFIWNDLLSLETGSLKLANGRVIEKTLYNRRTRQDEPALFVALTFERREVLDSSNIKPMNLIGVDRGENIPAVIALTDPEGCPLSRFKDSLGNPTHILRIGESYKEKQRTIQAKKEVEQRRAGGYSRKYASKAKNLADDMVRNTARDLLYYAVTQDAMLIFENLSRGFGRQGKRTFMAERQYTRMEDWLTAKLAYEGLPSKTYLSKTLAQYTSKTCSNCGFTITSADYDRVLEKLKKTATGWMTTINGKELKVEGQITYYNRYKRQNVVKDLSVELDRLSEESVNNDISSWTKGRSGEALSLLKKRFSHRPVQEKFVCLNCGFETHADEQAALNIARSWLFLRSQEYKKYQTNKTTGNTDKRAFVETWQSFYRKKLKEVWKPAV

SEQ ID NO: 43538 - protein, 978 aa, synthetic construct
  REGION 1..978: note = engineered CasX variant
QEIKRINKIRRRLVKDSNTKKAGKTGPMKTLLVRVMTPDLRERLENLRKKPENIPQPISNTSRANLNKLLTDYTEMKKAILHVYWEEFQKDPVGLMSRVAQPASKKIDQNKLKPEMDEKGNLTTAGFACSQCGQPLFVYKLEQVSEKGKAYTNYFGRCNVAEHEKLILLAQLKPEKDSDEAVTYSLGKFGQRALDFYSIHVTKESTHPVKPLAQIAGNRYASSPVGKALSDACMGTIASFLSKYQDIIIEHQKVVKGNQKRLESLRELAGKENLEYPSVTLPPQPHTSEGVDAYNEVIARVRMWVNLNLWQKLKLSRDDAKPLLRLKGFPSFPLVERQANEVDWWDMVCNVKKLINEKKEDGKVFWQNLAIYKRQEALRPYLSSEEDRKKGKKFARYQLGDLLLHLEKKHGEDWGKVYDEAWERIDKKVEGLSKHIKLEEERRSEDAQSKAALTDWLRAKASFVIEGLKEADKDEFCRCELKLQKWYGDLRGKPFAIEAENSILDISGFSKQYNCAFIWQKDGVKKLNLYLIINYFKGGKLRFKKIKPEAFEANRFYTVINKKSGEIVPMEVNFNFDDPNLIILPLAFGKRQGREFIWNDLLSLETGSLKLANGRVIEKTLYNRRTRQDEPALFVALTFERREVLDSSNIKPMNLIGVDRGENIPAVIALTDPEGCPLSRFKDSLGNPTHILRIGESYKEKQRTIQAKKEVEQRRAGGYSRKYASKAKNLADDMVRNTARDLLYYAVTQDAMLIFENLSRGFGRQGKRTFMAERQYTRMEDWLTAKLAYEGLPSKTYLSKTLAQYTSKTCSNCGFTITSADYDRVLEKLKKTATGWMTTINGKELKVEGQITYYNRYKRQNVVKDLSVELDRLSEESVNNDISSWTKGRSGEALSLLKKRFSHRPVQEKFVCLNCGFETHADEQAALNIARSWLFLRSQEYKKYQTNKTTGNTDKRAFVETWQSFYRKKLKEVWKPAV

SEQ ID NO: 43539 - protein, 978 aa, synthetic construct
  REGION 1..978: note = engineered CasX variant
QEIKRINKIRRRLVKDSNTKKAGKTGPMKTLLVRVMTPDLRERLENLRKKPENIPQPISNTSRANLNKLLTDYTEMKKAILHVYWEEFQKDPVGLMSRVAQPASKKIDQNKLKPEMDEKGNLTTAGFACSQCGQPLFVYKLEQVSEKGKAYTNYFGRCNVAEHEKLILLAQLKPEKDSDEAVTYSLGKFGQRALDFYSIHVTKESTHPVKPLAQIAGNRYASTPVGKALSDACMGTIASFLSKYQDIIIEHQKVVKGNQKRLESLRELAGKENLEYPSVTLPPQPHTSEGVDAYNEVIARVRMWVNLNLWQKLKLSRDDAKPLLRLKGFPSFPLVERQANEVDWWDMVCNVKKLINEKKEDGKVFWQNLAIYKRQEALRPYLSSEEDRKKGKKFARYQLGDLLLHLEKKHGEDWGKVYDEAWERIDKKVEGLSKHIKLEEERRSEDAQSKAALTDWLRAKASFVIEGLKEADKDEFCRCELKLQKWYGDLRGKPFAIEAENSILDISGFSKQYNCAFIWQKDGVKKLNLYLIINYFKGGKLRFKKIKPEAFEANRFYTVINKKSGEIVPMEVNFNFDDPNLIILPLAFGKRQGREFIWNDLLSLETGSLKLANGRVIEKTLYNRRTRQDEPALFVALTFERREVLDSSNIKPMNLIGVDRGENIPAVIALTDPEGCPLSRFKDSLGNPTHILRIGESYKEKQRTIQAKKEVEQRRAGGYSRKYASKAKNLADDMVRNTARDLLYYAVTQDAMLIFENLSRGFGRQGKRTFMAERQYTRMEDWLTAKLAYEGLPSKTYLSKTLAQYTSKTCSNCGFTITSADYDRVLEKLKKTATGWMTTINGKELKVEGQITYYNRYKRQNVVKDLSVELDRLSEESVNNDISSWTKGRSGEALSLLKKRFSHRPVQEKFVCLNCGFETHADEQAALNIARSWLFLRSQEYKKYQTNKTTGNTDKRAFVETWQSFYRKKLKEVWKPAV

SEQ ID NO: 43540 - protein, 978 aa, synthetic construct
  REGION 1..978: note = engineered CasX variant
QEIKRINKIRRRLVKDSNTKKAGKTGPMKTLLVRVMTPDLRERLENLRKKPENIPQPISNTSRANLNKLLTDYTEMKKAILHVYWEEFQKDPVGLMSRVAQPASKKIDQNKLKPEMDEKGNLTTAGFACSQCGQPLFVYKLEQVSEKGKAYTNYFGRCNVAEHEKLILLAQLKPEKDSDEAVTYSLGKFGQRALDFYSIHVTKESTHPVKPLAQIAGNRYASAPVGKALSDACMGTIASFLSKYQDIIIEHQKVVKGNQKRLESLRELAGKENLEYPSVTLPPQPHTSEGVDAYNEVIARVRMWVNLNLWQKLKLSRDDAKPLLRLKGFPSFPLVERQANEVDWWDMVCNVKKLINEKKEDGKVFWQNLAIYKRQEALRPYLSSEEDRKKGKKFARYQLGDLLLHLEKKHGEDWGKVYDEAWERIDKKVEGLSKHIKLEEERRSEDAQSKAALTDWLRAKASFVIEGLKEADKDEFCRCELKLQKWYGDLRGKPFAIEAENSILDISGFSKQYNCAFIWQKDGVKKLNLYLIINYFKGGKLRFKKIKPEAFEANRFYTVINKKSGEIVPMEVNFNFDDPNLIILPLAFGKRQGREFIWNDLLSLETGSLKLANGRVIEKTLYNRRTRQDEPALFVALTFERREVLDSSNIKPMNLIGVDRGENIPAVIALTDPEGCPLSRFKDSLGNPTHILRIGESYKEKQRTIQAKKEVEQRRAGGYSRKYASKAKNLADDMVRNTARDLLYYAVTQDAMLIFENLSRGFGRQGKRTFMAERQYTRMEDWLTAKLAYEGLPSKTYLSKTLAQYTSKTCSNCGFTITSADYDRVLEKLKKTATGWMTTINGKELKVEGQITYYNRYKRQNVVKDLSVELDRLSEESVNNDISSWTKGRSGEALSLLKKRFSHRPVQEKFVCLNCGFETHADEQAALNIARSWLFLRSQEYKKYQTNKTTGNTDKRAFVETWQSFYRKKLKEVWKPAV

SEQ ID NO: 43541 - protein, 978 aa, synthetic construct
  REGION 1..978: note = engineered CasX variant
QEIKRINKIRRRLVKDSNTKKAGKTGPMKTLLVRVMTPDLRERLENLRKKPENIPQPISNTSRANLNKLLTDYTEMKKAILHVYWEEFQKDPVGLMSRVAQPASKKIDQNKLKPEMDEKGNLTTAGFACSQCGQPLFVYKLEQVSEKGKAYTNYFGRCNVAEHEKLILLAQLKPEKDSDEAVTYSLGKFGQRALDFYSIHVTKESTHPVKPLAQIAGNRYASVPVGKALSDACMGTIASFLSKYQDIIIEHQKVVKGNQKRLESLRELAGKENLEYPSVTLPPQPHTSEGVDAYNEVIARVRMWVNLNLWQKLKLSRDDAKPLLRLKGFPSFPLVERQANEVDWWDMVCNVKKLINEKKEDGKVFWQNLAIYKRQEALRPYLSSEEDRKKGKKFARYQLGDLLLHLEKKHGEDWGKVYDEAWERIDKKVEGLSKHIKLEEERRSEDAQSKAALTDWLRAKASFVIEGLKEADKDEFCRCELKLQKWYGDLRGKPFAIEAENSILDISGFSKQYNCAFIWQKDGVKKLNLYLIINYFKGGKLRFKKIKPEAFEANRFYTVINKKSGEIVPMEVNFNFDDPNLIILPLAFGKRQGREFIWNDLLSLETGSLKLANGRVIEKTLYNRRTRQDEPALFVALTFERREVLDSSNIKPMNLIGVDRGENIPAVIALTDPEGCPLSRFKDSLGNPTHILRIGESYKEKQRTIQAKKEVEQRRAGGYSRKYASKAKNLADDMVRNTARDLLYYAVTQDAMLIFENLSRGFGRQGKRTFMAERQYTRMEDWLTAKLAYEGLPSKTYLSKTLAQYTSKTCSNCGFTITSADYDRVLEKLKKTATGWMTTINGKELKVEGQITYYNRYKRQNVVKDLSVELDRLSEESVNNDISSWTKGRSGEALSLLKKRFSHRPVQEKFVCLNCGFETHADEQAALNIARSWLFLRSQEYKKYQTNKTTGNTDKRAFVETWQSFYRKKLKEVWKPAV

SEQ ID NO: 43542 - protein, 978 aa, synthetic construct
  REGION 1..978: note = engineered CasX variant
QEIKRINKIRRRLVKDSNTKKAGKTGPMKTLLVRVMTPDLRERLENLRKKPENIPQPISNTSRANLNKLLTDYTEMKKAILHVYWEEFQKDPVGLMSRVAQPASKKIDQNKLKPEMDEKGNLTTAGFACSQCGQPLFVYKLEQVSEKGKAYTNYFGRCNVAEHEKLIKLAQLKPEKDSDEAVTYSLGKFGQRALDFYSIHVTKESTHPVKPLAQIAGNRYASGPVGKALSDACMGTIASFLSKYQDIIIEHQKVVKGNQKRLESLRELAGKENLEYPSVTLPPQPHTSEGVDAYNEVIARVRMWVNLNLWQKLKLSRDDAKPLLRLKGFPSFPLVERQANEVDWWDMVCNVKKLINEKKEDGKVFWQNLAIYKRQEALRPYLSSEEDRKKGKKFARYQLGDLLLHLEKKHGEDWGKVYDEAWERIDKKVEGLSKHIKLEEERRSEDAQSKAALTDWLRAKASFVIEGLKEADKDEFCRCELKLQKWYGDLRGKPFAIEAENSILDISGFSKQYNCAFIWQKDGVKKLNLYLIINYFKGGKLRFKKIKPEAFEANRFYTVINKKSGEIVPMEVNFNFDDPNLIILPLAFGKRQGREFIWNDLLSLETGSLKLANGRVIEKTLYNRRTRQDEPALFVALTFERREVLDSSNIKPMNLIGVDRGENIPAVIALTDPEGCPLSRFKDSLGNPTHILRIGESYKEKQRTIQAKKEVEQRRAGGYSRKYASKAKNLADDMVRNTARDLLYYAVTQDAMLIFENLSRGFGRQGKRTFMAERQYTRMEDWLTAKLAYEGLPSKTYLSKTLAQYTSKTCSNCGFTITSADYDRVLEKLKKTATGWMTTINGKELKVEGQITYYNRYKRQNVVKDLSVELDRLSEESVNNDISSWTKGRSGEALSLLKKRFSHRPVQEKFVCLNCGFETHADEQAALNIARSWLFLRSQEYKKYQTNKTTGNTDKRAFVETWQSFYRKKLKEVWKPAV

SEQ ID NO: 43543 - protein, 977 aa, synthetic construct
  REGION 1..977: note = engineered CasX variant
QEIKRINKIRRRLVKDSNTKKAGKTGPMKTLLVRVMTPDLRERLENLRKKPENIPQPISNTSRANLNKLLTDYTEMKKAILHVYWEEFQKDPVGLMSRVAQPASKKIDQNKLKPEMDEKGNLTTAGFACSQCGQPLFVYKLEQVSEKGKAYTNYFGRCNVAEHEKLILLAQLKPEKDSDEAVTYSLGKFGQRALDFYSIHVTKESTHPVKPLAQIAGNRYASPVGKALSDACMGTIASFLSKYQDIIIEHQKVVKGNQKRLESLRELAGKENLEYPSVTLPPQPHTSEGVDAYNEVIARVRMWVNLNLWQKLKLSRDDAKPLLRLKGFPSFPLVERQANEVDWWDMVCNVKKLINEKKEDGKVFWQNLAIYKRQEALRPYLSSEEDRKKGKKFARYQLGDLLLHLEKKHGEDWGKVYDEAWERIDKKVEGLSKHIKLEEERRSEDAQSKAALTDWLRAKASFVIEGLKEADKDEFCRCELKLQKWYGDLRGKPFAIEAENSILDISGFSKQYNCAFIWQKDGVKKLNLYLIINYFKGGKLRFKKIKPEAFEANRFYTVINKKSGEIVPMEVNFNFDDPNLIILPLAFGKRQGREFIWNDLLSLETGSLKLANGRVIEKTLYNRRTRQDEPALFVALTFERREVLDSSNIKPMNLIGVDRGENIPAVIALTDPEGCPLSRFKDSLGNPTHILRIGESYKEKQRTIQAKKEVEQRRAGGYSRKYASKAKNLADDMVRNTARDLLYYAVTQDAMLIFENLSRGFGRQGKRTFMAERQYTRMEDWLTAKLAYEGLPSKTYLSKTLAQYTSKTCSNCGFTITSADYDRVLEKLKKTATGWMTTINGKELKVEGQITYYNRYKRQNVVKDLSVELDRLSEESVNNDISSWTKGRSGEALSLLKKRFSHRPVQEKFVCLNCGFETHADEQAALNIARSWLFLRSQEYKKYQTNKTTGNTDKRAFVETWQSFYRKKLKEVWKPAV

SEQ ID NO: 43544 - protein, 978 aa, synthetic construct
  REGION 1..978: note = engineered CasX variant
QEIKRINKIRRRLVKDSNTKKAGKTGPMKTLLVRVMTPDLRERLENLRKKPENIPQPISNTSRANLNKLLTDYTEMKKAILHVYWEEFQKDPVGLMSRVAQPASKKIDQNKLKPEMDEKGNLTTAGFACSQCGQPLFVYKLEQVSEKGKAYTNYFGRCNVAEHEKLILLAQLKPEKDSDEAVTYSLGKFGQRALDFYSIHVTKESTHPVKPLAQIAGNRYASYPVGKALSDACMGTIASFLSKYQDIIIEHQKVVKGNQKRLESLRELAGKENLEYPSVTLPPQPHTSEGVDAYNEVIARVRMWVNLNLWQKLKLSRDDAKPLLRLKGFPSFPLVERQANEVDWWDMVCNVKKLINEKKEDGKVFWQNLAGYKRQEALRPYLSSEEDREKGKKFARYQLGDLLLHLEKKHGEDWGKVYDEAWERIDKKVEGLSKHIKLEEERRSEDAQSKAALTDWLRAKASFVIEGLKEADKDEFCRCELKLQKWYGDLRGKPFAIEAENSILDISGFSKQYNCAFIWQKDGVKKLNLYLIINYFKGGKLRFKKIKPEAFEANRFYTVINKKSGEIVPMEVNFNFDDPNLIILPLAFGKRQGREFIWNDLLSLETGSLKLANGRVIEKTLYNRRTRQDEPALFVALTFERREVLDSSNIKPMNLIGVDRGENIPAVIALTDPEGCPLSRFKDSLGNPTHILRIGESYKEKQRTIQAKKEVEQRRAGGYSRKYASKAKNLADDMVRNTARDLLYYAVTQDAMLIFENLSRGFGRQGKRTFMAERQYTRMEDWLTAKLAYEGLPSKTYLSKTLAQYTSKTCSNCGFTITSADYDRVLEKLKKTATGWMTTINGKELKVEGQITYYNRYKRQNVVKDLSVELDRLSEESVNNDISSWTKGRSGEALSLLKKRFSHRPVQEKFVCLNCGFETHADEQAALNIARSWLFLRSQEYKKYQTNKTTGNTDKRAFVETWQSFYRKKLKEVWKPAV

SEQ ID NO: 43545 - protein, 978 aa, synthetic construct
  REGION 1..978: note = engineered CasX variant
QEIKRINKIRRRLVKDSNTKKAGKTGPMKTLLVRVMTPDLRERLENLRKKPENIPQPISNTSRANLNKLLTDYTEMKKAILHVYWEEFQKDPVGLMSRVAQPASKKIDQNKLKPEMDEKGNLTTAGFACSQCGQPLFVYKLEQVSEKGKAYTNYFGRCNVAEHEKLILLAQLKPEKDSDEAVTYSLGKFGQRALDFYSIHVTKESTHPVKPLAQIAGNRYASHPVGKALSDACMGTIASFLSKYQDIIIEHQKVVKGNQKRLESLRELAGKENLEYPSVTLPPQPHTSEGVDAYNEVIARVRMWVNLNLWQKLKLSRDDAKPLLRLKGFPSFPLVERQANEVDWWDMVCNVKKLINEKKEDGKVFWQNLAGYKRQEALRPYLSSEEDREKGKKFARYQLGDLLLHLEKKHGEDWGKVYDEAWERIDKKVEGLSKHIKLEEERRSEDAQSKAALTDWLRAKASFVIEGLKEADKDEFCRCELKLQKWYGDLRGKPFAIEAENSILDISGFSKQYNCAFIWQKDGVKKLNLYLIINYFKGGKLRFKKIKPEAFEANRFYTVINKKSGEIVPMEVNFNFDDPNLIILPLAFGKRQGREFIWNDLLSLETGSLKLANGRVIEKTLYNRRTRQDEPALFVALTFERREVLDSSNIKPMNLIGVDRGENIPAVIALTDPEGCPLSRFKDSLGNPTHILRIGESYKEKQRTIQAKKEVEQRRAGGYSRKYASKAKNLADDMVRNTARDLLYYAVTQDAMLIFENLSRGFGRQGKRTFMAERQYTRMEDWLTAKLAYEGLPSKTYLSKTLAQYTSKTCSNCGFTITSADYDRVLEKLKKTATGWMTTINGKELKVEGQITYYNRYKRQNVVKDLSVELDRLSEESVNNDISSWTKGRSGEALSLLKKRFSHRPVQEKFVCLNCGFETHADEQAALNIARSWLFLRSQEYKKYQTNKTTGNTDKRAFVETWQSFYRKKLKEVWKPAV

SEQ ID NO: 43546 - protein, 978 aa, synthetic construct
  REGION 1..978: note = engineered CasX variant
QEIKRINKIRRRLVKDSNTKKAGKTGPMKTLLVRVMTPDLRERLENLRKKPENIPQPISNTSRANLNKLLTDYTEMKKAILHVYWEEFQKDPVGLMSRVAQPASKKIDQNKLKPEMDEKGNLTTAGFACSQCGQPLFVYKLEQVSEKGKAYTNYFGRCNVAEHEKLILLAQLKPEKDSDEAVTYSLGKFGQRALDFYSIHVTKESTHPVKPLAQIAGNRYASSPVGKALSDACMGTIASFLSKYQDIIIEHQKVVKGNQKRLESLRELAGKENLEYPSVTLPPQPHTSEGVDAYNEVIARVRMWVNLNLWQKLKLSRDDAKPLLRLKGFPSFPLVERQANEVDWWDMVCNVKKLINEKKEDGKVFWQNLAGYKRQEALRPYLSSEEDREKGKKFARYQLGDLLLHLEKKHGEDWGKVYDEAWERIDKKVEGLSKHIKLEEERRSEDAQSKAALTDWLRAKASFVIEGLKEADKDEFCRCELKLQKWYGDLRGKPFAIEAENSILDISGFSKQYNCAFIWQKDGVKKLNLYLIINYFKGGKLRFKKIKPEAFEANRFYTVINKKSGEIVPMEVNFNFDDPNLIILPLAFGKRQGREFIWNDLLSLETGSLKLANGRVIEKTLYNRRTRQDEPALFVALTFERREVLDSSNIKPMNLIGVDRGENIPAVIALTDPEGCPLSRFKDSLGNPTHILRIGESYKEKQRTIQAKKEVEQRRAGGYSRKYASKAKNLADDMVRNTARDLLYYAVTQDAMLIFENLSRGFGRQGKRTFMAERQYTRMEDWLTAKLAYEGLPSKTYLSKTLAQYTSKTCSNCGFTITSADYDRVLEKLKKTATGWMTTINGKELKVEGQITYYNRYKRQNVVKDLSVELDRLSEESVNNDISSWTKGRSGEALSLLKKRFSHRPVQEKFVCLNCGFETHADEQAALNIARSWLFLRSQEYKKYQTNKTTGNTDKRAFVETWQSFYRKKLKEVWKPAV

SEQ ID NO: 43547 - protein, 978 aa, synthetic construct
  REGION 1..978: note = engineered CasX variant
QEIKRINKIRRRLVKDSNTKKAGKTGPMKTLLVRVMTPDLRERLENLRKKPENIPQPISNTSRANLNKLLTDYTEMKKAILHVYWEEFQKDPVGLMSRVAQPASKKIDQNKLKPEMDEKGNLTTAGFACSQCGQPLFVYKLEQVSEKGKAYTNYFGRCNVAEHEKLILLAQLKPEKDSDEAVTYSLGKFGQRALDFYSIHVTKESTHPVKPLAQIAGNRYASTPVGKALSDACMGTIASFLSKYQDIIIEHQKVVKGNQKRLESLRELAGKENLEYPSVTLPPQPHTSEGVDAYNEVIARVRMWVNLNLWQKLKLSRDDAKPLLRLKGFPSFPLVERQANEVDWWDMVCNVKKLINEKKEDGKVFWQNLAGYKRQEALRPYLSSEEDREKGKKFARYQLGDLLLHLEKKHGEDWGKVYDEAWERIDKKVEGLSKHIKLEEERRSEDAQSKAALTDWLRAKASFVIEGLKEADKDEFCRCELKLQKWYGDLRGKPFAIEAENSILDISGFSKQYNCAFIWQKDGVKKLNLYLIINYFKGGKLRFKKIKPEAFEANRFYTVINKKSGEIVPMEVNFNFDDPNLIILPLAFGKRQGREFIWNDLLSLETGSLKLANGRVIEKTLYNRRTRQDEPALFVALTFERREVLDSSNIKPMNLIGVDRGENIPAVIALTDPEGCPLSRFKDSLGNPTHILRIGESYKEKQRTIQAKKEVEQRRAGGYSRKYASKAKNLADDMVRNTARDLLYYAVTQDAMLIFENLSRGFGRQGKRTFMAERQYTRMEDWLTAKLAYEGLPSKTYLSKTLAQYTSKTCSNCGFTITSADYDRVLEKLKKTATGWMTTINGKELKVEGQITYYNRYKRQNVVKDLSVELDRLSEESVNNDISSWTKGRSGEALSLLKKRFSHRPVQEKFVCLNCGFETHADEQAALNIARSWLFLRSQEYKKYQTNKTTGNTDKRAFVETWQSFYRKKLKEVWKPAV

SEQ ID NO: 43548 - protein, 978 aa, synthetic construct
  REGION 1..978: note = engineered CasX variant
QEIKRINKIRRRLVKDSNTKKAGKTGPMKTLLVRVMTPDLRERLENLRKKPENIPQPISNTSRANLNKLLTDYTEMKKAILHVYWEEFQKDPVGLMSRVAQPASKKIDQNKLKPEMDEKGNLTTAGFACSQCGQPLFVYKLEQVSEKGKAYTNYFGRCNVAEHEKLILLAQLKPEKDSDEAVTYSLGKFGQRALDFYSIHVTKESTHPVKPLAQIAGNRYASAPVGKALSDACMGTIASFLSKYQDIIIEHQKVVKGNQKRLESLRELAGKENLEYPSVTLPPQPHTSEGVDAYNEVIARVRMWVNLNLWQKLKLSRDDAKPLLRLKGFPSFPLVERQANEVDWWDMVCNVKKLINEKKEDGKVFWQNLAGYKRQEALRPYLSSEEDREKGKKFARYQLGDLLLHLEKKHGEDWGKVYDEAWERIDKKVEGLSKHIKLEEERRSEDAQSKAALTDWLRAKASFVIEGLKEADKDEFCRCELKLQKWYGDLRGKPFAIEAENSILDISGFSKQYNCAFIWQKDGVKKLNLYLIINYFKGGKLRFKKIKPEAFEANRFYTVINKKSGEIVPMEVNFNFDDPNLIILPLAFGKRQGREFIWNDLLSLETGSLKLANGRVIEKTLYNRRTRQDEPALFVALTFERREVLDSSNIKPMNLIGVDRGENIPAVIALTDPEGCPLSRFKDSLGNPTHILRIGESYKEKQRTIQAKKEVEQRRAGGYSRKYASKAKNLADDMVRNTARDLLYYAVTQDAMLIFENLSRGFGRQGKRTFMAERQYTRMEDWLTAKLAYEGLPSKTYLSKTLAQYTSKTCSNCGFTITSADYDRVLEKLKKTATGWMTTINGKELKVEGQITYYNRYKRQNVVKDLSVELDRLSEESVNNDISSWTKGRSGEALSLLKKRFSHRPVQEKFVCLNCGFETHADEQAALNIARSWLFLRSQEYKKYQTNKTTGNTDKRAFVETWQSFYRKKLKEVWKPAV

SEQ ID NO: 43549 - protein, 978 aa, synthetic construct
  REGION 1..978: note = engineered CasX variant
QEIKRINKIRRRLVKDSNTKKAGKTGPMKTLLVRVMTPDLRERLENLRKKPENIPQPISNTSRANLNKLLTDYTEMKKAILHVYWEEFQKDPVGLMSRVAQPASKKIDQNKLKPEMDEKGNLTTAGFACSQCGQPLFVYKLEQVSEKGKAYTNYFGRCNVAEHEKLILLAQLKPEKDSDEAVTYSLGKFGQRALDFYSIHVTKESTHPVKPLAQIAGNRYASVPVGKALSDACMGTIASFLSKYQDIIIEHQKVVKGNQKRLESLRELAGKENLEYPSVTLPPQPHTSEGVDAYNEVIARVRMWVNLNLWQKLKLSRDDAKPLLRLKGFPSFPLVERQANEVDWWDMVCNVKKLINEKKEDGKVFWQNLAGYKRQEALRPYLSSEEDREKGKKFARYQLGDLLLHLEKKHGEDWGKVYDEAWERIDKKVEGLSKHIKLEEERRSEDAQSKAALTDWLRAKASFVIEGLKEADKDEFCRCELKLQKWYGDLRGKPFAIEAENSILDISGFSKQYNCAFIWQKDGVKKLNLYLIINYFKGGKLRFKKIKPEAFEANRFYTVINKKSGEIVPMEVNFNFDDPNLIILPLAFGKRQGREFIWNDLLSLETGSLKLANGRVIEKTLYNRRTRQDEPALFVALTFERREVLDSSNIKPMNLIGVDRGENIPAVIALTDPEGCPLSRFKDSLGNPTHILRIGESYKEKQRTIQAKKEVEQRRAGGYSRKYASKAKNLADDMVRNTARDLLYYAVTQDAMLIFENLSRGFGRQGKRTFMAERQYTRMEDWLTAKLAYEGLPSKTYLSKTLAQYTSKTCSNCGFTITSADYDRVLEKLKKTATGWMTTINGKELKVEGQITYYNRYKRQNVVKDLSVELDRLSEESVNNDISSWTKGRSGEALSLLKKRFSHRPVQEKFVCLNCGFETHADEQAALNIARSWLFLRSQEYKKYQTNKTTGNTDKRAFVETWQSFYRKKLKEVWKPAV

SEQ ID NO: 43550 - protein, 978 aa, synthetic construct
  REGION 1..978: note = engineered CasX variant
QEIKRINKIRRRLVKDSNTKKAGKTGPMKTLLVRVMTPDLRERLENLRKKPENIPQPISNTSRANLNKLLTDYTEMKKAILHVYWEEFQKDPVGLMSRVAQPASKKIDQNKLKPEMDEKGNLTTAGFACSQCGQPLFVYKLEQVSEKGKAYTNYFGRCNVAEHEKLIKLAQLKPEKDSDEAVTYSLGKFGQRALDFYSIHVTKESTHPVKPLAQIAGNRYASGPVGKALSDACMGTIASFLSKYQDIIIEHQKVVKGNQKRLESLRELAGKENLEYPSVTLPPQPHTSEGVDAYNEVIARVRMWVNLNLWQKLKLSRDDAKPLLRLKGFPSFPLVERQANEVDWWDMVCNVKKLINEKKEDGKVFWQNLAGYKRQEALRPYLSSEEDREKGKKFARYQLGDLLLHLEKKHGEDWGKVYDEAWERIDKKVEGLSKHIKLEEERRSEDAQSKAALTDWLRAKASFVIEGLKEADKDEFCRCELKLQKWYGDLRGKPFAIEAENSILDISGFSKQYNCAFIWQKDGVKKLNLYLIINYFKGGKLRFKKIKPEAFEANRFYTVINKKSGEIVPMEVNFNFDDPNLIILPLAFGKRQGREFIWNDLLSLETGSLKLANGRVIEKTLYNRRTRQDEPALFVALTFERREVLDSSNIKPMNLIGVDRGENIPAVIALTDPEGCPLSRFKDSLGNPTHILRIGESYKEKQRTIQAKKEVEQRRAGGYSRKYASKAKNLADDMVRNTARDLLYYAVTQDAMLIFENLSRGFGRQGKRTFMAERQYTRMEDWLTAKLAYEGLPSKTYLSKTLAQYTSKTCSNCGFTITSADYDRVLEKLKKTATGWMTTINGKELKVEGQITYYNRYKRQNVVKDLSVELDRLSEESVNNDISSWTKGRSGEALSLLKKRFSHRPVQEKFVCLNCGFETHADEQAALNIARSWLFLRSQEYKKYQTNKTTGNTDKRAFVETWQSFYRKKLKEVWKPAV

SEQ ID NO: 43551 - protein, 977 aa, synthetic construct
  REGION 1..977: note = engineered CasX variant
QEIKRINKIRRRLVKDSNTKKAGKTGPMKTLLVRVMTPDLRERLENLRKKPENIPQPISNTSRANLNKLLTDYTEMKKAILHVYWEEFQKDPVGLMSRVAQPASKKIDQNKLKPEMDEKGNLTTAGFACSQCGQPLFVYKLEQVSEKGKAYTNYFGRCNVAEHEKLILLAQLKPEKDSDEAVTYSLGKFGQRALDFYSIHVTKESTHPVKPLAQIAGNRYASPVGKALSDACMGTIASFLSKYQDIIIEHQKVVKGNQKRLESLRELAGKENLEYPSVTLPPQPHTSEGVDAYNEVIARVRMWVNLNLWQKLKLSRDDAKPLLRLKGFPSFPLVERQANEVDWWDMVCNVKKLINEKKEDGKVFWQNLAGYKRQEALRPYLSSEEDREKGKKFARYQLGDLLLHLEKKHGEDWGKVYDEAWERIDKKVEGLSKHIKLEEERRSEDAQSKAALTDWLRAKASFVIEGLKEADKDEFCRCELKLQKWYGDLRGKPFAIEAENSILDISGFSKQYNCAFIWQKDGVKKLNLYLIINYFKGGKLRFKKIKPEAFEANRFYTVINKKSGEIVPMEVNFNFDDPNLIILPLAFGKRQGREFIWNDLLSLETGSLKLANGRVIEKTLYNRRTRQDEPALFVALTFERREVLDSSNIKPMNLIGVDRGENIPAVIALTDPEGCPLSRFKDSLGNPTHILRIGESYKEKQRTIQAKKEVEQRRAGGYSRKYASKAKNLADDMVRNTARDLLYYAVTQDAMLIFENLSRGFGRQGKRTFMAERQYTRMEDWLTAKLAYEGLPSKTYLSKTLAQYTSKTCSNCGFTITSADYDRVLEKLKKTATGWMTTINGKELKVEGQITYYNRYKRQNVVKDLSVELDRLSEESVNNDISSWTKGRSGEALSLLKKRFSHRPVQEKFVCLNCGFETHADEQAALNIARSWLFLRSQEYKKYQTNKTTGNTDKRAFVETWQSFYRKKLKEVWKPAV

SEQ ID NO: 43552 - protein, 978 aa, synthetic construct
  REGION 1..978: note = engineered CasX variant
QEIKRINKIRRRLVKDSNTKKAGKTGPMKTLLVRVMTPDLRERLENLRKKPENIPQPISNTSRANLNKLLTDYTEMKKAILHVYWEEFQKDPVGLMSRVAQPASKKIDQNKLKPEMDEKGNLTTAGFACSQCGQPLFVYKLEQVSEKGKAYTNYFGRCNVAEHEKLILLAQLKPEKDSDEAVTYSLGKFGQRALDFYSIHVTKESTHPVKPLAQIAGNRYASYPVGKALSDACMGTIASFLSKYQDIIIEHQKVVKGNQKRLESLRELAGKENLEYPSVTLPPQPHTSEGVDAYNEVIARVRMWVNLNLWQKLKLSRDDAKPLLRLKGFPSFPLVERQANEVDWWDMVCNVKKLINEKKEDGKVFWQNLAGYKRQEALRPYLSSEEDRKKGKKFARYQLGDLLLHLEKKHGEDWGKVYDEAWERIDKKVEGLSKHIKLEEERRSEDAQSKAALTDWLRAKASFVIEGLKEADKDEFCRCELKLQKWYGDLRGKPFAIEAENSILDISGFSKQYNCAFIWQKDGVKKLNLYLIINYFKGGKLRFKKIKPEAFEANRFYTVINKKSGEIVIMEVNFNFDDPNLIILPLAFGKRQGREFIWNDLLSLETGSLKLANGRVIEKTLYNRRTRQDEPALFVALTFERREVLDSSNIKPMNLIGVDRGENIPAVIALTDPEGCPLSRFKDSLGNPTHILRIGESYKEKQRTIQAKKEVEQRRAGGYSRKYASKAKNLADDMVRNTARDLLYYAVTQDAMLIFENLSRGFGRQGKRTFMAERQYTRMEDWLTAKLAYEGLPSKTYLSKTLAQYTSKTCSNCGFTITSADYDRVLEKLKKTATGWMTTINGKELKVEGQITYYNRYKRQNVVKDLSVELDRLSEESVNNDISSWTKGRSGEALSLLKKRFSHRPVQEKFVCLNCGFETHADEQAALNIARSWLFLRSQEYKKYQTNKTTGNTDKRAFVETWQSFYRKKLKEVWKPAV

SEQ ID NO: 43553 - protein, 978 aa, synthetic construct
  REGION 1..978: note = engineered CasX variant
QEIKRINKIRRRLVKDSNTKKAGKTGPMKTLLVRVMTPDLRERLENLRKKPENIPQPISNTSRANLNKLLTDYTEMKKAILHVYWEEFQKDPVGLMSRVAQPASKKIDQNKLKPEMDEKGNLTTAGFACSQCGQPLFVYKLEQVSEKGKAYTNYFGRCNVAEHEKLILLAQLKPEKDSDEAVTYSLGKFGQRALDFYSIHVTKESTHPVKPLAQIAGNRYASHPVGKALSDACMGTIASFLSKYQDIIIEHQKVVKGNQKRLESLRELAGKENLEYPSVTLPPQPHTSEGVDAYNEVIARVRMWVNLNLWQKLKLSRDDAKPLLRLKGFPSFPLVERQANEVDWWDMVCNVKKLINEKKEDGKVFWQNLAGYKRQEALRPYLSSEEDRKKGKKFARYQLGDLLLHLEKKHGEDWGKVYDEAWERIDKKVEGLSKHIKLEEERRSEDAQSKAALTDWLRAKASFVIEGLKEADKDEFCRCELKLQKWYGDLRGKPFAIEAENSILDISGFSKQYNCAFIWQKDGVKKLNLYLIINYFKGGKLRFKKIKPEAFEANRFYTVINKKSGEIVIMEVNFNFDDPNLIILPLAFGKRQGREFIWNDLLSLETGSLKLANGRVIEKTLYNRRTRQDEPALFVALTFERREVLDSSNIKPMNLIGVDRGENIPAVIALTDPEGCPLSRFKDSLGNPTHILRIGESYKEKQRTIQAKKEVEQRRAGGYSRKYASKAKNLADDMVRNTARDLLYYAVTQDAMLIFENLSRGFGRQGKRTFMAERQYTRMEDWLTAKLAYEGLPSKTYLSKTLAQYTSKTCSNCGFTITSADYDRVLEKLKKTATGWMTTINGKELKVEGQITYYNRYKRQNVVKDLSVELDRLSEESVNNDISSWTKGRSGEALSLLKKRFSHRPVQEKFVCLNCGFETHADEQAALNIARSWLFLRSQEYKKYQTNKTTGNTDKRAFVETWQSFYRKKLKEVWKPAV

SEQ ID NO: 43554 - protein, 978 aa, synthetic construct
  REGION 1..978: note = engineered CasX variant
QEIKRINKIRRRLVKDSNTKKAGKTGPMKTLLVRVMTPDLRERLENLRKKPENIPQPISNTSRANLNKLLTDYTEMKKAILHVYWEEFQKDPVGLMSRVAQPASKKIDQNKLKPEMDEKGNLTTAGFACSQCGQPLFVYKLEQVSEKGKAYTNYFGRCNVAEHEKLILLAQLKPEKDSDEAVTYSLGKFGQRALDFYSIHVTKESTHPVKPLAQIAGNRYASSPVGKALSDACMGTIASFLSKYQDIIIEHQKVVKGNQKRLESLRELAGKENLEYPSVTLPPQPHTSEGVDAYNEVIARVRMWVNLNLWQKLKLSRDDAKPLLRLKGFPSFPLVERQANEVDWWDMVCNVKKLINEKKEDGKVFWQNLAGYKRQEALRPYLSSEEDRKKGKKFARYQLGDLLLHLEKKHGEDWGKVYDEAWERIDKKVEGLSKHIKLEEERRSEDAQSKAALTDWLRAKASFVIEGLKEADKDEFCRCELKLQKWYGDLRGKPFAIEAENSILDISGFSKQYNCAFIWQKDGVKKLNLYLIINYFKGGKLRFKKIKPEAFEANRFYTVINKKSGEIVIMEVNFNFDDPNLIILPLAFGKRQGREFIWNDLLSLETGSLKLANGRVIEKTLYNRRTRQDEPALFVALTFERREVLDSSNIKPMNLIGVDRGENIPAVIALTDPEGCPLSRFKDSLGNPTHILRIGESYKEKQRTIQAKKEVEQRRAGGYSRKYASKAKNLADDMVRNTARDLLYYAVTQDAMLIFENLSRGFGRQGKRTFMAERQYTRMEDWLTAKLAYEGLPSKTYLSKTLAQYTSKTCSNCGFTITSADYDRVLEKLKKTATGWMTTINGKELKVEGQITYYNRYKRQNVVKDLSVELDRLSEESVNNDISSWTKGRSGEALSLLKKRFSHRPVQEKFVCLNCGFETHADEQAALNIARSWLFLRSQEYKKYQTNKTTGNTDKRAFVETWQSFYRKKLKEVWKPAV

SEQ ID NO: 43555 - protein, 978 aa, synthetic construct
  REGION 1..978: note = engineered CasX variant
QEIKRINKIRRRLVKDSNTKKAGKTGPMKTLLVRVMTPDLRERLENLRKKPENIPQPISNTSRANLNKLLTDYTEMKKAILHVYWEEFQKDPVGLMSRVAQPASKKIDQNKLKPEMDEKGNLTTAGFACSQCGQPLFVYKLEQVSEKGKAYTNYFGRCNVAEHEKLILLAQLKPEKDSDEAVTYSLGKFGQRALDFYSIHVTKESTHPVKPLAQIAGNRYASTPVGKALSDACMGTIASFLSKYQDIIIEHQKVVKGNQKRLESLRELAGKENLEYPSVTLPPQPHTSEGVDAYNEVIARVRMWVNLNLWQKLKLSRDDAKPLLRLKGFPSFPLVERQANEVDWWDMVCNVKKLINEKKEDGKVFWQNLAGYKRQEALRPYLSSEEDRKKGKKFARYQLGDLLLHLEKKHGEDWGKVYDEAWERIDKKVEGLSKHIKLEEERRSEDAQSKAALTDWLRAKASFVIEGLKEADKDEFCRCELKLQKWYGDLRGKPFAIEAENSILDISGFSKQYNCAFIWQKDGVKKLNLYLIINYFKGGKLRFKKIKPEAFEANRFYTVINKKSGEIVIMEVNFNFDDPNLIILPLAFGKRQGREFIWNDLLSLETGSLKLANGRVIEKTLYNRRTRQDEPALFVALTFERREVLDSSNIKPMNLIGVDRGENIPAVIALTDPEGCPLSRFKDSLGNPTHILRIGESYKEKQRTIQAKKEVEQRRAGGYSRKYASKAKNLADDMVRNTARDLLYYAVTQDAMLIFENLSRGFGRQGKRTFMAERQYTRMEDWLTAKLAYEGLPSKTYLSKTLAQYTSKTCSNCGFTITSADYDRVLEKLKKTATGWMTTINGKELKVEGQITYYNRYKRQNVVKDLSVELDRLSEESVNNDISSWTKGRSGEALSLLKKRFSHRPVQEKFVCLNCGFETHADEQAALNIARSWLFLRSQEYKKYQTNKTTGNTDKRAFVETWQSFYRKKLKEVWKPAV

SEQ ID NO: 43556 - protein, 978 aa, synthetic construct
  REGION 1..978: note = engineered CasX variant
QEIKRINKIRRRLVKDSNTKKAGKTGPMKTLLVRVMTPDLRERLENLRKKPENIPQPISNTSRANLNKLLTDYTEMKKAILHVYWEEFQKDPVGLMSRVAQPASKKIDQNKLKPEMDEKGNLTTAGFACSQCGQPLFVYKLEQVSEKGKAYTNYFGRCNVAEHEKLILLAQLKPEKDSDEAVTYSLGKFGQRALDFYSIHVTKESTHPVKPLAQIAGNRYASAPVGKALSDACMGTIASFLSKYQDIIIEHQKVVKGNQKRLESLRELAGKENLEYPSVTLPPQPHTSEGVDAYNEVIARVRMWVNLNLWQKLKLSRDDAKPLLRLKGFPSFPLVERQANEVDWWDMVCNVKKLINEKKEDGKVFWQNLAGYKRQEALRPYLSSEEDRKKGKKFARYQLGDLLLHLEKKHGEDWGKVYDEAWERIDKKVEGLSKHIKLEEERRSEDAQSKAALTDWLRAKASFVIEGLKEADKDEFCRCELKLQKWYGDLRGKPFAIEAENSILDISGFSKQYNCAFIWQKDGVKKLNLYLIINYFKGGKLRFKKIKPEAFEANRFYTVINKKSGEIVIMEVNFNFDDPNLIILPLAFGKRQGREFIWNDLLSLETGSLKLANGRVIEKTLYNRRTRQDEPALFVALTFERREVLDSSNIKPMNLIGVDRGENIPAVIALTDPEGCPLSRFKDSLGNPTHILRIGESYKEKQRTIQAKKEVEQRRAGGYSRKYASKAKNLADDMVRNTARDLLYYAVTQDAMLIFENLSRGFGRQGKRTFMAERQYTRMEDWLTAKLAYEGLPSKTYLSKTLAQYTSKTCSNCGFTITSADYDRVLEKLKKTATGWMTTINGKELKVEGQITYYNRYKRQNVVKDLSVELDRLSEESVNNDISSWTKGRSGEALSLLKKRFSHRPVQEKFVCLNCGFETHADEQAALNIARSWLFLRSQEYKKYQTNKTTGNTDKRAFVETWQSFYRKKLKEVWKPAV

SEQ ID NO: 43557 - protein, 978 aa, synthetic construct
  REGION 1..978: note = engineered CasX variant
QEIKRINKIRRRLVKDSNTKKAGKTGPMKTLLVRVMTPDLRERLENLRKKPENIPQPISNTSRANLNKLLTDYTEMKKAILHVYWEEFQKDPVGLMSRVAQPASKKIDQNKLKPEMDEKGNLTTAGFACSQCGQPLFVYKLEQVSEKGKAYTNYFGRCNVAEHEKLILLAQLKPEKDSDEAVTYSLGKFGQRALDFYSIHVTKESTHPVKPLAQIAGNRYASVPVGKALSDACMGTIASFLSKYQDIIIEHQKVVKGNQKRLESLRELAGKENLEYPSVTLPPQPHTSEGVDAYNEVIARVRMWVNLNLWQKLKLSRDDAKPLLRLKGFPSFPLVERQANEVDWWDMVCNVKKLINEKKEDGKVFWQNLAGYKRQEALRPYLSSEEDRKKGKKFARYQLGDLLLHLEKKHGEDWGKVYDEAWERIDKKVEGLSKHIKLEEERRSEDAQSKAALTDWLRAKASFVIEGLKEADKDEFCRCELKLQKWYGDLRGKPFAIEAENSILDISGFSKQYNCAFIWQKDGVKKLNLYLIINYFKGGKLRFKKIKPEAFEANRFYTVINKKSGEIVIMEVNFNFDDPNLIILPLAFGKRQGREFIWNDLLSLETGSLKLANGRVIEKTLYNRRTRQDEPALFVALTFERREVLDSSNIKPMNLIGVDRGENIPAVIALTDPEGCPLSRFKDSLGNPTHILRIGESYKEKQRTIQAKKEVEQRRAGGYSRKYASKAKNLADDMVRNTARDLLYYAVTQDAMLIFENLSRGFGRQGKRTFMAERQYTRMEDWLTAKLAYEGLPSKTYLSKTLAQYTSKTCSNCGFTITSADYDRVLEKLKKTATGWMTTINGKELKVEGQITYYNRYKRQNVVKDLSVELDRLSEESVNNDISSWTKGRSGEALSLLKKRFSHRPVQEKFVCLNCGFETHADEQAALNIARSWLFLRSQEYKKYQTNKTTGNTDKRAFVETWQSFYRKKLKEVWKPAV

SEQ ID NO: 43558 - protein, 978 aa, synthetic construct
  REGION 1..978: note = engineered CasX variant
QEIKRINKIRRRLVKDSNTKKAGKTGPMKTLLVRVMTPDLRERLENLRKKPENIPQPISNTSRANLNKLLTDYTEMKKAILHVYWEEFQKDPVGLMSRVAQPASKKIDQNKLKPEMDEKGNLTTAGFACSQCGQPLFVYKLEQVSEKGKAYTNYFGRCNVAEHEKLIKLAQLKPEKDSDEAVTYSLGKFGQRALDFYSIHVTKESTHPVKPLAQIAGNRYASGPVGKALSDACMGTIASFLSKYQDIIIEHQKVVKGNQKRLESLRELAGKENLEYPSVTLPPQPHTSEGVDAYNEVIARVRMWVNLNLWQKLKLSRDDAKPLLRLKGFPSFPLVERQANEVDWWDMVCNVKKLINEKKEDGKVFWQNLAGYKRQEALRPYLSSEEDRKKGKKFARYQLGDLLLHLEKKHGEDWGKVYDEAWERIDKKVEGLSKHIKLEEERRSEDAQSKAALTDWLRAKASFVIEGLKEADKDEFCRCELKLQKWYGDLRGKPFAIEAENSILDISGFSKQYNCAFIWQKDGVKKLNLYLIINYFKGGKLRFKKIKPEAFEANRFYTVINKKSGEIVIMEVNFNFDDPNLIILPLAFGKRQGREFIWNDLLSLETGSLKLANGRVIEKTLYNRRTRQDEPALFVALTFERREVLDSSNIKPMNLIGVDRGENIPAVIALTDPEGCPLSRFKDSLGNPTHILRIGESYKEKQRTIQAKKEVEQRRAGGYSRKYASKAKNLADDMVRNTARDLLYYAVTQDAMLIFENLSRGFGRQGKRTFMAERQYTRMEDWLTAKLAYEGLPSKTYLSKTLAQYTSKTCSNCGFTITSADYDRVLEKLKKTATGWMTTINGKELKVEGQITYYNRYKRQNVVKDLSVELDRLSEESVNNDISSWTKGRSGEALSLLKKRFSHRPVQEKFVCLNCGFETHADEQAALNIARSWLFLRSQEYKKYQTNKTTGNTDKRAFVETWQSFYRKKLKEVWKPAV

SEQ ID NO: 43559 - protein, 977 aa, synthetic construct
  REGION 1..977: note = engineered CasX variant
QEIKRINKIRRRLVKDSNTKKAGKTGPMKTLLVRVMTPDLRERLENLRKKPENIPQPISNTSRANLNKLLTDYTEMKKAILHVYWEEFQKDPVGLMSRVAQPASKKIDQNKLKPEMDEKGNLTTAGFACSQCGQPLFVYKLEQVSEKGKAYTNYFGRCNVAEHEKLILLAQLKPEKDSDEAVTYSLGKFGQRALDFYSIHVTKESTHPVKPLAQIAGNRYASPVGKALSDACMGTIASFLSKYQDIIIEHQKVVKGNQKRLESLRELAGKENLEYPSVTLPPQPHTSEGVDAYNEVIARVRMWVNLNLWQKLKLSRDDAKPLLRLKGFPSFPLVERQANEVDWWDMVCNVKKLINEKKEDGKVFWQNLAGYKRQEALRPYLSSEEDRKKGKKFARYQLGDLLLHLEKKHGEDWGKVYDEAWERIDKKVEGLSKHIKLEEERRSEDAQSKAALTDWLRAKASFVIEGLKEADKDEFCRCELKLQKWYGDLRGKPFAIEAENSILDISGFSKQYNCAFIWQKDGVKKLNLYLIINYFKGGKLRFKKIKPEAFEANRFYTVINKKSGEIVIMEVNFNFDDPNLIILPLAFGKRQGREFIWNDLLSLETGSLKLANGRVIEKTLYNRRTRQDEPALFVALTFERREVLDSSNIKPMNLIGVDRGENIPAVIALTDPEGCPLSRFKDSLGNPTHILRIGESYKEKQRTIQAKKEVEQRRAGGYSRKYASKAKNLADDMVRNTARDLLYYAVTQDAMLIFENLSRGFGRQGKRTFMAERQYTRMEDWLTAKLAYEGLPSKTYLSKTLAQYTSKTCSNCGFTITSADYDRVLEKLKKTATGWMTTINGKELKVEGQITYYNRYKRQNVVKDLSVELDRLSEESVNNDISSWTKGRSGEALSLLKKRFSHRPVQEKFVCLNCGFETHADEQAALNIARSWLFLRSQEYKKYQTNKTTGNTDKRAFVETWQSFYRKKLKEVWKPAV

SEQ ID NO: 43560 - protein, 978 aa, synthetic construct
  REGION 1..978: note = engineered CasX variant
QEIKRINKIRRRLVKDSNTKKAGKTGPMKTLLVRVMTPDLRERLENLRKKPENIPQPISNTSRANLNKLLTDYTEMKKAILHVYWEEFQKDPVGLMSRVAQPASKKIDQNKLKPEMDEKGNLTTAGFACSQCGQPLFVYKLEQVSEKGKAYTNYFGRCNVAEHEKLILLAQLKPEKDSDEAVTYSLGKFGQRALDFYSIHVTKESTHPVKPLAQIAGNRYASYPVGKALSGACMGTIASFLSKYQDIIIEHQKVVKGNQKRLESLRELAGKENLEYPSVTLPPQPHTKEGLDAYNEVIARVRMWVNLNLWQKLKLSRDDAKPLLRLKGFPSFPLVERQANEVDWWDMVCNVKKLINEKKEDGKVFWQNLAGYKRQEALRPYLSSEEDRKKGKKFARYQLGDLLLHLEKKHGEDWGKVYDEAWERIDKKVEGLSKHIKLEEERRSEDAQSKAALTDWLRAKASFVIEGLKEADKDEFCRCELKLQKWYGDLRGKPFAIEAENSILDISGFSKQYNCAFIWQKDGVKKLNLYLIINYFKGGKLRFKKIKPEAFEANRFYTVINKKSGEIVPMEVNFNFDDPNLIILPLAFGKRQGREFIWNDLLSLETGSLKLANGRVIEKTLYNRRTRQDEPALFVALTFERREVLDSSNIKPMNLIGVDRGENIPAVIALTDPEGCPLSRFKDSLGNPTHILRIGESYKEKQRTIQAKKEVEQRRAGGYSRKYASKAKNLADDMVRNTARDLLYYAVTQDAMLIFENLSRGFGRQGKRTFMAERQYTRMEDWLTAKLAYEGLPSKTYLSKTLAQYTSKTCSNCGFTITSADYDRVLEKLKKTATGWMTTINGKELKVEGQITYYNRYKRQNVVKDLSVELDRLSEESVNNDISSWTKGRSGEALSLLKKRFSHRPVQEKFVCLNCGFETHADEQAALNIARSWLFLRSQEYKKYQTNKTTGNTDKRAFVETWQSFYRKKLKEVWKPAV

SEQ ID NO: 43561 - protein, 978 aa, synthetic construct
  REGION 1..978: note = engineered CasX variant
QEIKRINKIRRRLVKDSNTKKAGKTGPMKTLLVRVMTPDLRERLENLRKKPENIPQPISNTSRANLNKLLTDYTEMKKAILHVYWEEFQKDPVGLMSRVAQPASKKIDQNKLKPEMDEKGNLTTAGFACSQCGQPLFVYKLEQVSEKGKAYTNYFGRCNVAEHEKLILLAQLKPEKDSDEAVTYSLGKFGQRALDFYSIHVTKESTHPVKPLAQIAGNRYASHPVGKALSGACMGTIASFLSKYQDIIIEHQKVVKGNQKRLESLRELAGKENLEYPSVTLPPQPHTKEGLDAYNEVIARVRMWVNLNLWQKLKLSRDDAKPLLRLKGFPSFPLVERQANEVDWWDMVCNVKKLINEKKEDGKVFWQNLAGYKRQEALRPYLSSEEDRKKGKKFARYQLGDLLLHLEKKHGEDWGKVYDEAWERIDKKVEGLSKHIKLEEERRSEDAQSKAALTDWLRAKASFVIEGLKEADKDEFCRCELKLQKWYGDLRGKPFAIEAENSILDISGFSKQYNCAFIWQKDGVKKLNLYLIINYFKGGKLRFKKIKPEAFEANRFYTVINKKSGEIVPMEVNFNFDDPNLIILPLAFGKRQGREFIWNDLLSLETGSLKLANGRVIEKTLYNRRTRQDEPALFVALTFERREVLDSSNIKPMNLIGVDRGENIPAVIALTDPEGCPLSRFKDSLGNPTHILRIGESYKEKQRTIQAKKEVEQRRAGGYSRKYASKAKNLADDMVRNTARDLLYYAVTQDAMLIFENLSRGFGRQGKRTFMAERQYTRMEDWLTAKLAYEGLPSKTYLSKTLAQYTSKTCSNCGFTITSADYDRVLEKLKKTATGWMTTINGKELKVEGQITYYNRYKRQNVVKDLSVELDRLSEESVNNDISSWTKGRSGEALSLLKKRFSHRPVQEKFVCLNCGFETHADEQAALNIARSWLFLRSQEYKKYQTNKTTGNTDKRAFVETWQSFYRKKLKEVWKPAV

SEQ ID NO: 43562 - protein, 978 aa, synthetic construct
  REGION 1..978: note = engineered CasX variant
QEIKRINKIRRRLVKDSNTKKAGKTGPMKTLLVRVMTPDLRERLENLRKKPENIPQPISNTSRANLNKLLTDYTEMKKAILHVYWEEFQKDPVGLMSRVAQPASKKIDQNKLKPEMDEKGNLTTAGFACSQCGQPLFVYKLEQVSEKGKAYTNYFGRCNVAEHEKLILLAQLKPEKDSDEAVTYSLGKFGQRALDFYSIHVTKESTHPVKPLAQIAGNRYASSPVGKALSGACMGTIASFLSKYQDIIIEHQKVVKGNQKRLESLRELAGKENLEYPSVTLPPQPHTKEGLDAYNEVIARVRMWVNLNLWQKLKLSRDDAKPLLRLKGFPSFPLVERQANEVDWWDMVCNVKKLINEKKEDGKVFWQNLAGYKRQEALRPYLSSEEDRKKGKKFARYQLGDLLLHLEKKHGEDWGKVYDEAWERIDKKVEGLSKHIKLEEERRSEDAQSKAALTDWLRAKASFVIEGLKEADKDEFCRCELKLQKWYGDLRGKPFAIEAENSILDISGFSKQYNCAFIWQKDGVKKLNLYLIINYFKGGKLRFKKIKPEAFEANRFYTVINKKSGEIVPMEVNFNFDDPNLIILPLAFGKRQGREFIWNDLLSLETGSLKLANGRVIEKTLYNRRTRQDEPALFVALTFERREVLDSSNIKPMNLIGVDRGENIPAVIALTDPEGCPLSRFKDSLGNPTHILRIGESYKEKQRTIQAKKEVEQRRAGGYSRKYASKAKNLADDMVRNTARDLLYYAVTQDAMLIFENLSRGFGRQGKRTFMAERQYTRMEDWLTAKLAYEGLPSKTYLSKTLAQYTSKTCSNCGFTITSADYDRVLEKLKKTATGWMTTINGKELKVEGQITYYNRYKRQNVVKDLSVELDRLSEESVNNDISSWTKGRSGEALSLLKKRFSHRPVQEKFVCLNCGFETHADEQAALNIARSWLFLRSQEYKKYQTNKTTGNTDKRAFVETWQSFYRKKLKEVWKPAV

SEQ ID NO: 43563 - protein, 978 aa, synthetic construct
  REGION 1..978: note = engineered CasX variant
QEIKRINKIRRRLVKDSNTKKAGKTGPMKTLLVRVMTPDLRERLENLRKKPENIPQPISNTSRANLNKLLTDYTEMKKAILHVYWEEFQKDPVGLMSRVAQPASKKIDQNKLKPEMDEKGNLTTAGFACSQCGQPLFVYKLEQVSEKGKAYTNYFGRCNVAEHEKLILLAQLKPEKDSDEAVTYSLGKFGQRALDFYSIHVTKESTHPVKPLAQIAGNRYASTPVGKALSGACMGTIASFLSKYQDIIIEHQKVVKGNQKRLESLRELAGKENLEYPSVTLPPQPHTKEGLDAYNEVIARVRMWVNLNLWQKLKLSRDDAKPLLRLKGFPSFPLVERQANEVDWWDMVCNVKKLINEKKEDGKVFWQNLAGYKRQEALRPYLSSEEDRKKGKKFARYQLGDLLLHLEKKHGEDWGKVYDEAWERIDKKVEGLSKHIKLEEERRSEDAQSKAALTDWLRAKASFVIEGLKEADKDEFCRCELKLQKWYGDLRGKPFAIEAENSILDISGFSKQYNCAFIWQKDGVKKLNLYLIINYFKGGKLRFKKIKPEAFEANRFYTVINKKSGEIVPMEVNFNFDDPNLIILPLAFGKRQGREFIWNDLLSLETGSLKLANGRVIEKTLYNRRTRQDEPALFVALTFERREVLDSSNIKPMNLIGVDRGENIPAVIALTDPEGCPLSRFKDSLGNPTHILRIGESYKEKQRTIQAKKEVEQRRAGGYSRKYASKAKNLADDMVRNTARDLLYYAVTQDAMLIFENLSRGFGRQGKRTFMAERQYTRMEDWLTAKLAYEGLPSKTYLSKTLAQYTSKTCSNCGFTITSADYDRVLEKLKKTATGWMTTINGKELKVEGQITYYNRYKRQNVVKDLSVELDRLSEESVNNDISSWTKGRSGEALSLLKKRFSHRPVQEKFVCLNCGFETHADEQAALNIARSWLFLRSQEYKKYQTNKTTGNTDKRAFVETWQSFYRKKLKEVWKPAV

SEQ ID NO: 43564 - protein, 978 aa, synthetic construct
  REGION 1..978: note = engineered CasX variant
QEIKRINKIRRRLVKDSNTKKAGKTGPMKTLLVRVMTPDLRERLENLRKKPENIPQPISNTSRANLNKLLTDYTEMKKAILHVYWEEFQKDPVGLMSRVAQPASKKIDQNKLKPEMDEKGNLTTAGFACSQCGQPLFVYKLEQVSEKGKAYTNYFGRCNVAEHEKLILLAQLKPEKDSDEAVTYSLGKFGQRALDFYSIHVTKESTHPVKPLAQIAGNRYASAPVGKALSGACMGTIASFLSKYQDIIIEHQKVVKGNQKRLESLRELAGKENLEYPSVTLPPQPHTKEGLDAYNEVIARVRMWVNLNLWQKLKLSRDDAKPLLRLKGFPSFPLVERQANEVDWWDMVCNVKKLINEKKEDGKVFWQNLAGYKRQEALRPYLSSEEDRKKGKKFARYQLGDLLLHLEKKHGEDWGKVYDEAWERIDKKVEGLSKHIKLEEERRSEDAQSKAALTDWLRAKASFVIEGLKEADKDEFCRCELKLQKWYGDLRGKPFAIEAENSILDISGFSKQYNCAFIWQKDGVKKLNLYLIINYFKGGKLRFKKIKPEAFEANRFYTVINKKSGEIVPMEVNFNFDDPNLIILPLAFGKRQGREFIWNDLLSLETGSLKLANGRVIEKTLYNRRTRQDEPALFVALTFERREVLDSSNIKPMNLIGVDRGENIPAVIALTDPEGCPLSRFKDSLGNPTHILRIGESYKEKQRTIQAKKEVEQRRAGGYSRKYASKAKNLADDMVRNTARDLLYYAVTQDAMLIFENLSRGFGRQGKRTFMAERQYTRMEDWLTAKLAYEGLPSKTYLSKTLAQYTSKTCSNCGFTITSADYDRVLEKLKKTATGWMTTINGKELKVEGQITYYNRYKRQNVVKDLSVELDRLSEESVNNDISSWTKGRSGEALSLLKKRFSHRPVQEKFVCLNCGFETHADEQAALNIARSWLFLRSQEYKKYQTNKTTGNTDKRAFVETWQSFYRKKLKEVWKPAV

SEQ ID NO: 43565 - protein, 978 aa, synthetic construct
  REGION 1..978: note = engineered CasX variant
QEIKRINKIRRRLVKDSNTKKAGKTGPMKTLLVRVMTPDLRERLENLRKKPENIPQPISNTSRANLNKLLTDYTEMKKAILHVYWEEFQKDPVGLMSRVAQPASKKIDQNKLKPEMDEKGNLTTAGFACSQCGQPLFVYKLEQVSEKGKAYTNYFGRCNVAEHEKLILLAQLKPEKDSDEAVTYSLGKFGQRALDFYSIHVTKESTHPVKPLAQIAGNRYASVPVGKALSGACMGTIASFLSKYQDIIIEHQKVVKGNQKRLESLRELAGKENLEYPSVTLPPQPHTKEGLDAYNEVIARVRMWVNLNLWQKLKLSRDDAKPLLRLKGFPSFPLVERQANEVDWWDMVCNVKKLINEKKEDGKVFWQNLAGYKRQEALRPYLSSEEDRKKGKKFARYQLGDLLLHLEKKHGEDWGKVYDEAWERIDKKVEGLSKHIKLEEERRSEDAQSKAALTDWLRAKASFVIEGLKEADKDEFCRCELKLQKWYGDLRGKPFAIEAENSILDISGFSKQYNCAFIWQKDGVKKLNLYLIINYFKGGKLRFKKIKPEAFEANRFYTVINKKSGEIVPMEVNFNFDDPNLIILPLAFGKRQGREFIWNDLLSLETGSLKLANGRVIEKTLYNRRTRQDEPALFVALTFERREVLDSSNIKPMNLIGVDRGENIPAVIALTDPEGCPLSRFKDSLGNPTHILRIGESYKEKQRTIQAKKEVEQRRAGGYSRKYASKAKNLADDMVRNTARDLLYYAVTQDAMLIFENLSRGFGRQGKRTFMAERQYTRMEDWLTAKLAYEGLPSKTYLSKTLAQYTSKTCSNCGFTITSADYDRVLEKLKKTATGWMTTINGKELKVEGQITYYNRYKRQNVVKDLSVELDRLSEESVNNDISSWTKGRSGEALSLLKKRFSHRPVQEKFVCLNCGFETHADEQAALNIARSWLFLRSQEYKKYQTNKTTGNTDKRAFVETWQSFYRKKLKEVWKPAV

SEQ ID NO: 43566 - protein, 978 aa, synthetic construct
  REGION 1..978: note = engineered CasX variant
QEIKRINKIRRRLVKDSNTKKAGKTGPMKTLLVRVMTPDLRERLENLRKKPENIPQPISNTSRANLNKLLTDYTEMKKAILHVYWEEFQKDPVGLMSRVAQPASKKIDQNKLKPEMDEKGNLTTAGFACSQCGQPLFVYKLEQVSEKGKAYTNYFGRCNVAEHEKLIKLAQLKPEKDSDEAVTYSLGKFGQRALDFYSIHVTKESTHPVKPLAQIAGNRYASGPVGKALSGACMGTIASFLSKYQDIIIEHQKVVKGNQKRLESLRELAGKENLEYPSVTLPPQPHTKEGLDAYNEVIARVRMWVNLNLWQKLKLSRDDAKPLLRLKGFPSFPLVERQANEVDWWDMVCNVKKLINEKKEDGKVFWQNLAGYKRQEALRPYLSSEEDRKKGKKFARYQLGDLLLHLEKKHGEDWGKVYDEAWERIDKKVEGLSKHIKLEEERRSEDAQSKAALTDWLRAKASFVIEGLKEADKDEFCRCELKLQKWYGDLRGKPFAIEAENSILDISGFSKQYNCAFIWQKDGVKKLNLYLIINYFKGGKLRFKKIKPEAFEANRFYTVINKKSGEIVPMEVNFNFDDPNLIILPLAFGKRQGREFIWNDLLSLETGSLKLANGRVIEKTLYNRRTRQDEPALFVALTFERREVLDSSNIKPMNLIGVDRGENIPAVIALTDPEGCPLSRFKDSLGNPTHILRIGESYKEKQRTIQAKKEVEQRRAGGYSRKYASKAKNLADDMVRNTARDLLYYAVTQDAMLIFENLSRGFGRQGKRTFMAERQYTRMEDWLTAKLAYEGLPSKTYLSKTLAQYTSKTCSNCGFTITSADYDRVLEKLKKTATGWMTTINGKELKVEGQITYYNRYKRQNVVKDLSVELDRLSEESVNNDISSWTKGRSGEALSLLKKRFSHRPVQEKFVCLNCGFETHADEQAALNIARSWLFLRSQEYKKYQTNKTTGNTDKRAFVETWQSFYRKKLKEVWKPAV

SEQ ID NO: 43567 - protein, 977 aa, synthetic construct
  REGION 1..977: note = engineered CasX variant
QEIKRINKIRRRLVKDSNTKKAGKTGPMKTLLVRVMTPDLRERLENLRKKPENIPQPISNTSRANLNKLLTDYTEMKKAILHVYWEEFQKDPVGLMSRVAQPASKKIDQNKLKPEMDEKGNLTTAGFACSQCGQPLFVYKLEQVSEKGKAYTNYFGRCNVAEHEKLILLAQLKPEKDSDEAVTYSLGKFGQRALDFYSIHVTKESTHPVKPLAQIAGNRYASPVGKALSGACMGTIASFLSKYQDIIIEHQKVVKGNQKRLESLRELAGKENLEYPSVTLPPQPHTKEGLDAYNEVIARVRMWVNLNLWQKLKLSRDDAKPLLRLKGFPSFPLVERQANEVDWWDMVCNVKKLINEKKEDGKVFWQNLAGYKRQEALRPYLSSEEDRKKGKKFARYQLGDLLLHLEKKHGEDWGKVYDEAWERIDKKVEGLSKHIKLEEERRSEDAQSKAALTDWLRAKASFVIEGLKEADKDEFCRCELKLQKWYGDLRGKPFAIEAENSILDISGFSKQYNCAFIWQKDGVKKLNLYLIINYFKGGKLRFKKIKPEAFEANRFYTVINKKSGEIVPMEVNFNFDDPNLIILPLAFGKRQGREFIWNDLLSLETGSLKLANGRVIEKTLYNRRTRQDEPALFVALTFERREVLDSSNIKPMNLIGVDRGENIPAVIALTDPEGCPLSRFKDSLGNPTHILRIGESYKEKQRTIQAKKEVEQRRAGGYSRKYASKAKNLADDMVRNTARDLLYYAVTQDAMLIFENLSRGFGRQGKRTFMAERQYTRMEDWLTAKLAYEGLPSKTYLSKTLAQYTSKTCSNCGFTITSADYDRVLEKLKKTATGWMTTINGKELKVEGQITYYNRYKRQNVVKDLSVELDRLSEESVNNDISSWTKGRSGEALSLLKKRFSHRPVQEKFVCLNCGFETHADEQAALNIARSWLFLRSQEYKKYQTNKTTGNTDKRAFVETWQSFYRKKLKEVWKPAV

SEQ ID NO: 43568 - protein, 978 aa, synthetic construct
  REGION 1..978: note = engineered CasX variant
QEIKRINKIRRRLVKDSNTKKAGKTGPMKTLLVRVMTPDLRERLENLRKKPENIPQPISNTSRANLNKLLTDYTEMKKAILHVYWEEFQKDPVGLMSRVAQPASKKIDQNKLKPEMDEKGNLTTAGFACSQCGQPLFVYKLEQVSEKGKAYTNYFGRCNVAEHEKLILLAQLKPEKDSDEAVTYSLGKFGQRALDFYSIHVTKESTHPVKPLAQIAGNRYASYPVGKALSDACMGTIASFLSKYQDIIIEHQKVVKGNQKRLESLRELAGKENLEYPSVTLPPQPHTKEGLDAYNEVIARVRMWVNLNLWQKLKLSRDDAKPLLRLKNFPSFPLVERQANEVDWWDMVCNVKKLINEKKEDGKVFWQNLAGYKRQEALRPYLSSEEDRKKGKKFARYQLGDLLLHLEKKHGEDWGKVYDEAWERIDKKVEGLSKHIKLEEERRSEDAQSKAALTDWLRAKASFVIEGLKEADKDEFCRCELKLQKWYGDLRGKPFAIEAENSILDISGFSKQYNCAFIWQKDGVKKLNLYLIINYFKGGKLRFKKIKPEAFEANRFYTVINKKSGEIVPMEVNFNFDDPNLIILPLAFGKRQGREFIWNDLLSLETGSLKLANGRVIEKTLYNRRTRQDEPALFVALTFERREVLDSSNIKPMNLIGVDRGENIPAVIALTDPEGCPLSRFKDSLGNPTHILRIGESYKEKQRTIQAKKEVEQRRAGGYSRKYASKAKNLADDMVRNTARDLLYYAVTQDAMLIFENLSRGFGRQGKRTFMAERQYTRMEDWLTAKLAYEGLPSKTYLSKTLAQYTSKTCSNCGFTITSADYDRVLEKLKKTATGWMTTINGKELKVEGQITYYNRYKRQNVVKDLSVELDRLSEESVNNDISSWTKGRSGEALSLLKKRFSHRPVQEKFVCLNCGFETHADEQAALNIARSWLFLRSQEYKKYQTNKTTGNTDKRAFVETWQSFYRKKLKEVWKPAV

SEQ ID NO: 43569 - protein, 978 aa, synthetic construct
  REGION 1..978: note = engineered CasX variant
QEIKRINKIRRRLVKDSNTKKAGKTGPMKTLLVRVMTPDLRERLENLRKKPENIPQPISNTSRANLNKLLTDYTEMKKAILHVYWEEFQKDPVGLMSRVAQPASKKIDQNKLKPEMDEKGNLTTAGFACSQCGQPLFVYKLEQVSEKGKAYTNYFGRCNVAEHEKLILLAQLKPEKDSDEAVTYSLGKFGQRALDFYSIHVTKESTHPVKPLAQIAGNRYASHPVGKALSDACMGTIASFLSKYQDIIIEHQKVVKGNQKRLESLRELAGKENLEYPSVTLPPQPHTKEGLDAYNEVIARVRMWVNLNLWQKLKLSRDDAKPLLRLKNFPSFPLVERQANEVDWWDMVCNVKKLINEKKEDGKVFWQNLAGYKRQEALRPYLSSEEDRKKGKKFARYQLGDLLLHLEKKHGEDWGKVYDEAWERIDKKVEGLSKHIKLEEERRSEDAQSKAALTDWLRAKASFVIEGLKEADKDEFCRCELKLQKWYGDLRGKPFAIEAENSILDISGFSKQYNCAFIWQKDGVKKLNLYLIINYFKGGKLRFKKIKPEAFEANRFYTVINKKSGEIVPMEVNFNFDDPNLIILPLAFGKRQGREFIWNDLLSLETGSLKLANGRVIEKTLYNRRTRQDEPALFVALTFERREVLDSSNIKPMNLIGVDRGENIPAVIALTDPEGCPLSRFKDSLGNPTHILRIGESYKEKQRTIQAKKEVEQRRAGGYSRKYASKAKNLADDMVRNTARDLLYYAVTQDAMLIFENLSRGFGRQGKRTFMAERQYTRMEDWLTAKLAYEGLPSKTYLSKTLAQYTSKTCSNCGFTITSADYDRVLEKLKKTATGWMTTINGKELKVEGQITYYNRYKRQNVVKDLSVELDRLSEESVNNDISSWTKGRSGEALSLLKKRFSHRPVQEKFVCLNCGFETHADEQAALNIARSWLFLRSQEYKKYQTNKTTGNTDKRAFVETWQSFYRKKLKEVWKPAV

SEQ ID NO: 43570 - protein, 978 aa, synthetic construct
  REGION 1..978: note = engineered CasX variant
QEIKRINKIRRRLVKDSNTKKAGKTGPMKTLLVRVMTPDLRERLENLRKKPENIPQPISNTSRANLNKLLTDYTEMKKAILHVYWEEFQKDPVGLMSRVAQPASKKIDQNKLKPEMDEKGNLTTAGFACSQCGQPLFVYKLEQVSEKGKAYTNYFGRCNVAEHEKLILLAQLKPEKDSDEAVTYSLGKFGQRALDFYSIHVTKESTHPVKPLAQIAGNRYASSPVGKALSDACMGTIASFLSKYQDIIIEHQKVVKGNQKRLESLRELAGKENLEYPSVTLPPQPHTKEGLDAYNEVIARVRMWVNLNLWQKLKLSRDDAKPLLRLKNFPSFPLVERQANEVDWWDMVCNVKKLINEKKEDGKVFWQNLAGYKRQEALRPYLSSEEDRKKGKKFARYQLGDLLLHLEKKHGEDWGKVYDEAWERIDKKVEGLSKHIKLEEERRSEDAQSKAALTDWLRAKASFVIEGLKEADKDEFCRCELKLQKWYGDLRGKPFAIEAENSILDISGFSKQYNCAFIWQKDGVKKLNLYLIINYFKGGKLRFKKIKPEAFEANRFYTVINKKSGEIVPMEVNFNFDDPNLIILPLAFGKRQGREFIWNDLLSLETGSLKLANGRVIEKTLYNRRTRQDEPALFVALTFERREVLDSSNIKPMNLIGVDRGENIPAVIALTDPEGCPLSRFKDSLGNPTHILRIGESYKEKQRTIQAKKEVEQRRAGGYSRKYASKAKNLADDMVRNTARDLLYYAVTQDAMLIFENLSRGFGRQGKRTFMAERQYTRMEDWLTAKLAYEGLPSKTYLSKTLAQYTSKTCSNCGFTITSADYDRVLEKLKKTATGWMTTINGKELKVEGQITYYNRYKRQNVVKDLSVELDRLSEESVNNDISSWTKGRSGEALSLLKKRFSHRPVQEKFVCLNCGFETHADEQAALNIARSWLFLRSQEYKKYQTNKTTGNTDKRAFVETWQSFYRKKLKEVWKPAV

SEQ ID NO: 43571 - protein, 978 aa, synthetic construct
  REGION 1..978: note = engineered CasX variant
QEIKRINKIRRRLVKDSNTKKAGKTGPMKTLLVRVMTPDLRERLENLRKKPENIPQPISNTSRANLNKLLTDYTEMKKAILHVYWEEFQKDPVGLMSRVAQPASKKIDQNKLKPEMDEKGNLTTAGFACSQCGQPLFVYKLEQVSEKGKAYTNYFGRCNVAEHEKLILLAQLKPEKDSDEAVTYSLGKFGQRALDFYSIHVTKESTHPVKPLAQIAGNRYASTPVGKALSDACMGTIASFLSKYQDIIIEHQKVVKGNQKRLESLRELAGKENLEYPSVTLPPQPHTKEGLDAYNEVIARVRMWVNLNLWQKLKLSRDDAKPLLRLKNFPSFPLVERQANEVDWWDMVCNVKKLINEKKEDGKVFWQNLAGYKRQEALRPYLSSEEDRKKGKKFARYQLGDLLLHLEKKHGEDWGKVYDEAWERIDKKVEGLSKHIKLEEERRSEDAQSKAALTDWLRAKASFVIEGLKEADKDEFCRCELKLQKWYGDLRGKPFAIEAENSILDISGFSKQYNCAFIWQKDGVKKLNLYLIINYFKGGKLRFKKIKPEAFEANRFYTVINKKSGEIVPMEVNFNFDDPNLIILPLAFGKRQGREFIWNDLLSLETGSLKLANGRVIEKTLYNRRTRQDEPALFVALTFERREVLDSSNIKPMNLIGVDRGENIPAVIALTDPEGCPLSRFKDSLGNPTHILRIGESYKEKQRTIQAKKEVEQRRAGGYSRKYASKAKNLADDMVRNTARDLLYYAVTQDAMLIFENLSRGFGRQGKRTFMAERQYTRMEDWLTAKLAYEGLPSKTYLSKTLAQYTSKTCSNCGFTITSADYDRVLEKLKKTATGWMTTINGKELKVEGQITYYNRYKRQNVVKDLSVELDRLSEESVNNDISSWTKGRSGEALSLLKKRFSHRPVQEKFVCLNCGFETHADEQAALNIARSWLFLRSQEYKKYQTNKTTGNTDKRAFVETWQSFYRKKLKEVWKPAV

SEQ ID NO: 43572 - protein, 978 aa, synthetic construct
  REGION 1..978: note = engineered CasX variant
QEIKRINKIRRRLVKDSNTKKAGKTGPMKTLLVRVMTPDLRERLENLRKKPENIPQPISNTSRANLNKLLTDYTEMKKAILHVYWEEFQKDPVGLMSRVAQPASKKIDQNKLKPEMDEKGNLTTAGFACSQCGQPLFVYKLEQVSEKGKAYTNYFGRCNVAEHEKLILLAQLKPEKDSDEAVTYSLGKFGQRALDFYSIHVTKESTHPVKPLAQIAGNRYASAPVGKALSDACMGTIASFLSKYQDIIIEHQKVVKGNQKRLESLRELAGKENLEYPSVTLPPQPHTKEGLDAYNEVIARVRMWVNLNLWQKLKLSRDDAKPLLRLKNFPSFPLVERQANEVDWWDMVCNVKKLINEKKEDGKVFWQNLAGYKRQEALRPYLSSEEDRKKGKKFARYQLGDLLLHLEKKHGEDWGKVYDEAWERIDKKVEGLSKHIKLEEERRSEDAQSKAALTDWLRAKASFVIEGLKEADKDEFCRCELKLQKWYGDLRGKPFAIEAENSILDISGFSKQYNCAFIWQKDGVKKLNLYLIINYFKGGKLRFKKIKPEAFEANRFYTVINKKSGEIVPMEVNFNFDDPNLIILPLAFGKRQGREFIWNDLLSLETGSLKLANGRVIEKTLYNRRTRQDEPALFVALTFERREVLDSSNIKPMNLIGVDRGENIPAVIALTDPEGCPLSRFKDSLGNPTHILRIGESYKEKQRTIQAKKEVEQRRAGGYSRKYASKAKNLADDMVRNTARDLLYYAVTQDAMLIFENLSRGFGRQGKRTFMAERQYTRMEDWLTAKLAYEGLPSKTYLSKTLAQYTSKTCSNCGFTITSADYDRVLEKLKKTATGWMTTINGKELKVEGQITYYNRYKRQNVVKDLSVELDRLSEESVNNDISSWTKGRSGEALSLLKKRFSHRPVQEKFVCLNCGFETHADEQAALNIARSWLFLRSQEYKKYQTNKTTGNTDKRAFVETWQSFYRKKLKEVWKPAV

SEQ ID NO: 43573 - protein, 978 aa, synthetic construct
  REGION 1..978: note = engineered CasX variant
QEIKRINKIRRRLVKDSNTKKAGKTGPMKTLLVRVMTPDLRERLENLRKKPENIPQPISNTSRANLNKLLTDYTEMKKAILHVYWEEFQKDPVGLMSRVAQPASKKIDQNKLKPEMDEKGNLTTAGFACSQCGQPLFVYKLEQVSEKGKAYTNYFGRCNVAEHEKLILLAQLKPEKDSDEAVTYSLGKFGQRALDFYSIHVTKESTHPVKPLAQIAGNRYASVPVGKALSDACMGTIASFLSKYQDIIIEHQKVVKGNQKRLESLRELAGKENLEYPSVTLPPQPHTKEGLDAYNEVIARVRMWVNLNLWQKLKLSRDDAKPLLRLKNFPSFPLVERQANEVDWWDMVCNVKKLINEKKEDGKVFWQNLAGYKRQEALRPYLSSEEDRKKGKKFARYQLGDLLLHLEKKHGEDWGKVYDEAWERIDKKVEGLSKHIKLEEERRSEDAQSKAALTDWLRAKASFVIEGLKEADKDEFCRCELKLQKWYGDLRGKPFAIEAENSILDISGFSKQYNCAFIWQKDGVKKLNLYLIINYFKGGKLRFKKIKPEAFEANRFYTVINKKSGEIVPMEVNFNFDDPNLIILPLAFGKRQGREFIWNDLLSLETGSLKLANGRVIEKTLYNRRTRQDEPALFVALTFERREVLDSSNIKPMNLIGVDRGENIPAVIALTDPEGCPLSRFKDSLGNPTHILRIGESYKEKQRTIQAKKEVEQRRAGGYSRKYASKAKNLADDMVRNTARDLLYYAVTQDAMLIFENLSRGFGRQGKRTFMAERQYTRMEDWLTAKLAYEGLPSKTYLSKTLAQYTSKTCSNCGFTITSADYDRVLEKLKKTATGWMTTINGKELKVEGQITYYNRYKRQNVVKDLSVELDRLSEESVNNDISSWTKGRSGEALSLLKKRFSHRPVQEKFVCLNCGFETHADEQAALNIARSWLFLRSQEYKKYQTNKTTGNTDKRAFVETWQSFYRKKLKEVWKPAV

SEQ ID NO: 43574 - protein, 978 aa, synthetic construct
  REGION 1..978: note = engineered CasX variant
QEIKRINKIRRRLVKDSNTKKAGKTGPMKTLLVRVMTPDLRERLENLRKKPENIPQPISNTSRANLNKLLTDYTEMKKAILHVYWEEFQKDPVGLMSRVAQPASKKIDQNKLKPEMDEKGNLTTAGFACSQCGQPLFVYKLEQVSEKGKAYTNYFGRCNVAEHEKLIKLAQLKPEKDSDEAVTYSLGKFGQRALDFYSIHVTKESTHPVKPLAQIAGNRYASGPVGKALSDACMGTIASFLSKYQDIIIEHQKVVKGNQKRLESLRELAGKENLEYPSVTLPPQPHTKEGLDAYNEVIARVRMWVNLNLWQKLKLSRDDAKPLLRLKNFPSFPLVERQANEVDWWDMVCNVKKLINEKKEDGKVFWQNLAGYKRQEALRPYLSSEEDRKKGKKFARYQLGDLLLHLEKKHGEDWGKVYDEAWERIDKKVEGLSKHIKLEEERRSEDAQSKAALTDWLRAKASFVIEGLKEADKDEFCRCELKLQKWYGDLRGKPFAIEAENSILDISGFSKQYNCAFIWQKDGVKKLNLYLIINYFKGGKLRFKKIKPEAFEANRFYTVINKKSGEIVPMEVNFNFDDPNLIILPLAFGKRQGREFIWNDLLSLETGSLKLANGRVIEKTLYNRRTRQDEPALFVALTFERREVLDSSNIKPMNLIGVDRGENIPAVIALTDPEGCPLSRFKDSLGNPTHILRIGESYKEKQRTIQAKKEVEQRRAGGYSRKYASKAKNLADDMVRNTARDLLYYAVTQDAMLIFENLSRGFGRQGKRTFMAERQYTRMEDWLTAKLAYEGLPSKTYLSKTLAQYTSKTCSNCGFTITSADYDRVLEKLKKTATGWMTTINGKELKVEGQITYYNRYKRQNVVKDLSVELDRLSEESVNNDISSWTKGRSGEALSLLKKRFSHRPVQEKFVCLNCGFETHADEQAALNIARSWLFLRSQEYKKYQTNKTTGNTDKRAFVETWQSFYRKKLKEVWKPAV

SEQ ID NO: 43575 - protein, 977 aa, synthetic construct
  REGION 1..977: note = engineered CasX variant
QEIKRINKIRRRLVKDSNTKKAGKTGPMKTLLVRVMTPDLRERLENLRKKPENIPQPISNTSRANLNKLLTDYTEMKKAILHVYWEEFQKDPVGLMSRVAQPASKKIDQNKLKPEMDEKGNLTTAGFACSQCGQPLFVYKLEQVSEKGKAYTNYFGRCNVAEHEKLILLAQLKPEKDSDEAVTYSLGKFGQRALDFYSIHVTKESTHPVKPLAQIAGNRYASPVGKALSDACMGTIASFLSKYQDIIIEHQKVVKGNQKRLESLRELAGKENLEYPSVTLPPQPHTKEGLDAYNEVIARVRMWVNLNLWQKLKLSRDDAKPLLRLKNFPSFPLVERQANEVDWWDMVCNVKKLINEKKEDGKVFWQNLAGYKRQEALRPYLSSEEDRKKGKKFARYQLGDLLLHLEKKHGEDWGKVYDEAWERIDKKVEGLSKHIKLEEERRSEDAQSKAALTDWLRAKASFVIEGLKEADKDEFCRCELKLQKWYGDLRGKPFAIEAENSILDISGFSKQYNCAFIWQKDGVKKLNLYLIINYFKGGKLRFKKIKPEAFEANRFYTVINKKSGEIVPMEVNFNFDDPNLIILPLAFGKRQGREFIWNDLLSLETGSLKLANGRVIEKTLYNRRTRQDEPALFVALTFERREVLDSSNIKPMNLIGVDRGENIPAVIALTDPEGCPLSRFKDSLGNPTHILRIGESYKEKQRTIQAKKEVEQRRAGGYSRKYASKAKNLADDMVRNTARDLLYYAVTQDAMLIFENLSRGFGRQGKRTFMAERQYTRMEDWLTAKLAYEGLPSKTYLSKTLAQYTSKTCSNCGFTITSADYDRVLEKLKKTATGWMTTINGKELKVEGQITYYNRYKRQNVVKDLSVELDRLSEESVNNDISSWTKGRSGEALSLLKKRFSHRPVQEKFVCLNCGFETHADEQAALNIARSWLFLRSQEYKKYQTNKTTGNTDKRAFVETWQSFYRKKLKEVWKPAV

SEQ ID NO: 43576 - protein, 978 aa, synthetic construct
  REGION 1..978: note = engineered CasX variant
QEIKRINKIRRRLVKDSNTKKAGKTGPMKTLLVRVMTPDLRERLENLRKKPENIPQPISNTSRANLNKLLTDYTEMKKAILHVYWEEFQKDPVGLMSRVAQPASKKIDQNKLKPEMDEKGNLTTAGFACSQCGQPLFVYKLEQVSEKGKAYTNYFGRCNVAEHEKLILLAQLKPEKDSDEAVTYSLGKFGQRALDFYSIHVTKESTHPVKPLAQIAGNRYASYPVGKALSDACMGTIASFLSKYQDIIIEHQKVVKGNQKRLESLRELAGKENLEYPSVTLPPQPHTKEGLDAYNEVIARVRMWVNLNLWQKLKLSRDDAKPLLRLKGFPSFPLVERQANEVDWWDMVCNVKKLINEKKEDGKVFWQNLAGYKRQEALRPYLSSEEDRKKGKKFARYQLGDLLNHLEKKHGEDWGKVYDEAWERIDKKVEGLSKHIKLEEERRSEDAQSKAALTDWLRAKASFVIEGLKEADKDEFCRCELKLQKWYGDLRGKPFAIEAENSILDISGFSKQYNCAFIWQKDGVKKLNLYLIINYFKGGKLRFKKIKPEAFEANRFYTVINKKSGEIVPMEVNFNFDDPNLIILPLAFGKRQGREFIWNDLLSLETGSLKLANGRVIEKTLYNRRTRQDEPALFVALTFERREVLDSSNIKPMNLIGVDRGENIPAVIALTDPEGCPLSRFKDSLGNPTHILRIGESYKEKQRTIQAKKEVEQRRAGGYSRKYASKAKNLADDMVRNTARDLLYYAVTQDAMLIFENLSRGFGRQGKRTFMAERQYTRMEDWLTAKLAYEGLPSKTYLSKTLAQYTSKTCSNCGFTITSADYDRVLEKLKKTATGWMTTINGKELKVEGQITYYNRYKRQNVVKDLSVELDRLSEESVNNDISSWTKGRSGEALSLLKKRFSHRPVQEKFVCLNCGFETHADEQAALNIARSWLFLRSQEYKKYQTNKTTGNTDKRAFVETWQSFYRKKLKEVWKPAV

SEQ ID NO: 43577 - protein, 978 aa, synthetic construct
  REGION 1..978: note = engineered CasX variant
QEIKRINKIRRRLVKDSNTKKAGKTGPMKTLLVRVMTPDLRERLENLRKKPENIPQPISNTSRANLNKLLTDYTEMKKAILHVYWEEFQKDPVGLMSRVAQPASKKIDQNKLKPEMDEKGNLTTAGFACSQCGQPLFVYKLEQVSEKGKAYTNYFGRCNVAEHEKLILLAQLKPEKDSDEAVTYSLGKFGQRALDFYSIHVTKESTHPVKPLAQIAGNRYASHPVGKALSDACMGTIASFLSKYQDIIIEHQKVVKGNQKRLESLRELAGKENLEYPSVTLPPQPHTKEGLDAYNEVIARVRMWVNLNLWQKLKLSRDDAKPLLRLKGFPSFPLVERQANEVDWWDMVCNVKKLINEKKEDGKVFWQNLAGYKRQEALRPYLSSEEDRKKGKKFARYQLGDLLNHLEKKHGEDWGKVYDEAWERIDKKVEGLSKHIKLEEERRSEDAQSKAALTDWLRAKASFVIEGLKEADKDEFCRCELKLQKWYGDLRGKPFAIEAENSILDISGFSKQYNCAFIWQKDGVKKLNLYLIINYFKGGKLRFKKIKPEAFEANRFYTVINKKSGEIVPMEVNFNFDDPNLIILPLAFGKRQGREFIWNDLLSLETGSLKLANGRVIEKTLYNRRTRQDEPALFVALTFERREVLDSSNIKPMNLIGVDRGENIPAVIALTDPEGCPLSRFKDSLGNPTHILRIGESYKEKQRTIQAKKEVEQRRAGGYSRKYASKAKNLADDMVRNTARDLLYYAVTQDAMLIFENLSRGFGRQGKRTFMAERQYTRMEDWLTAKLAYEGLPSKTYLSKTLAQYTSKTCSNCGFTITSADYDRVLEKLKKTATGWMTTINGKELKVEGQITYYNRYKRQNVVKDLSVELDRLSEESVNNDISSWTKGRSGEALSLLKKRFSHRPVQEKFVCLNCGFETHADEQAALNIARSWLFLRSQEYKKYQTNKTTGNTDKRAFVETWQSFYRKKLKEVWKPAV

SEQ ID NO: 43578 - protein, 978 aa, synthetic construct
  REGION 1..978: note = engineered CasX variant
QEIKRINKIRRRLVKDSNTKKAGKTGPMKTLLVRVMTPDLRERLENLRKKPENIPQPISNTSRANLNKLLTDYTEMKKAILHVYWEEFQKDPVGLMSRVAQPASKKIDQNKLKPEMDEKGNLTTAGFACSQCGQPLFVYKLEQVSEKGKAYTNYFGRCNVAEHEKLILLAQLKPEKDSDEAVTYSLGKFGQRALDFYSIHVTKESTHPVKPLAQIAGNRYASSPVGKALSDACMGTIASFLSKYQDIIIEHQKVVKGNQKRLESLRELAGKENLEYPSVTLPPQPHTKEGLDAYNEVIARVRMWVNLNLWQKLKLSRDDAKPLLRLKGFPSFPLVERQANEVDWWDMVCNVKKLINEKKEDGKVFWQNLAGYKRQEALRPYLSSEEDRKKGKKFARYQLGDLLNHLEKKHGEDWGKVYDEAWERIDKKVEGLSKHIKLEEERRSEDAQSKAALTDWLRAKASFVIEGLKEADKDEFCRCELKLQKWYGDLRGKPFAIEAENSILDISGFSKQYNCAFIWQKDGVKKLNLYLIINYFKGGKLRFKKIKPEAFEANRFYTVINKKSGEIVPMEVNFNFDDPNLIILPLAFGKRQGREFIWNDLLSLETGSLKLANGRVIEKTLYNRRTRQDEPALFVALTFERREVLDSSNIKPMNLIGVDRGENIPAVIALTDPEGCPLSRFKDSLGNPTHILRIGESYKEKQRTIQAKKEVEQRRAGGYSRKYASKAKNLADDMVRNTARDLLYYAVTQDAMLIFENLSRGFGRQGKRTFMAERQYTRMEDWLTAKLAYEGLPSKTYLSKTLAQYTSKTCSNCGFTITSADYDRVLEKLKKTATGWMTTINGKELKVEGQITYYNRYKRQNVVKDLSVELDRLSEESVNNDISSWTKGRSGEALSLLKKRFSHRPVQEKFVCLNCGFETHADEQAALNIARSWLFLRSQEYKKYQTNKTTGNTDKRAFVETWQSFYRKKLKEVWKPAV

SEQ ID NO: 43579 - protein, 978 aa, synthetic construct
  REGION 1..978: note = engineered CasX variant
QEIKRINKIRRRLVKDSNTKKAGKTGPMKTLLVRVMTPDLRERLENLRKKPENIPQPISNTSRANLNKLLTDYTEMKKAILHVYWEEFQKDPVGLMSRVAQPASKKIDQNKLKPEMDEKGNLTTAGFACSQCGQPLFVYKLEQVSEKGKAYTNYFGRCNVAEHEKLILLAQLKPEKDSDEAVTYSLGKFGQRALDFYSIHVTKESTHPVKPLAQIAGNRYASTPVGKALSDACMGTIASFLSKYQDIIIEHQKVVKGNQKRLESLRELAGKENLEYPSVTLPPQPHTKEGLDAYNEVIARVRMWVNLNLWQKLKLSRDDAKPLLRLKGFPSFPLVERQANEVDWWDMVCNVKKLINEKKEDGKVFWQNLAGYKRQEALRPYLSSEEDRKKGKKFARYQLGDLLNHLEKKHGEDWGKVYDEAWERIDKKVEGLSKHIKLEEERRSEDAQSKAALTDWLRAKASFVIEGLKEADKDEFCRCELKLQKWYGDLRGKPFAIEAENSILDISGFSKQYNCAFIWQKDGVKKLNLYLIINYFKGGKLRFKKIKPEAFEANRFYTVINKKSGEIVPMEVNFNFDDPNLIILPLAFGKRQGREFIWNDLLSLETGSLKLANGRVIEKTLYNRRTRQDEPALFVALTFERREVLDSSNIKPMNLIGVDRGENIPAVIALTDPEGCPLSRFKDSLGNPTHILRIGESYKEKQRTIQAKKEVEQRRAGGYSRKYASKAKNLADDMVRNTARDLLYYAVTQDAMLIFENLSRGFGRQGKRTFMAERQYTRMEDWLTAKLAYEGLPSKTYLSKTLAQYTSKTCSNCGFTITSADYDRVLEKLKKTATGWMTTINGKELKVEGQITYYNRYKRQNVVKDLSVELDRLSEESVNNDISSWTKGRSGEALSLLKKRFSHRPVQEKFVCLNCGFETHADEQAALNIARSWLFLRSQEYKKYQTNKTTGNTDKRAFVETWQSFYRKKLKEVWKPAV

SEQ ID NO: 43580 - protein, 978 aa, synthetic construct
  REGION 1..978: note = engineered CasX variant
QEIKRINKIRRRLVKDSNTKKAGKTGPMKTLLVRVMTPDLRERLENLRKKPENIPQPISNTSRANLNKLLTDYTEMKKAILHVYWEEFQKDPVGLMSRVAQPASKKIDQNKLKPEMDEKGNLTTAGFACSQCGQPLFVYKLEQVSEKGKAYTNYFGRCNVAEHEKLILLAQLKPEKDSDEAVTYSLGKFGQRALDFYSIHVTKESTHPVKPLAQIAGNRYASAPVGKALSDACMGTIASFLSKYQDIIIEHQKVVKGNQKRLESLRELAGKENLEYPSVTLPPQPHTKEGLDAYNEVIARVRMWVNLNLWQKLKLSRDDAKPLLRLKGFPSFPLVERQANEVDWWDMVCNVKKLINEKKEDGKVFWQNLAGYKRQEALRPYLSSEEDRKKGKKFARYQLGDLLNHLEKKHGEDWGKVYDEAWERIDKKVEGLSKHIKLEEERRSEDAQSKAALTDWLRAKASFVIEGLKEADKDEFCRCELKLQKWYGDLRGKPFAIEAENSILDISGFSKQYNCAFIWQKDGVKKLNLYLIINYFKGGKLRFKKIKPEAFEANRFYTVINKKSGEIVPMEVNFNFDDPNLIILPLAFGKRQGREFIWNDLLSLETGSLKLANGRVIEKTLYNRRTRQDEPALFVALTFERREVLDSSNIKPMNLIGVDRGENIPAVIALTDPEGCPLSRFKDSLGNPTHILRIGESYKEKQRTIQAKKEVEQRRAGGYSRKYASKAKNLADDMVRNTARDLLYYAVTQDAMLIFENLSRGFGRQGKRTFMAERQYTRMEDWLTAKLAYEGLPSKTYLSKTLAQYTSKTCSNCGFTITSADYDRVLEKLKKTATGWMTTINGKELKVEGQITYYNRYKRQNVVKDLSVELDRLSEESVNNDISSWTKGRSGEALSLLKKRFSHRPVQEKFVCLNCGFETHADEQAALNIARSWLFLRSQEYKKYQTNKTTGNTDKRAFVETWQSFYRKKLKEVWKPAV

SEQ ID NO: 43581 - protein, 978 aa, synthetic construct
  REGION 1..978: note = engineered CasX variant
QEIKRINKIRRRLVKDSNTKKAGKTGPMKTLLVRVMTPDLRERLENLRKKPENIPQPISNTSRANLNKLLTDYTEMKKAILHVYWEEFQKDPVGLMSRVAQPASKKIDQNKLKPEMDEKGNLTTAGFACSQCGQPLFVYKLEQVSEKGKAYTNYFGRCNVAEHEKLILLAQLKPEKDSDEAVTYSLGKFGQRALDFYSIHVTKESTHPVKPLAQIAGNRYASVPVGKALSDACMGTIASFLSKYQDIIIEHQKVVKGNQKRLESLRELAGKENLEYPSVTLPPQPHTKEGLDAYNEVIARVRMWVNLNLWQKLKLSRDDAKPLLRLKGFPSFPLVERQANEVDWWDMVCNVKKLINEKKEDGKVFWQNLAGYKRQEALRPYLSSEEDRKKGKKFARYQLGDLLNHLEKKHGEDWGKVYDEAWERIDKKVEGLSKHIKLEEERRSEDAQSKAALTDWLRAKASFVIEGLKEADKDEFCRCELKLQKWYGDLRGKPFAIEAENSILDISGFSKQYNCAFIWQKDGVKKLNLYLIINYFKGGKLRFKKIKPEAFEANRFYTVINKKSGEIVPMEVNFNFDDPNLIILPLAFGKRQGREFIWNDLLSLETGSLKLANGRVIEKTLYNRRTRQDEPALFVALTFERREVLDSSNIKPMNLIGVDRGENIPAVIALTDPEGCPLSRFKDSLGNPTHILRIGESYKEKQRTIQAKKEVEQRRAGGYSRKYASKAKNLADDMVRNTARDLLYYAVTQDAMLIFENLSRGFGRQGKRTFMAERQYTRMEDWLTAKLAYEGLPSKTYLSKTLAQYTSKTCSNCGFTITSADYDRVLEKLKKTATGWMTTINGKELKVEGQITYYNRYKRQNVVKDLSVELDRLSEESVNNDISSWTKGRSGEALSLLKKRFSHRPVQEKFVCLNCGFETHADEQAALNIARSWLFLRSQEYKKYQTNKTTGNTDKRAFVETWQSFYRKKLKEVWKPAV

SEQ ID NO: 43582 - protein, 978 aa, synthetic construct
  REGION 1..978: note = engineered CasX variant
QEIKRINKIRRRLVKDSNTKKAGKTGPMKTLLVRVMTPDLRERLENLRKKPENIPQPISNTSRANLNKLLTDYTEMKKAILHVYWEEFQKDPVGLMSRVAQPASKKIDQNKLKPEMDEKGNLTTAGFACSQCGQPLFVYKLEQVSEKGKAYTNYFGRCNVAEHEKLIKLAQLKPEKDSDEAVTYSLGKFGQRALDFYSIHVTKESTHPVKPLAQIAGNRYASGPVGKALSDACMGTIASFLSKYQDIIIEHQKVVKGNQKRLESLRELAGKENLEYPSVTLPPQPHTKEGLDAYNEVIARVRMWVNLNLWQKLKLSRDDAKPLLRLKGFPSFPLVERQANEVDWWDMVCNVKKLINEKKEDGKVFWQNLAGYKRQEALRPYLSSEEDRKKGKKFARYQLGDLLNHLEKKHGEDWGKVYDEAWERIDKKVEGLSKHIKLEEERRSEDAQSKAALTDWLRAKASFVIEGLKEADKDEFCRCELKLQKWYGDLRGKPFAIEAENSILDISGFSKQYNCAFIWQKDGVKKLNLYLIINYFKGGKLRFKKIKPEAFEANRFYTVINKKSGEIVPMEVNFNFDDPNLIILPLAFGKRQGREFIWNDLLSLETGSLKLANGRVIEKTLYNRRTRQDEPALFVALTFERREVLDSSNIKPMNLIGVDRGENIPAVIALTDPEGCPLSRFKDSLGNPTHILRIGESYKEKQRTIQAKKEVEQRRAGGYSRKYASKAKNLADDMVRNTARDLLYYAVTQDAMLIFENLSRGFGRQGKRTFMAERQYTRMEDWLTAKLAYEGLPSKTYLSKTLAQYTSKTCSNCGFTITSADYDRVLEKLKKTATGWMTTINGKELKVEGQITYYNRYKRQNVVKDLSVELDRLSEESVNNDISSWTKGRSGEALSLLKKRFSHRPVQEKFVCLNCGFETHADEQAALNIARSWLFLRSQEYKKYQTNKTTGNTDKRAFVETWQSFYRKKLKEVWKPAV

SEQ ID NO: 43583 - protein, 977 aa, synthetic construct
  REGION 1..977: note = engineered CasX variant
QEIKRINKIRRRLVKDSNTKKAGKTGPMKTLLVRVMTPDLRERLENLRKKPENIPQPISNTSRANLNKLLTDYTEMKKAILHVYWEEFQKDPVGLMSRVAQPASKKIDQNKLKPEMDEKGNLTTAGFACSQCGQPLFVYKLEQVSEKGKAYTNYFGRCNVAEHEKLILLAQLKPEKDSDEAVTYSLGKFGQRALDFYSIHVTKESTHPVKPLAQIAGNRYASPVGKALSDACMGTIASFLSKYQDIIIEHQKVVKGNQKRLESLRELAGKENLEYPSVTLPPQPHTKEGLDAYNEVIARVRMWVNLNLWQKLKLSRDDAKPLLRLKGFPSFPLVERQANEVDWWDMVCNVKKLINEKKEDGKVFWQNLAGYKRQEALRPYLSSEEDRKKGKKFARYQLGDLLNHLEKKHGEDWGKVYDEAWERIDKKVEGLSKHIKLEEERRSEDAQSKAALTDWLRAKASFVIEGLKEADKDEFCRCELKLQKWYGDLRGKPFAIEAENSILDISGFSKQYNCAFIWQKDGVKKLNLYLIINYFKGGKLRFKKIKPEAFEANRFYTVINKKSGEIVPMEVNFNFDDPNLIILPLAFGKRQGREFIWNDLLSLETGSLKLANGRVIEKTLYNRRTRQDEPALFVALTFERREVLDSSNIKPMNLIGVDRGENIPAVIALTDPEGCPLSRFKDSLGNPTHILRIGESYKEKQRTIQAKKEVEQRRAGGYSRKYASKAKNLADDMVRNTARDLLYYAVTQDAMLIFENLSRGFGRQGKRTFMAERQYTRMEDWLTAKLAYEGLPSKTYLSKTLAQYTSKTCSNCGFTITSADYDRVLEKLKKTATGWMTTINGKELKVEGQITYYNRYKRQNVVKDLSVELDRLSEESVNNDISSWTKGRSGEALSLLKKRFSHRPVQEKFVCLNCGFETHADEQAALNIARSWLFLRSQEYKKYQTNKTTGNTDKRAFVETWQSFYRKKLKEVWKPAV

SEQ ID NO: 43584 - protein, 978 aa, synthetic construct
  REGION 1..978: note = engineered CasX variant
QEIKRINKIRRRLVKDSNTKKAGKTGPMKTLLVRVMTPDLRERLENLRKKPENIPQPISNTSRANLNKLLTDYTEMKKAILHVYWEEFQKDPVGLMSRVAQPASKKIDQNKLKPEMDEKGNLTTAGFACSQCGQPLFVYKLEQVSEKGKAYTNYFGRCNVAEHEKLILLAQLKPEKDSDEAVTYSLGKFGQRALDFYSIHVTKESTHPVKPLAQIAGNRYASYPVGKALSDACMGTIASFLSKYQDIIIEHQKVVKGNQKRLESLRELAGKENLEYPSVTLPPQPHTKEGLDAYNEVIARVRMWVNLNLWQKLKLSRDDAKPLLRLKGFPSFPLVERQANEVDWWDMVCNVKKLINEKKEDGKVFWQNLAGYKRQEALRPYLSSEEDRKKGKKFARYQLGDLLWHLEKKHGEDWGKVYDEAWERIDKKVEGLSKHIKLEEERRSEDAQSKAALTDWLRAKASFVIEGLKEADKDEFCRCELKLQKWYGDLRGKPFAIEAENSILDISGFSKQYNCAFIWQKDGVKKLNLYLIINYFKGGKLRFKKIKPEAFEANRFYTVINKKSGEIVPMEVNFNFDDPNLIILPLAFGKRQGREFIWNDLLSLETGSLKLANGRVIEKTLYNRRTRQDEPALFVALTFERREVLDSSNIKPMNLIGVDRGENIPAVIALTDPEGCPLSRFKDSLGNPTHILRIGESYKEKQRTIQAKKEVEQRRAGGYSRKYASKAKNLADDMVRNTARDLLYYAVTQDAMLIFENLSRGFGRQGKRTFMAERQYTRMEDWLTAKLAYEGLPSKTYLSKTLAQYTSKTCSNCGFTITSADYDRVLEKLKKTATGWMTTINGKELKVEGQITYYNRYKRQNVVKDLSVELDRLSEESVNNDISSWTKGRSGEALSLLKKRFSHRPVQEKFVCLNCGFETHADEQAALNIARSWLFLRSQEYKKYQTNKTTGNTDKRAFVETWQSFYRKKLKEVWKPAV

SEQ ID NO: 43585 - protein, 978 aa, synthetic construct
  REGION 1..978: note = engineered CasX variant
QEIKRINKIRRRLVKDSNTKKAGKTGPMKTLLVRVMTPDLRERLENLRKKPENIPQPISNTSRANLNKLLTDYTEMKKAILHVYWEEFQKDPVGLMSRVAQPASKKIDQNKLKPEMDEKGNLTTAGFACSQCGQPLFVYKLEQVSEKGKAYTNYFGRCNVAEHEKLILLAQLKPEKDSDEAVTYSLGKFGQRALDFYSIHVTKESTHPVKPLAQIAGNRYASHPVGKALSDACMGTIASFLSKYQDIIIEHQKVVKGNQKRLESLRELAGKENLEYPSVTLPPQPHTKEGLDAYNEVIARVRMWVNLNLWQKLKLSRDDAKPLLRLKGFPSFPLVERQANEVDWWDMVCNVKKLINEKKEDGKVFWQNLAGYKRQEALRPYLSSEEDRKKGKKFARYQLGDLLWHLEKKHGEDWGKVYDEAWERIDKKVEGLSKHIKLEEERRSEDAQSKAALTDWLRAKASFVIEGLKEADKDEFCRCELKLQKWYGDLRGKPFAIEAENSILDISGFSKQYNCAFIWQKDGVKKLNLYLIINYFKGGKLRFKKIKPEAFEANRFYTVINKKSGEIVPMEVNFNFDDPNLIILPLAFGKRQGREFIWNDLLSLETGSLKLANGRVIEKTLYNRRTRQDEPALFVALTFERREVLDSSNIKPMNLIGVDRGENIPAVIALTDPEGCPLSRFKDSLGNPTHILRIGESYKEKQRTIQAKKEVEQRRAGGYSRKYASKAKNLADDMVRNTARDLLYYAVTQDAMLIFENLSRGFGRQGKRTFMAERQYTRMEDWLTAKLAYEGLPSKTYLSKTLAQYTSKTCSNCGFTITSADYDRVLEKLKKTATGWMTTINGKELKVEGQITYYNRYKRQNVVKDLSVELDRLSEESVNNDISSWTKGRSGEALSLLKKRFSHRPVQEKFVCLNCGFETHADEQAALNIARSWLFLRSQEYKKYQTNKTTGNTDKRAFVETWQSFYRKKLKEVWKPAV

SEQ ID NO: 43586 - protein, 978 aa, synthetic construct
  REGION 1..978: note = engineered CasX variant
QEIKRINKIRRRLVKDSNTKKAGKTGPMKTLLVRVMTPDLRERLENLRKKPENIPQPISNTSRANLNKLLTDYTEMKKAILHVYWEEFQKDPVGLMSRVAQPASKKIDQNKLKPEMDEKGNLTTAGFACSQCGQPLFVYKLEQVSEKGKAYTNYFGRCNVAEHEKLILLAQLKPEKDSDEAVTYSLGKFGQRALDFYSIHVTKESTHPVKPLAQIAGNRYASSPVGKALSDACMGTIASFLSKYQDIIIEHQKVVKGNQKRLESLRELAGKENLEYPSVTLPPQPHTKEGLDAYNEVIARVRMWVNLNLWQKLKLSRDDAKPLLRLKGFPSFPLVERQANEVDWWDMVCNVKKLINEKKEDGKVFWQNLAGYKRQEALRPYLSSEEDRKKGKKFARYQLGDLLWHLEKKHGEDWGKVYDEAWERIDKKVEGLSKHIKLEEERRSEDAQSKAALTDWLRAKASFVIEGLKEADKDEFCRCELKLQKWYGDLRGKPFAIEAENSILDISGFSKQYNCAFIWQKDGVKKLNLYLIINYFKGGKLRFKKIKPEAFEANRFYTVINKKSGEIVPMEVNFNFDDPNLIILPLAFGKRQGREFIWNDLLSLETGSLKLANGRVIEKTLYNRRTRQDEPALFVALTFERREVLDSSNIKPMNLIGVDRGENIPAVIALTDPEGCPLSRFKDSLGNPTHILRIGESYKEKQRTIQAKKEVEQRRAGGYSRKYASKAKNLADDMVRNTARDLLYYAVTQDAMLIFENLSRGFGRQGKRTFMAERQYTRMEDWLTAKLAYEGLPSKTYLSKTLAQYTSKTCSNCGFTITSADYDRVLEKLKKTATGWMTTINGKELKVEGQITYYNRYKRQNVVKDLSVELDRLSEESVNNDISSWTKGRSGEALSLLKKRFSHRPVQEKFVCLNCGFETHADEQAALNIARSWLFLRSQEYKKYQTNKTTGNTDKRAFVETWQSFYRKKLKEVWKPAV

SEQ ID NO: 43587 - protein, 978 aa, synthetic construct
  REGION 1..978: note = engineered CasX variant
QEIKRINKIRRRLVKDSNTKKAGKTGPMKTLLVRVMTPDLRERLENLRKKPENIPQPISNTSRANLNKLLTDYTEMKKAILHVYWEEFQKDPVGLMSRVAQPASKKIDQNKLKPEMDEKGNLTTAGFACSQCGQPLFVYKLEQVSEKGKAYTNYFGRCNVAEHEKLILLAQLKPEKDSDEAVTYSLGKFGQRALDFYSIHVTKESTHPVKPLAQIAGNRYASTPVGKALSDACMGTIASFLSKYQDIIIEHQKVVKGNQKRLESLRELAGKENLEYPSVTLPPQPHTKEGLDAYNEVIARVRMWVNLNLWQKLKLSRDDAKPLLRLKGFPSFPLVERQANEVDWWDMVCNVKKLINEKKEDGKVFWQNLAGYKRQEALRPYLSSEEDRKKGKKFARYQLGDLLWHLEKKHGEDWGKVYDEAWERIDKKVEGLSKHIKLEEERRSEDAQSKAALTDWLRAKASFVIEGLKEADKDEFCRCELKLQKWYGDLRGKPFAIEAENSILDISGFSKQYNCAFIWQKDGVKKLNLYLIINYFKGGKLRFKKIKPEAFEANRFYTVINKKSGEIVPMEVNFNFDDPNLIILPLAFGKRQGREFIWNDLLSLETGSLKLANGRVIEKTLYNRRTRQDEPALFVALTFERREVLDSSNIKPMNLIGVDRGENIPAVIALTDPEGCPLSRFKDSLGNPTHILRIGESYKEKQRTIQAKKEVEQRRAGGYSRKYASKAKNLADDMVRNTARDLLYYAVTQDAMLIFENLSRGFGRQGKRTFMAERQYTRMEDWLTAKLAYEGLPSKTYLSKTLAQYTSKTCSNCGFTITSADYDRVLEKLKKTATGWMTTINGKELKVEGQITYYNRYKRQNVVKDLSVELDRLSEESVNNDISSWTKGRSGEALSLLKKRFSHRPVQEKFVCLNCGFETHADEQAALNIARSWLFLRSQEYKKYQTNKTTGNTDKRAFVETWQSFYRKKLKEVWKPAV

SEQ ID NO: 43588 - protein, 978 aa, synthetic construct
  REGION 1..978: note = engineered CasX variant
QEIKRINKIRRRLVKDSNTKKAGKTGPMKTLLVRVMTPDLRERLENLRKKPENIPQPISNTSRANLNKLLTDYTEMKKAILHVYWEEFQKDPVGLMSRVAQPASKKIDQNKLKPEMDEKGNLTTAGFACSQCGQPLFVYKLEQVSEKGKAYTNYFGRCNVAEHEKLILLAQLKPEKDSDEAVTYSLGKFGQRALDFYSIHVTKESTHPVKPLAQIAGNRYASAPVGKALSDACMGTIASFLSKYQDIIIEHQKVVKGNQKRLESLRELAGKENLEYPSVTLPPQPHTKEGLDAYNEVIARVRMWVNLNLWQKLKLSRDDAKPLLRLKGFPSFPLVERQANEVDWWDMVCNVKKLINEKKEDGKVFWQNLAGYKRQEALRPYLSSEEDRKKGKKFARYQLGDLLWHLEKKHGEDWGKVYDEAWERIDKKVEGLSKHIKLEEERRSEDAQSKAALTDWLRAKASFVIEGLKEADKDEFCRCELKLQKWYGDLRGKPFAIEAENSILDISGFSKQYNCAFIWQKDGVKKLNLYLIINYFKGGKLRFKKIKPEAFEANRFYTVINKKSGEIVPMEVNFNFDDPNLIILPLAFGKRQGREFIWNDLLSLETGSLKLANGRVIEKTLYNRRTRQDEPALFVALTFERREVLDSSNIKPMNLIGVDRGENIPAVIALTDPEGCPLSRFKDSLGNPTHILRIGESYKEKQRTIQAKKEVEQRRAGGYSRKYASKAKNLADDMVRNTARDLLYYAVTQDAMLIFENLSRGFGRQGKRTFMAERQYTRMEDWLTAKLAYEGLPSKTYLSKTLAQYTSKTCSNCGFTITSADYDRVLEKLKKTATGWMTTINGKELKVEGQITYYNRYKRQNVVKDLSVELDRLSEESVNNDISSWTKGRSGEALSLLKKRFSHRPVQEKFVCLNCGFETHADEQAALNIARSWLFLRSQEYKKYQTNKTTGNTDKRAFVETWQSFYRKKLKEVWKPAV

SEQ ID NO: 43589 - protein, 978 aa, synthetic construct
  REGION 1..978: note = engineered CasX variant
QEIKRINKIRRRLVKDSNTKKAGKTGPMKTLLVRVMTPDLRERLENLRKKPENIPQPISNTSRANLNKLLTDYTEMKKAILHVYWEEFQKDPVGLMSRVAQPASKKIDQNKLKPEMDEKGNLTTAGFACSQCGQPLFVYKLEQVSEKGKAYTNYFGRCNVAEHEKLILLAQLKPEKDSDEAVTYSLGKFGQRALDFYSIHVTKESTHPVKPLAQIAGNRYASVPVGKALSDACMGTIASFLSKYQDIIIEHQKVVKGNQKRLESLRELAGKENLEYPSVTLPPQPHTKEGLDAYNEVIARVRMWVNLNLWQKLKLSRDDAKPLLRLKGFPSFPLVERQANEVDWWDMVCNVKKLINEKKEDGKVFWQNLAGYKRQEALRPYLSSEEDRKKGKKFARYQLGDLLWHLEKKHGEDWGKVYDEAWERIDKKVEGLSKHIKLEEERRSEDAQSKAALTDWLRAKASFVIEGLKEADKDEFCRCELKLQKWYGDLRGKPFAIEAENSILDISGFSKQYNCAFIWQKDGVKKLNLYLIINYFKGGKLRFKKIKPEAFEANRFYTVINKKSGEIVPMEVNFNFDDPNLIILPLAFGKRQGREFIWNDLLSLETGSLKLANGRVIEKTLYNRRTRQDEPALFVALTFERREVLDSSNIKPMNLIGVDRGENIPAVIALTDPEGCPLSRFKDSLGNPTHILRIGESYKEKQRTIQAKKEVEQRRAGGYSRKYASKAKNLADDMVRNTARDLLYYAVTQDAMLIFENLSRGFGRQGKRTFMAERQYTRMEDWLTAKLAYEGLPSKTYLSKTLAQYTSKTCSNCGFTITSADYDRVLEKLKKTATGWMTTINGKELKVEGQITYYNRYKRQNVVKDLSVELDRLSEESVNNDISSWTKGRSGEALSLLKKRFSHRPVQEKFVCLNCGFETHADEQAALNIARSWLFLRSQEYKKYQTNKTTGNTDKRAFVETWQSFYRKKLKEVWKPAV

SEQ ID NO: 43590 - protein, 978 aa, synthetic construct
  REGION 1..978: note = engineered CasX variant
QEIKRINKIRRRLVKDSNTKKAGKTGPMKTLLVRVMTPDLRERLENLRKKPENIPQPISNTSRANLNKLLTDYTEMKKAILHVYWEEFQKDPVGLMSRVAQPASKKIDQNKLKPEMDEKGNLTTAGFACSQCGQPLFVYKLEQVSEKGKAYTNYFGRCNVAEHEKLIKLAQLKPEKDSDEAVTYSLGKFGQRALDFYSIHVTKESTHPVKPLAQIAGNRYASGPVGKALSDACMGTIASFLSKYQDIIIEHQKVVKGNQKRLESLRELAGKENLEYPSVTLPPQPHTKEGLDAYNEVIARVRMWVNLNLWQKLKLSRDDAKPLLRLKGFPSFPLVERQANEVDWWDMVCNVKKLINEKKEDGKVFWQNLAGYKRQEALRPYLSSEEDRKKGKKFARYQLGDLLWHLEKKHGEDWGKVYDEAWERIDKKVEGLSKHIKLEEERRSEDAQSKAALTDWLRAKASFVIEGLKEADKDEFCRCELKLQKWYGDLRGKPFAIEAENSILDISGFSKQYNCAFIWQKDGVKKLNLYLIINYFKGGKLRFKKIKPEAFEANRFYTVINKKSGEIVPMEVNFNFDDPNLIILPLAFGKRQGREFIWNDLLSLETGSLKLANGRVIEKTLYNRRTRQDEPALFVALTFERREVLDSSNIKPMNLIGVDRGENIPAVIALTDPEGCPLSRFKDSLGNPTHILRIGESYKEKQRTIQAKKEVEQRRAGGYSRKYASKAKNLADDMVRNTARDLLYYAVTQDAMLIFENLSRGFGRQGKRTFMAERQYTRMEDWLTAKLAYEGLPSKTYLSKTLAQYTSKTCSNCGFTITSADYDRVLEKLKKTATGWMTTINGKELKVEGQITYYNRYKRQNVVKDLSVELDRLSEESVNNDISSWTKGRSGEALSLLKKRFSHRPVQEKFVCLNCGFETHADEQAALNIARSWLFLRSQEYKKYQTNKTTGNTDKRAFVETWQSFYRKKLKEVWKPAV

SEQ ID NO: 43591 - protein, 977 aa, synthetic construct
  REGION 1..977: note = engineered CasX variant
QEIKRINKIRRRLVKDSNTKKAGKTGPMKTLLVRVMTPDLRERLENLRKKPENIPQPISNTSRANLNKLLTDYTEMKKAILHVYWEEFQKDPVGLMSRVAQPASKKIDQNKLKPEMDEKGNLTTAGFACSQCGQPLFVYKLEQVSEKGKAYTNYFGRCNVAEHEKLILLAQLKPEKDSDEAVTYSLGKFGQRALDFYSIHVTKESTHPVKPLAQIAGNRYASPVGKALSDACMGTIASFLSKYQDIIIEHQKVVKGNQKRLESLRELAGKENLEYPSVTLPPQPHTKEGLDAYNEVIARVRMWVNLNLWQKLKLSRDDAKPLLRLKGFPSFPLVERQANEVDWWDMVCNVKKLINEKKEDGKVFWQNLAGYKRQEALRPYLSSEEDRKKGKKFARYQLGDLLWHLEKKHGEDWGKVYDEAWERIDKKVEGLSKHIKLEEERRSEDAQSKAALTDWLRAKASFVIEGLKEADKDEFCRCELKLQKWYGDLRGKPFAIEAENSILDISGFSKQYNCAFIWQKDGVKKLNLYLIINYFKGGKLRFKKIKPEAFEANRFYTVINKKSGEIVPMEVNFNFDDPNLIILPLAFGKRQGREFIWNDLLSLETGSLKLANGRVIEKTLYNRRTRQDEPALFVALTFERREVLDSSNIKPMNLIGVDRGENIPAVIALTDPEGCPLSRFKDSLGNPTHILRIGESYKEKQRTIQAKKEVEQRRAGGYSRKYASKAKNLADDMVRNTARDLLYYAVTQDAMLIFENLSRGFGRQGKRTFMAERQYTRMEDWLTAKLAYEGLPSKTYLSKTLAQYTSKTCSNCGFTITSADYDRVLEKLKKTATGWMTTINGKELKVEGQITYYNRYKRQNVVKDLSVELDRLSEESVNNDISSWTKGRSGEALSLLKKRFSHRPVQEKFVCLNCGFETHADEQAALNIARSWLFLRSQEYKKYQTNKTTGNTDKRAFVETWQSFYRKKLKEVWKPAV

SEQ ID NO: 43592 - protein, 978 aa, synthetic construct
  REGION 1..978: note = engineered CasX variant
QEIKRINKIRRRLVKDSNTKKAGKTGPMKTLLVRVMTPDLRERLENLRKKPENIPQPISNTSRANLNKLLTDYTEMKKAILHVYWEEFQKDPVGLMSRVAQPASKKIDQNKLKPEMDEKGNLTTAGFACSQCGQPLFVYKLEQVSEKGKAYTNYFGRCNVAEHEKLILLAQLKPEKDSDEAVTYSLGKFGQRALDFYSIHVTKESTHPVKPLAQIAGNRYASYPVGKALSDACMGTIASFLSKYQDIIIEHQKVVKGNQKRLESLRELAGKENLEYPSVTLPPQPHTKEGLDAYNEVIARVRMWVNLNLWQKLKLSRDDAKPLLRLKGFPSFPLVERQANEVDWWDMVCNVKKLINEKKEDGKVFWQNLAGYKRQEALRPYLSSEEDRKKGKKFARYQLGDLLLHLYKKHGEDWGKVYDEAWERIDKKVEGLSKHIKLEEERRSEDAQSKAALTDWLRAKASFVIEGLKEADKDEFCRCELKLQKWYGDLRGKPFAIEAENSILDISGFSKQYNCAFIWQKDGVKKLNLYLIINYFKGGKLRFKKIKPEAFEANRFYTVINKKSGEIVPMEVNFNFDDPNLIILPLAFGKRQGREFIWNDLLSLETGSLKLANGRVIEKTLYNRRTRQDEPALFVALTFERREVLDSSNIKPMNLIGVDRGENIPAVIALTDPEGCPLSRFKDSLGNPTHILRIGESYKEKQRTIQAKKEVEQRRAGGYSRKYASKAKNLADDMVRNTARDLLYYAVTQDAMLIFENLSRGFGRQGKRTFMAERQYTRMEDWLTAKLAYEGLPSKTYLSKTLAQYTSKTCSNCGFTITSADYDRVLEKLKKTATGWMTTINGKELKVEGQITYYNRYKRQNVVKDLSVELDRLSEESVNNDISSWTKGRSGEALSLLKKRFSHRPVQEKFVCLNCGFETHADEQAALNIARSWLFLRSQEYKKYQTNKTTGNTDKRAFVETWQSFYRKKLKEVWKPAV

SEQ ID NO: 43593 - protein, 978 aa, synthetic construct
  REGION 1..978: note = engineered CasX variant
QEIKRINKIRRRLVKDSNTKKAGKTGPMKTLLVRVMTPDLRERLENLRKKPENIPQPISNTSRANLNKLLTDYTEMKKAILHVYWEEFQKDPVGLMSRVAQPASKKIDQNKLKPEMDEKGNLTTAGFACSQCGQPLFVYKLEQVSEKGKAYTNYFGRCNVAEHEKLILLAQLKPEKDSDEAVTYSLGKFGQRALDFYSIHVTKESTHPVKPLAQIAGNRYASHPVGKALSDACMGTIASFLSKYQDIIIEHQKVVKGNQKRLESLRELAGKENLEYPSVTLPPQPHTKEGLDAYNEVIARVRMWVNLNLWQKLKLSRDDAKPLLRLKGFPSFPLVERQANEVDWWDMVCNVKKLINEKKEDGKVFWQNLAGYKRQEALRPYLSSEEDRKKGKKFARYQLGDLLLHLYKKHGEDWGKVYDEAWERIDKKVEGLSKHIKLEEERRSEDAQSKAALTDWLRAKASFVIEGLKEADKDEFCRCELKLQKWYGDLRGKPFAIEAENSILDISGFSKQYNCAFIWQKDGVKKLNLYLIINYFKGGKLRFKKIKPEAFEANRFYTVINKKSGEIVPMEVNFNFDDPNLIILPLAFGKRQGREFIWNDLLSLETGSLKLANGRVIEKTLYNRRTRQDEPALFVALTFERREVLDSSNIKPMNLIGVDRGENIPAVIALTDPEGCPLSRFKDSLGNPTHILRIGESYKEKQRTIQAKKEVEQRRAGGYSRKYASKAKNLADDMVRNTARDLLYYAVTQDAMLIFENLSRGFGRQGKRTFMAERQYTRMEDWLTAKLAYEGLPSKTYLSKTLAQYTSKTCSNCGFTITSADYDRVLEKLKKTATGWMTTINGKELKVEGQITYYNRYKRQNVVKDLSVELDRLSEESVNNDISSWTKGRSGEALSLLKKRFSHRPVQEKFVCLNCGFETHADEQAALNIARSWLFLRSQEYKKYQTNKTTGNTDKRAFVETWQSFYRKKLKEVWKPAV

SEQ ID NO: 43594 - protein, 978 aa, synthetic construct
  REGION 1..978: note = engineered CasX variant
QEIKRINKIRRRLVKDSNTKKAGKTGPMKTLLVRVMTPDLRERLENLRKKPENIPQPISNTSRANLNKLLTDYTEMKKAILHVYWEEFQKDPVGLMSRVAQPASKKIDQNKLKPEMDEKGNLTTAGFACSQCGQPLFVYKLEQVSEKGKAYTNYFGRCNVAEHEKLILLAQLKPEKDSDEAVTYSLGKFGQRALDFYSIHVTKESTHPVKPLAQIAGNRYASSPVGKALSDACMGTIASFLSKYQDIIIEHQKVVKGNQKRLESLRELAGKENLEYPSVTLPPQPHTKEGLDAYNEVIARVRMWVNLNLWQKLKLSRDDAKPLLRLKGFPSFPLVERQANEVDWWDMVCNVKKLINEKKEDGKVFWQNLAGYKRQEALRPYLSSEEDRKKGKKFARYQLGDLLLHLYKKHGEDWGKVYDEAWERIDKKVEGLSKHIKLEEERRSEDAQSKAALTDWLRAKASFVIEGLKEADKDEFCRCELKLQKWYGDLRGKPFAIEAENSILDISGFSKQYNCAFIWQKDGVKKLNLYLIINYFKGGKLRFKKIKPEAFEANRFYTVINKKSGEIVPMEVNFNFDDPNLIILPLAFGKRQGREFIWNDLLSLETGSLKLANGRVIEKTLYNRRTRQDEPALFVALTFERREVLDSSNIKPMNLIGVDRGENIPAVIALTDPEGCPLSRFKDSLGNPTHILRIGESYKEKQRTIQAKKEVEQRRAGGYSRKYASKAKNLADDMVRNTARDLLYYAVTQDAMLIFENLSRGFGRQGKRTFMAERQYTRMEDWLTAKLAYEGLPSKTYLSKTLAQYTSKTCSNCGFTITSADYDRVLEKLKKTATGWMTTINGKELKVEGQITYYNRYKRQNVVKDLSVELDRLSEESVNNDISSWTKGRSGEALSLLKKRFSHRPVQEKFVCLNCGFETHADEQAALNIARSWLFLRSQEYKKYQTNKTTGNTDKRAFVETWQSFYRKKLKEVWKPAV

SEQ ID NO: 43595 - protein, 978 aa, synthetic construct
  REGION 1..978: note = engineered CasX variant
QEIKRINKIRRRLVKDSNTKKAGKTGPMKTLLVRVMTPDLRERLENLRKKPENIPQPISNTSRANLNKLLTDYTEMKKAILHVYWEEFQKDPVGLMSRVAQPASKKIDQNKLKPEMDEKGNLTTAGFACSQCGQPLFVYKLEQVSEKGKAYTNYFGRCNVAEHEKLILLAQLKPEKDSDEAVTYSLGKFGQRALDFYSIHVTKESTHPVKPLAQIAGNRYASTPVGKALSDACMGTIASFLSKYQDIIIEHQKVVKGNQKRLESLRELAGKENLEYPSVTLPPQPHTKEGLDAYNEVIARVRMWVNLNLWQKLKLSRDDAKPLLRLKGFPSFPLVERQANEVDWWDMVCNVKKLINEKKEDGKVFWQNLAGYKRQEALRPYLSSEEDRKKGKKFARYQLGDLLLHLYKKHGEDWGKVYDEAWERIDKKVEGLSKHIKLEEERRSEDAQSKAALTDWLRAKASFVIEGLKEADKDEFCRCELKLQKWYGDLRGKPFAIEAENSILDISGFSKQYNCAFIWQKDGVKKLNLYLIINYFKGGKLRFKKIKPEAFEANRFYTVINKKSGEIVPMEVNFNFDDPNLIILPLAFGKRQGREFIWNDLLSLETGSLKLANGRVIEKTLYNRRTRQDEPALFVALTFERREVLDSSNIKPMNLIGVDRGENIPAVIALTDPEGCPLSRFKDSLGNPTHILRIGESYKEKQRTIQAKKEVEQRRAGGYSRKYASKAKNLADDMVRNTARDLLYYAVTQDAMLIFENLSRGFGRQGKRTFMAERQYTRMEDWLTAKLAYEGLPSKTYLSKTLAQYTSKTCSNCGFTITSADYDRVLEKLKKTATGWMTTINGKELKVEGQITYYNRYKRQNVVKDLSVELDRLSEESVNNDISSWTKGRSGEALSLLKKRFSHRPVQEKFVCLNCGFETHADEQAALNIARSWLFLRSQEYKKYQTNKTTGNTDKRAFVETWQSFYRKKLKEVWKPAV

SEQ ID NO: 43596 - protein, 978 aa, synthetic construct
  REGION 1..978: note = engineered CasX variant
QEIKRINKIRRRLVKDSNTKKAGKTGPMKTLLVRVMTPDLRERLENLRKKPENIPQPISNTSRANLNKLLTDYTEMKKAILHVYWEEFQKDPVGLMSRVAQPASKKIDQNKLKPEMDEKGNLTTAGFACSQCGQPLFVYKLEQVSEKGKAYTNYFGRCNVAEHEKLILLAQLKPEKDSDEAVTYSLGKFGQRALDFYSIHVTKESTHPVKPLAQIAGNRYASAPVGKALSDACMGTIASFLSKYQDIIIEHQKVVKGNQKRLESLRELAGKENLEYPSVTLPPQPHTKEGLDAYNEVIARVRMWVNLNLWQKLKLSRDDAKPLLRLKGFPSFPLVERQANEVDWWDMVCNVKKLINEKKEDGKVFWQNLAGYKRQEALRPYLSSEEDRKKGKKFARYQLGDLLLHLYKKHGEDWGKVYDEAWERIDKKVEGLSKHIKLEEERRSEDAQSKAALTDWLRAKASFVIEGLKEADKDEFCRCELKLQKWYGDLRGKPFAIEAENSILDISGFSKQYNCAFIWQKDGVKKLNLYLIINYFKGGKLRFKKIKPEAFEANRFYTVINKKSGEIVPMEVNFNFDDPNLIILPLAFGKRQGREFIWNDLLSLETGSLKLANGRVIEKTLYNRRTRQDEPALFVALTFERREVLDSSNIKPMNLIGVDRGENIPAVIALTDPEGCPLSRFKDSLGNPTHILRIGESYKEKQRTIQAKKEVEQRRAGGYSRKYASKAKNLADDMVRNTARDLLYYAVTQDAMLIFENLSRGFGRQGKRTFMAERQYTRMEDWLTAKLAYEGLPSKTYLSKTLAQYTSKTCSNCGFTITSADYDRVLEKLKKTATGWMTTINGKELKVEGQITYYNRYKRQNVVKDLSVELDRLSEESVNNDISSWTKGRSGEALSLLKKRFSHRPVQEKFVCLNCGFETHADEQAALNIARSWLFLRSQEYKKYQTNKTTGNTDKRAFVETWQSFYRKKLKEVWKPAV

SEQ ID NO: 43597 - protein, 978 aa, synthetic construct
  REGION 1..978: note = engineered CasX variant
QEIKRINKIRRRLVKDSNTKKAGKTGPMKTLLVRVMTPDLRERLENLRKKPENIPQPISNTSRANLNKLLTDYTEMKKAILHVYWEEFQKDPVGLMSRVAQPASKKIDQNKLKPEMDEKGNLTTAGFACSQCGQPLFVYKLEQVSEKGKAYTNYFGRCNVAEHEKLILLAQLKPEKDSDEAVTYSLGKFGQRALDFYSIHVTKESTHPVKPLAQIAGNRYASVPVGKALSDACMGTIASFLSKYQDIIIEHQKVVKGNQKRLESLRELAGKENLEYPSVTLPPQPHTKEGLDAYNEVIARVRMWVNLNLWQKLKLSRDDAKPLLRLKGFPSFPLVERQANEVDWWDMVCNVKKLINEKKEDGKVFWQNLAGYKRQEALRPYLSSEEDRKKGKKFARYQLGDLLLHLYKKHGEDWGKVYDEAWERIDKKVEGLSKHIKLEEERRSEDAQSKAALTDWLRAKASFVIEGLKEADKDEFCRCELKLQKWYGDLRGKPFAIEAENSILDISGFSKQYNCAFIWQKDGVKKLNLYLIINYFKGGKLRFKKIKPEAFEANRFYTVINKKSGEIVPMEVNFNFDDPNLIILPLAFGKRQGREFIWNDLLSLETGSLKLANGRVIEKTLYNRRTRQDEPALFVALTFERREVLDSSNIKPMNLIGVDRGENIPAVIALTDPEGCPLSRFKDSLGNPTHILRIGESYKEKQRTIQAKKEVEQRRAGGYSRKYASKAKNLADDMVRNTARDLLYYAVTQDAMLIFENLSRGFGRQGKRTFMAERQYTRMEDWLTAKLAYEGLPSKTYLSKTLAQYTSKTCSNCGFTITSADYDRVLEKLKKTATGWMTTINGKELKVEGQITYYNRYKRQNVVKDLSVELDRLSEESVNNDISSWTKGRSGEALSLLKKRFSHRPVQEKFVCLNCGFETHADEQAALNIARSWLFLRSQEYKKYQTNKTTGNTDKRAFVETWQSFYRKKLKEVWKPAV

SEQ ID NO: 43598 - protein, 978 aa, synthetic construct
  REGION 1..978: note = engineered CasX variant
QEIKRINKIRRRLVKDSNTKKAGKTGPMKTLLVRVMTPDLRERLENLRKKPENIPQPISNTSRANLNKLLTDYTEMKKAILHVYWEEFQKDPVGLMSRVAQPASKKIDQNKLKPEMDEKGNLTTAGFACSQCGQPLFVYKLEQVSEKGKAYTNYFGRCNVAEHEKLIKLAQLKPEKDSDEAVTYSLGKFGQRALDFYSIHVTKESTHPVKPLAQIAGNRYASGPVGKALSDACMGTIASFLSKYQDIIIEHQKVVKGNQKRLESLRELAGKENLEYPSVTLPPQPHTKEGLDAYNEVIARVRMWVNLNLWQKLKLSRDDAKPLLRLKGFPSFPLVERQANEVDWWDMVCNVKKLINEKKEDGKVFWQNLAGYKRQEALRPYLSSEEDRKKGKKFARYQLGDLLLHLYKKHGEDWGKVYDEAWERIDKKVEGLSKHIKLEEERRSEDAQSKAALTDWLRAKASFVIEGLKEADKDEFCRCELKLQKWYGDLRGKPFAIEAENSILDISGFSKQYNCAFIWQKDGVKKLNLYLIINYFKGGKLRFKKIKPEAFEANRFYTVINKKSGEIVPMEVNFNFDDPNLIILPLAFGKRQGREFIWNDLLSLETGSLKLANGRVIEKTLYNRRTRQDEPALFVALTFERREVLDSSNIKPMNLIGVDRGENIPAVIALTDPEGCPLSRFKDSLGNPTHILRIGESYKEKQRTIQAKKEVEQRRAGGYSRKYASKAKNLADDMVRNTARDLLYYAVTQDAMLIFENLSRGFGRQGKRTFMAERQYTRMEDWLTAKLAYEGLPSKTYLSKTLAQYTSKTCSNCGFTITSADYDRVLEKLKKTATGWMTTINGKELKVEGQITYYNRYKRQNVVKDLSVELDRLSEESVNNDISSWTKGRSGEALSLLKKRFSHRPVQEKFVCLNCGFETHADEQAALNIARSWLFLRSQEYKKYQTNKTTGNTDKRAFVETWQSFYRKKLKEVWKPAV

SEQ ID NO: 43599 - protein, 977 aa, synthetic construct
  REGION 1..977: note = engineered CasX variant
QEIKRINKIRRRLVKDSNTKKAGKTGPMKTLLVRVMTPDLRERLENLRKKPENIPQPISNTSRANLNKLLTDYTEMKKAILHVYWEEFQKDPVGLMSRVAQPASKKIDQNKLKPEMDEKGNLTTAGFACSQCGQPLFVYKLEQVSEKGKAYTNYFGRCNVAEHEKLILLAQLKPEKDSDEAVTYSLGKFGQRALDFYSIHVTKESTHPVKPLAQIAGNRYASPVGKALSDACMGTIASFLSKYQDIIIEHQKVVKGNQKRLESLRELAGKENLEYPSVTLPPQPHTKEGLDAYNEVIARVRMWVNLNLWQKLKLSRDDAKPLLRLKGFPSFPLVERQANEVDWWDMVCNVKKLINEKKEDGKVFWQNLAGYKRQEALRPYLSSEEDRKKGKKFARYQLGDLLLHLYKKHGEDWGKVYDEAWERIDKKVEGLSKHIKLEEERRSEDAQSKAALTDWLRAKASFVIEGLKEADKDEFCRCELKLQKWYGDLRGKPFAIEAENSILDISGFSKQYNCAFIWQKDGVKKLNLYLIINYFKGGKLRFKKIKPEAFEANRFYTVINKKSGEIVPMEVNFNFDDPNLIILPLAFGKRQGREFIWNDLLSLETGSLKLANGRVIEKTLYNRRTRQDEPALFVALTFERREVLDSSNIKPMNLIGVDRGENIPAVIALTDPEGCPLSRFKDSLGNPTHILRIGESYKEKQRTIQAKKEVEQRRAGGYSRKYASKAKNLADDMVRNTARDLLYYAVTQDAMLIFENLSRGFGRQGKRTFMAERQYTRMEDWLTAKLAYEGLPSKTYLSKTLAQYTSKTCSNCGFTITSADYDRVLEKLKKTATGWMTTINGKELKVEGQITYYNRYKRQNVVKDLSVELDRLSEESVNNDISSWTKGRSGEALSLLKKRFSHRPVQEKFVCLNCGFETHADEQAALNIARSWLFLRSQEYKKYQTNKTTGNTDKRAFVETWQSFYRKKLKEVWKPAV

SEQ ID NO: 43600 - protein, 978 aa, synthetic construct
  REGION 1..978: note = engineered CasX variant
QEIKRINKIRRRLVKDSNTKKAGKTGPMKTLLVRVMTPDLRERLENLRKKPENIPQPISNTSRANLNKLLTDYTEMKKAILHVYWEEFQKDPVGLMSRVAQPASKKIDQNKLKPEMDEKGNLTTAGFACSQCGQPLFVYKLEQVSEKGKAYTNYFGRCNVAEHEKLILLAQLKPEKDSDEAVTYSLGKFGQRALDFYSIHVTKESTHPVKPLAQIAGNRYASYPVGKALSDACMGTIASFLSKYQDIIIEHQKVVKGNQKRLESLRELAGKENLEYPSVTLPPQPHTKEGLDAYNEVIARVRMWVNLNLWQKLKLSRDDAKPLLRLKGFPSFPLVERQANEVDWWDMVCNVKKLINEKKEDGKVFWQNLAGYKRQEALRPYLSSEEDRKKGKKFARYQLGDLLLHLEKKHPEDWGKVYDEAWERIDKKVEGLSKHIKLEEERRSEDAQSKAALTDWLRAKASFVIEGLKEADKDEFCRCELKLQKWYGDLRGKPFAIEAENSILDISGFSKQYNCAFIWQKDGVKKLNLYLIINYFKGGKLRFKKIKPEAFEANRFYTVINKKSGEIVPMEVNFNFDDPNLIILPLAFGKRQGREFIWNDLLSLETGSLKLANGRVIEKTLYNRRTRQDEPALFVALTFERREVLDSSNIKPMNLIGVDRGENIPAVIALTDPEGCPLSRFKDSLGNPTHILRIGESYKEKQRTIQAKKEVEQRRAGGYSRKYASKAKNLADDMVRNTARDLLYYAVTQDAMLIFENLSRGFGRQGKRTFMAERQYTRMEDWLTAKLAYEGLPSKTYLSKTLAQYTSKTCSNCGFTITSADYDRVLEKLKKTATGWMTTINGKELKVEGQITYYNRYKRQNVVKDLSVELDRLSEESVNNDISSWTKGRSGEALSLLKKRFSHRPVQEKFVCLNCGFETHADEQAALNIARSWLFLRSQEYKKYQTNKTTGNTDKRAFVETWQSFYRKKLKEVWKPAV

SEQ ID NO: 43601 - protein, 978 aa, synthetic construct
  REGION 1..978: note = engineered CasX variant
QEIKRINKIRRRLVKDSNTKKAGKTGPMKTLLVRVMTPDLRERLENLRKKPENIPQPISNTSRANLNKLLTDYTEMKKAILHVYWEEFQKDPVGLMSRVAQPASKKIDQNKLKPEMDEKGNLTTAGFACSQCGQPLFVYKLEQVSEKGKAYTNYFGRCNVAEHEKLILLAQLKPEKDSDEAVTYSLGKFGQRALDFYSIHVTKESTHPVKPLAQIAGNRYASHPVGKALSDACMGTIASFLSKYQDIIIEHQKVVKGNQKRLESLRELAGKENLEYPSVTLPPQPHTKEGLDAYNEVIARVRMWVNLNLWQKLKLSRDDAKPLLRLKGFPSFPLVERQANEVDWWDMVCNVKKLINEKKEDGKVFWQNLAGYKRQEALRPYLSSEEDRKKGKKFARYQLGDLLLHLEKKHPEDWGKVYDEAWERIDKKVEGLSKHIKLEEERRSEDAQSKAALTDWLRAKASFVIEGLKEADKDEFCRCELKLQKWYGDLRGKPFAIEAENSILDISGFSKQYNCAFIWQKDGVKKLNLYLIINYFKGGKLRFKKIKPEAFEANRFYTVINKKSGEIVPMEVNFNFDDPNLIILPLAFGKRQGREFIWNDLLSLETGSLKLANGRVIEKTLYNRRTRQDEPALFVALTFERREVLDSSNIKPMNLIGVDRGENIPAVIALTDPEGCPLSRFKDSLGNPTHILRIGESYKEKQRTIQAKKEVEQRRAGGYSRKYASKAKNLADDMVRNTARDLLYYAVTQDAMLIFENLSRGFGRQGKRTFMAERQYTRMEDWLTAKLAYEGLPSKTYLSKTLAQYTSKTCSNCGFTITSADYDRVLEKLKKTATGWMTTINGKELKVEGQITYYNRYKRQNVVKDLSVELDRLSEESVNNDISSWTKGRSGEALSLLKKRFSHRPVQEKFVCLNCGFETHADEQAALNIARSWLFLRSQEYKKYQTNKTTGNTDKRAFVETWQSFYRKKLKEVWKPAV

SEQ ID NO: 43602 - protein, 978 aa, synthetic construct
  REGION 1..978: note = engineered CasX variant
QEIKRINKIRRRLVKDSNTKKAGKTGPMKTLLVRVMTPDLRERLENLRKKPENIPQPISNTSRANLNKLLTDYTEMKKAILHVYWEEFQKDPVGLMSRVAQPASKKIDQNKLKPEMDEKGNLTTAGFACSQCGQPLFVYKLEQVSEKGKAYTNYFGRCNVAEHEKLILLAQLKPEKDSDEAVTYSLGKFGQRALDFYSIHVTKESTHPVKPLAQIAGNRYASSPVGKALSDACMGTIASFLSKYQDIIIEHQKVVKGNQKRLESLRELAGKENLEYPSVTLPPQPHTKEGLDAYNEVIARVRMWVNLNLWQKLKLSRDDAKPLLRLKGFPSFPLVERQANEVDWWDMVCNVKKLINEKKEDGKVFWQNLAGYKRQEALRPYLSSEEDRKKGKKFARYQLGDLLLHLEKKHPEDWGKVYDEAWERIDKKVEGLSKHIKLEEERRSEDAQSKAALTDWLRAKASFVIEGLKEADKDEFCRCELKLQKWYGDLRGKPFAIEAENSILDISGFSKQYNCAFIWQKDGVKKLNLYLIINYFKGGKLRFKKIKPEAFEANRFYTVINKKSGEIVPMEVNFNFDDPNLIILPLAFGKRQGREFIWNDLLSLETGSLKLANGRVIEKTLYNRRTRQDEPALFVALTFERREVLDSSNIKPMNLIGVDRGENIPAVIALTDPEGCPLSRFKDSLGNPTHILRIGESYKEKQRTIQAKKEVEQRRAGGYSRKYASKAKNLADDMVRNTARDLLYYAVTQDAMLIFENLSRGFGRQGKRTFMAERQYTRMEDWLTAKLAYEGLPSKTYLSKTLAQYTSKTCSNCGFTITSADYDRVLEKLKKTATGWMTTINGKELKVEGQITYYNRYKRQNVVKDLSVELDRLSEESVNNDISSWTKGRSGEALSLLKKRFSHRPVQEKFVCLNCGFETHADEQAALNIARSWLFLRSQEYKKYQTNKTTGNTDKRAFVETWQSFYRKKLKEVWKPAV

SEQ ID NO: 43603 - protein, 978 aa, synthetic construct
  REGION 1..978: note = engineered CasX variant
QEIKRINKIRRRLVKDSNTKKAGKTGPMKTLLVRVMTPDLRERLENLRKKPENIPQPISNTSRANLNKLLTDYTEMKKAILHVYWEEFQKDPVGLMSRVAQPASKKIDQNKLKPEMDEKGNLTTAGFACSQCGQPLFVYKLEQVSEKGKAYTNYFGRCNVAEHEKLILLAQLKPEKDSDEAVTYSLGKFGQRALDFYSIHVTKESTHPVKPLAQIAGNRYASTPVGKALSDACMGTIASFLSKYQDIIIEHQKVVKGNQKRLESLRELAGKENLEYPSVTLPPQPHTKEGLDAYNEVIARVRMWVNLNLWQKLKLSRDDAKPLLRLKGFPSFPLVERQANEVDWWDMVCNVKKLINEKKEDGKVFWQNLAGYKRQEALRPYLSSEEDRKKGKKFARYQLGDLLLHLEKKHPEDWGKVYDEAWERIDKKVEGLSKHIKLEEERRSEDAQSKAALTDWLRAKASFVIEGLKEADKDEFCRCELKLQKWYGDLRGKPFAIEAENSILDISGFSKQYNCAFIWQKDGVKKLNLYLIINYFKGGKLRFKKIKPEAFEANRFYTVINKKSGEIVPMEVNFNFDDPNLIILPLAFGKRQGREFIWNDLLSLETGSLKLANGRVIEKTLYNRRTRQDEPALFVALTFERREVLDSSNIKPMNLIGVDRGENIPAVIALTDPEGCPLSRFKDSLGNPTHILRIGESYKEKQRTIQAKKEVEQRRAGGYSRKYASKAKNLADDMVRNTARDLLYYAVTQDAMLIFENLSRGFGRQGKRTFMAERQYTRMEDWLTAKLAYEGLPSKTYLSKTLAQYTSKTCSNCGFTITSADYDRVLEKLKKTATGWMTTINGKELKVEGQITYYNRYKRQNVVKDLSVELDRLSEESVNNDISSWTKGRSGEALSLLKKRFSHRPVQEKFVCLNCGFETHADEQAALNIARSWLFLRSQEYKKYQTNKTTGNTDKRAFVETWQSFYRKKLKEVWKPAV

SEQ ID NO: 43604 - protein, 978 aa, synthetic construct
  REGION 1..978: note = engineered CasX variant
QEIKRINKIRRRLVKDSNTKKAGKTGPMKTLLVRVMTPDLRERLENLRKKPENIPQPISNTSRANLNKLLTDYTEMKKAILHVYWEEFQKDPVGLMSRVAQPASKKIDQNKLKPEMDEKGNLTTAGFACSQCGQPLFVYKLEQVSEKGKAYTNYFGRCNVAEHEKLILLAQLKPEKDSDEAVTYSLGKFGQRALDFYSIHVTKESTHPVKPLAQIAGNRYASAPVGKALSDACMGTIASFLSKYQDIIIEHQKVVKGNQKRLESLRELAGKENLEYPSVTLPPQPHTKEGLDAYNEVIARVRMWVNLNLWQKLKLSRDDAKPLLRLKGFPSFPLVERQANEVDWWDMVCNVKKLINEKKEDGKVFWQNLAGYKRQEALRPYLSSEEDRKKGKKFARYQLGDLLLHLEKKHPEDWGKVYDEAWERIDKKVEGLSKHIKLEEERRSEDAQSKAALTDWLRAKASFVIEGLKEADKDEFCRCELKLQKWYGDLRGKPFAIEAENSILDISGFSKQYNCAFIWQKDGVKKLNLYLIINYFKGGKLRFKKIKPEAFEANRFYTVINKKSGEIVPMEVNFNFDDPNLIILPLAFGKRQGREFIWNDLLSLETGSLKLANGRVIEKTLYNRRTRQDEPALFVALTFERREVLDSSNIKPMNLIGVDRGENIPAVIALTDPEGCPLSRFKDSLGNPTHILRIGESYKEKQRTIQAKKEVEQRRAGGYSRKYASKAKNLADDMVRNTARDLLYYAVTQDAMLIFENLSRGFGRQGKRTFMAERQYTRMEDWLTAKLAYEGLPSKTYLSKTLAQYTSKTCSNCGFTITSADYDRVLEKLKKTATGWMTTINGKELKVEGQITYYNRYKRQNVVKDLSVELDRLSEESVNNDISSWTKGRSGEALSLLKKRFSHRPVQEKFVCLNCGFETHADEQAALNIARSWLFLRSQEYKKYQTNKTTGNTDKRAFVETWQSFYRKKLKEVWKPAV

SEQ ID NO: 43605 - protein, 978 aa, synthetic construct
  REGION 1..978: note = engineered CasX variant
QEIKRINKIRRRLVKDSNTKKAGKTGPMKTLLVRVMTPDLRERLENLRKKPENIPQPISNTSRANLNKLLTDYTEMKKAILHVYWEEFQKDPVGLMSRVAQPASKKIDQNKLKPEMDEKGNLTTAGFACSQCGQPLFVYKLEQVSEKGKAYTNYFGRCNVAEHEKLILLAQLKPEKDSDEAVTYSLGKFGQRALDFYSIHVTKESTHPVKPLAQIAGNRYASVPVGKALSDACMGTIASFLSKYQDIIIEHQKVVKGNQKRLESLRELAGKENLEYPSVTLPPQPHTKEGLDAYNEVIARVRMWVNLNLWQKLKLSRDDAKPLLRLKGFPSFPLVERQANEVDWWDMVCNVKKLINEKKEDGKVFWQNLAGYKRQEALRPYLSSEEDRKKGKKFARYQLGDLLLHLEKKHPEDWGKVYDEAWERIDKKVEGLSKHIKLEEERRSEDAQSKAALTDWLRAKASFVIEGLKEADKDEFCRCELKLQKWYGDLRGKPFAIEAENSILDISGFSKQYNCAFIWQKDGVKKLNLYLIINYFKGGKLRFKKIKPEAFEANRFYTVINKKSGEIVPMEVNFNFDDPNLIILPLAFGKRQGREFIWNDLLSLETGSLKLANGRVIEKTLYNRRTRQDEPALFVALTFERREVLDSSNIKPMNLIGVDRGENIPAVIALTDPEGCPLSRFKDSLGNPTHILRIGESYKEKQRTIQAKKEVEQRRAGGYSRKYASKAKNLADDMVRNTARDLLYYAVTQDAMLIFENLSRGFGRQGKRTFMAERQYTRMEDWLTAKLAYEGLPSKTYLSKTLAQYTSKTCSNCGFTITSADYDRVLEKLKKTATGWMTTINGKELKVEGQITYYNRYKRQNVVKDLSVELDRLSEESVNNDISSWTKGRSGEALSLLKKRFSHRPVQEKFVCLNCGFETHADEQAALNIARSWLFLRSQEYKKYQTNKTTGNTDKRAFVETWQSFYRKKLKEVWKPAV

SEQ ID NO: 43606 - protein, 978 aa, synthetic construct
  REGION 1..978: note = engineered CasX variant
QEIKRINKIRRRLVKDSNTKKAGKTGPMKTLLVRVMTPDLRERLENLRKKPENIPQPISNTSRANLNKLLTDYTEMKKAILHVYWEEFQKDPVGLMSRVAQPASKKIDQNKLKPEMDEKGNLTTAGFACSQCGQPLFVYKLEQVSEKGKAYTNYFGRCNVAEHEKLIKLAQLKPEKDSDEAVTYSLGKFGQRALDFYSIHVTKESTHPVKPLAQIAGNRYASGPVGKALSDACMGTIASFLSKYQDIIIEHQKVVKGNQKRLESLRELAGKENLEYPSVTLPPQPHTKEGLDAYNEVIARVRMWVNLNLWQKLKLSRDDAKPLLRLKGFPSFPLVERQANEVDWWDMVCNVKKLINEKKEDGKVFWQNLAGYKRQEALRPYLSSEEDRKKGKKFARYQLGDLLLHLEKKHPEDWGKVYDEAWERIDKKVEGLSKHIKLEEERRSEDAQSKAALTDWLRAKASFVIEGLKEADKDEFCRCELKLQKWYGDLRGKPFAIEAENSILDISGFSKQYNCAFIWQKDGVKKLNLYLIINYFKGGKLRFKKIKPEAFEANRFYTVINKKSGEIVPMEVNFNFDDPNLIILPLAFGKRQGREFIWNDLLSLETGSLKLANGRVIEKTLYNRRTRQDEPALFVALTFERREVLDSSNIKPMNLIGVDRGENIPAVIALTDPEGCPLSRFKDSLGNPTHILRIGESYKEKQRTIQAKKEVEQRRAGGYSRKYASKAKNLADDMVRNTARDLLYYAVTQDAMLIFENLSRGFGRQGKRTFMAERQYTRMEDWLTAKLAYEGLPSKTYLSKTLAQYTSKTCSNCGFTITSADYDRVLEKLKKTATGWMTTINGKELKVEGQITYYNRYKRQNVVKDLSVELDRLSEESVNNDISSWTKGRSGEALSLLKKRFSHRPVQEKFVCLNCGFETHADEQAALNIARSWLFLRSQEYKKYQTNKTTGNTDKRAFVETWQSFYRKKLKEVWKPAV

SEQ ID NO: 43607 - protein, 977 aa, synthetic construct
  REGION 1..977: note = engineered CasX variant
QEIKRINKIRRRLVKDSNTKKAGKTGPMKTLLVRVMTPDLRERLENLRKKPENIPQPISNTSRANLNKLLTDYTEMKKAILHVYWEEFQKDPVGLMSRVAQPASKKIDQNKLKPEMDEKGNLTTAGFACSQCGQPLFVYKLEQVSEKGKAYTNYFGRCNVAEHEKLILLAQLKPEKDSDEAVTYSLGKFGQRALDFYSIHVTKESTHPVKPLAQIAGNRYASPVGKALSDACMGTIASFLSKYQDIIIEHQKVVKGNQKRLESLRELAGKENLEYPSVTLPPQPHTKEGLDAYNEVIARVRMWVNLNLWQKLKLSRDDAKPLLRLKGFPSFPLVERQANEVDWWDMVCNVKKLINEKKEDGKVFWQNLAGYKRQEALRPYLSSEEDRKKGKKFARYQLGDLLLHLEKKHPEDWGKVYDEAWERIDKKVEGLSKHIKLEEERRSEDAQSKAALTDWLRAKASFVIEGLKEADKDEFCRCELKLQKWYGDLRGKPFAIEAENSILDISGFSKQYNCAFIWQKDGVKKLNLYLIINYFKGGKLRFKKIKPEAFEANRFYTVINKKSGEIVPMEVNFNFDDPNLIILPLAFGKRQGREFIWNDLLSLETGSLKLANGRVIEKTLYNRRTRQDEPALFVALTFERREVLDSSNIKPMNLIGVDRGENIPAVIALTDPEGCPLSRFKDSLGNPTHILRIGESYKEKQRTIQAKKEVEQRRAGGYSRKYASKAKNLADDMVRNTARDLLYYAVTQDAMLIFENLSRGFGRQGKRTFMAERQYTRMEDWLTAKLAYEGLPSKTYLSKTLAQYTSKTCSNCGFTITSADYDRVLEKLKKTATGWMTTINGKELKVEGQITYYNRYKRQNVVKDLSVELDRLSEESVNNDISSWTKGRSGEALSLLKKRFSHRPVQEKFVCLNCGFETHADEQAALNIARSWLFLRSQEYKKYQTNKTTGNTDKRAFVETWQSFYRKKLKEVWKPAV

SEQ ID NO: 43608 - protein, 979 aa, synthetic construct
  REGION 1..979: note = engineered CasX variant
QEIKRINKIRRRLVKDSNTKKAGKTGPMKTLLVRVMTPDLRERLENLRKKPENIPQPISNTSRANLNKLLTDYTEMKKAILHVYWEEFQKDPVGLMSRVAQPASKKIDQNKLKPEMDEKGNLTTAGFACSQCGQPLFVYKLEQVSEKGKAYTNYFGRCNVAEHEKLILLAQLKPEKDSDEAVTYSLGKFGQRALDFYSIHVTKESTHPVKPLAQIAGNRYASYPVGKALSDACMGTIASFLSKYQDIIIEHQKVVKGNQKRLESLRELAGKENLEYPSVTLPPQPHTKEGLDAYNEVIARVRMWVNLNLWQKLKLSRDDAKPLLRLKGFPSFPLVERQANEVDWWDMVCNVKKLINEKKEDGKVFWQNLAGYKRQEALRPYLSSEEDRKKGKKFARYQLGDLLLHLEKKHGERDWGKVYDEAWERIDKKVEGLSKHIKLEEERRSEDAQSKAALTDWLRAKASFVIEGLKEADKDEFCRCELKLQKWYGDLRGKPFAIEAENSILDISGFSKQYNCAFIWQKDGVKKLNLYLIINYFKGGKLRFKKIKPEAFEANRFYTVINKKSGEIVPMEVNFNFDDPNLIILPLAFGKRQGREFIWNDLLSLETGSLKLANGRVIEKTLYNRRTRQDEPALFVALTFERREVLDSSNIKPMNLIGVDRGENIPAVIALTDPEGCPLSRFKDSLGNPTHILRIGESYKEKQRTIQAKKEVEQRRAGGYSRKYASKAKNLADDMVRNTARDLLYYAVTQDAMLIFENLSRGFGRQGKRTFMAERQYTRMEDWLTAKLAYEGLPSKTYLSKTLAQYTSKTCSNCGFTITSADYDRVLEKLKKTATGWMTTINGKELKVEGQITYYNRYKRQNVVKDLSVELDRLSEESVNNDISSWTKGRSGEALSLLKKRFSHRPVQEKFVCLNCGFETHADEQAALNIARSWLFLRSQEYKKYQTNKTTGNTDKRAFVETWQSFYRKKLKEVWKPAV

SEQ ID NO: 43609 - protein, 979 aa, synthetic construct
  REGION 1..979: note = engineered CasX variant
QEIKRINKIRRRLVKDSNTKKAGKTGPMKTLLVRVMTPDLRERLENLRKKPENIPQPISNTSRANLNKLLTDYTEMKKAILHVYWEEFQKDPVGLMSRVAQPASKKIDQNKLKPEMDEKGNLTTAGFACSQCGQPLFVYKLEQVSEKGKAYTNYFGRCNVAEHEKLILLAQLKPEKDSDEAVTYSLGKFGQRALDFYSIHVTKESTHPVKPLAQIAGNRYASHPVGKALSDACMGTIASFLSKYQDIIIEHQKVVKGNQKRLESLRELAGKENLEYPSVTLPPQPHTKEGLDAYNEVIARVRMWVNLNLWQKLKLSRDDAKPLLRLKGFPSFPLVERQANEVDWWDMVCNVKKLINEKKEDGKVFWQNLAGYKRQEALRPYLSSEEDRKKGKKFARYQLGDLLLHLEKKHGERDWGKVYDEAWERIDKKVEGLSKHIKLEEERRSEDAQSKAALTDWLRAKASFVIEGLKEADKDEFCRCELKLQKWYGDLRGKPFAIEAENSILDISGFSKQYNCAFIWQKDGVKKLNLYLIINYFKGGKLRFKKIKPEAFEANRFYTVINKKSGEIVPMEVNFNFDDPNLIILPLAFGKRQGREFIWNDLLSLETGSLKLANGRVIEKTLYNRRTRQDEPALFVALTFERREVLDSSNIKPMNLIGVDRGENIPAVIALTDPEGCPLSRFKDSLGNPTHILRIGESYKEKQRTIQAKKEVEQRRAGGYSRKYASKAKNLADDMVRNTARDLLYYAVTQDAMLIFENLSRGFGRQGKRTFMAERQYTRMEDWLTAKLAYEGLPSKTYLSKTLAQYTSKTCSNCGFTITSADYDRVLEKLKKTATGWMTTINGKELKVEGQITYYNRYKRQNVVKDLSVELDRLSEESVNNDISSWTKGRSGEALSLLKKRFSHRPVQEKFVCLNCGFETHADEQAALNIARSWLFLRSQEYKKYQTNKTTGNTDKRAFVETWQSFYRKKLKEVWKPAV

SEQ ID NO: 43610 - protein, 979 aa, synthetic construct
  REGION 1..979: note = engineered CasX variant
QEIKRINKIRRRLVKDSNTKKAGKTGPMKTLLVRVMTPDLRERLENLRKKPENIPQPISNTSRANLNKLLTDYTEMKKAILHVYWEEFQKDPVGLMSRVAQPASKKIDQNKLKPEMDEKGNLTTAGFACSQCGQPLFVYKLEQVSEKGKAYTNYFGRCNVAEHEKLILLAQLKPEKDSDEAVTYSLGKFGQRALDFYSIHVTKESTHPVKPLAQIAGNRYASSPVGKALSDACMGTIASFLSKYQDIIIEHQKVVKGNQKRLESLRELAGKENLEYPSVTLPPQPHTKEGLDAYNEVIARVRMWVNLNLWQKLKLSRDDAKPLLRLKGFPSFPLVERQANEVDWWDMVCNVKKLINEKKEDGKVFWQNLAGYKRQEALRPYLSSEEDRKKGKKFARYQLGDLLLHLEKKHGERDWGKVYDEAWERIDKKVEGLSKHIKLEEERRSEDAQSKAALTDWLRAKASFVIEGLKEADKDEFCRCELKLQKWYGDLRGKPFAIEAENSILDISGFSKQYNCAFIWQKDGVKKLNLYLIINYFKGGKLRFKKIKPEAFEANRFYTVINKKSGEIVPMEVNFNFDDPNLIILPLAFGKRQGREFIWNDLLSLETGSLKLANGRVIEKTLYNRRTRQDEPALFVALTFERREVLDSSNIKPMNLIGVDRGENIPAVIALTDPEGCPLSRFKDSLGNPTHILRIGESYKEKQRTIQAKKEVEQRRAGGYSRKYASKAKNLADDMVRNTARDLLYYAVTQDAMLIFENLSRGFGRQGKRTFMAERQYTRMEDWLTAKLAYEGLPSKTYLSKTLAQYTSKTCSNCGFTITSADYDRVLEKLKKTATGWMTTINGKELKVEGQITYYNRYKRQNVVKDLSVELDRLSEESVNNDISSWTKGRSGEALSLLKKRFSHRPVQEKFVCLNCGFETHADEQAALNIARSWLFLRSQEYKKYQTNKTTGNTDKRAFVETWQSFYRKKLKEVWKPAV

SEQ ID NO: 43611 - protein, 979 aa, synthetic construct
  REGION 1..979: note = engineered CasX variant
QEIKRINKIRRRLVKDSNTKKAGKTGPMKTLLVRVMTPDLRERLENLRKKPENIPQPISNTSRANLNKLLTDYTEMKKAILHVYWEEFQKDPVGLMSRVAQPASKKIDQNKLKPEMDEKGNLTTAGFACSQCGQPLFVYKLEQVSEKGKAYTNYFGRCNVAEHEKLILLAQLKPEKDSDEAVTYSLGKFGQRALDFYSIHVTKESTHPVKPLAQIAGNRYASTPVGKALSDACMGTIASFLSKYQDIIIEHQKVVKGNQKRLESLRELAGKENLEYPSVTLPPQPHTKEGLDAYNEVIARVRMWVNLNLWQKLKLSRDDAKPLLRLKGFPSFPLVERQANEVDWWDMVCNVKKLINEKKEDGKVFWQNLAGYKRQEALRPYLSSEEDRKKGKKFARYQLGDLLLHLEKKHGERDWGKVYDEAWERIDKKVEGLSKHIKLEEERRSEDAQSKAALTDWLRAKASFVIEGLKEADKDEFCRCELKLQKWYGDLRGKPFAIEAENSILDISGFSKQYNCAFIWQKDGVKKLNLYLIINYFKGGKLRFKKIKPEAFEANRFYTVINKKSGEIVPMEVNFNFDDPNLIILPLAFGKRQGREFIWNDLLSLETGSLKLANGRVIEKTLYNRRTRQDEPALFVALTFERREVLDSSNIKPMNLIGVDRGENIPAVIALTDPEGCPLSRFKDSLGNPTHILRIGESYKEKQRTIQAKKEVEQRRAGGYSRKYASKAKNLADDMVRNTARDLLYYAVTQDAMLIFENLSRGFGRQGKRTFMAERQYTRMEDWLTAKLAYEGLPSKTYLSKTLAQYTSKTCSNCGFTITSADYDRVLEKLKKTATGWMTTINGKELKVEGQITYYNRYKRQNVVKDLSVELDRLSEESVNNDISSWTKGRSGEALSLLKKRFSHRPVQEKFVCLNCGFETHADEQAALNIARSWLFLRSQEYKKYQTNKTTGNTDKRAFVETWQSFYRKKLKEVWKPAV

SEQ ID NO: 43612 - protein, 979 aa, synthetic construct
  REGION 1..979: note = engineered CasX variant
QEIKRINKIRRRLVKDSNTKKAGKTGPMKTLLVRVMTPDLRERLENLRKKPENIPQPISNTSRANLNKLLTDYTEMKKAILHVYWEEFQKDPVGLMSRVAQPASKKIDQNKLKPEMDEKGNLTTAGFACSQCGQPLFVYKLEQVSEKGKAYTNYFGRCNVAEHEKLILLAQLKPEKDSDEAVTYSLGKFGQRALDFYSIHVTKESTHPVKPLAQIAGNRYASAPVGKALSDACMGTIASFLSKYQDIIIEHQKVVKGNQKRLESLRELAGKENLEYPSVTLPPQPHTKEGLDAYNEVIARVRMWVNLNLWQKLKLSRDDAKPLLRLKGFPSFPLVERQANEVDWWDMVCNVKKLINEKKEDGKVFWQNLAGYKRQEALRPYLSSEEDRKKGKKFARYQLGDLLLHLEKKHGERDWGKVYDEAWERIDKKVEGLSKHIKLEEERRSEDAQSKAALTDWLRAKASFVIEGLKEADKDEFCRCELKLQKWYGDLRGKPFAIEAENSILDISGFSKQYNCAFIWQKDGVKKLNLYLIINYFKGGKLRFKKIKPEAFEANRFYTVINKKSGEIVPMEVNFNFDDPNLIILPLAFGKRQGREFIWNDLLSLETGSLKLANGRVIEKTLYNRRTRQDEPALFVALTFERREVLDSSNIKPMNLIGVDRGENIPAVIALTDPEGCPLSRFKDSLGNPTHILRIGESYKEKQRTIQAKKEVEQRRAGGYSRKYASKAKNLADDMVRNTARDLLYYAVTQDAMLIFENLSRGFGRQGKRTFMAERQYTRMEDWLTAKLAYEGLPSKTYLSKTLAQYTSKTCSNCGFTITSADYDRVLEKLKKTATGWMTTINGKELKVEGQITYYNRYKRQNVVKDLSVELDRLSEESVNNDISSWTKGRSGEALSLLKKRFSHRPVQEKFVCLNCGFETHADEQAALNIARSWLFLRSQEYKKYQTNKTTGNTDKRAFVETWQSFYRKKLKEVWKPAV

SEQ ID NO: 43613 - protein, 979 aa, synthetic construct
  REGION 1..979: note = engineered CasX variant
QEIKRINKIRRRLVKDSNTKKAGKTGPMKTLLVRVMTPDLRERLENLRKKPENIPQPISNTSRANLNKLLTDYTEMKKAILHVYWEEFQKDPVGLMSRVAQPASKKIDQNKLKPEMDEKGNLTTAGFACSQCGQPLFVYKLEQVSEKGKAYTNYFGRCNVAEHEKLILLAQLKPEKDSDEAVTYSLGKFGQRALDFYSIHVTKESTHPVKPLAQIAGNRYASVPVGKALSDACMGTIASFLSKYQDIIIEHQKVVKGNQKRLESLRELAGKENLEYPSVTLPPQPHTKEGLDAYNEVIARVRMWVNLNLWQKLKLSRDDAKPLLRLKGFPSFPLVERQANEVDWWDMVCNVKKLINEKKEDGKVFWQNLAGYKRQEALRPYLSSEEDRKKGKKFARYQLGDLLLHLEKKHGERDWGKVYDEAWERIDKKVEGLSKHIKLEEERRSEDAQSKAALTDWLRAKASFVIEGLKEADKDEFCRCELKLQKWYGDLRGKPFAIEAENSILDISGFSKQYNCAFIWQKDGVKKLNLYLIINYFKGGKLRFKKIKPEAFEANRFYTVINKKSGEIVPMEVNFNFDDPNLIILPLAFGKRQGREFIWNDLLSLETGSLKLANGRVIEKTLYNRRTRQDEPALFVALTFERREVLDSSNIKPMNLIGVDRGENIPAVIALTDPEGCPLSRFKDSLGNPTHILRIGESYKEKQRTIQAKKEVEQRRAGGYSRKYASKAKNLADDMVRNTARDLLYYAVTQDAMLIFENLSRGFGRQGKRTFMAERQYTRMEDWLTAKLAYEGLPSKTYLSKTLAQYTSKTCSNCGFTITSADYDRVLEKLKKTATGWMTTINGKELKVEGQITYYNRYKRQNVVKDLSVELDRLSEESVNNDISSWTKGRSGEALSLLKKRFSHRPVQEKFVCLNCGFETHADEQAALNIARSWLFLRSQEYKKYQTNKTTGNTDKRAFVETWQSFYRKKLKEVWKPAV

SEQ ID NO: 43614 - protein, 979 aa, synthetic construct
  REGION 1..979: note = engineered CasX variant
QEIKRINKIRRRLVKDSNTKKAGKTGPMKTLLVRVMTPDLRERLENLRKKPENIPQPISNTSRANLNKLLTDYTEMKKAILHVYWEEFQKDPVGLMSRVAQPASKKIDQNKLKPEMDEKGNLTTAGFACSQCGQPLFVYKLEQVSEKGKAYTNYFGRCNVAEHEKLIKLAQLKPEKDSDEAVTYSLGKFGQRALDFYSIHVTKESTHPVKPLAQIAGNRYASGPVGKALSDACMGTIASFLSKYQDIIIEHQKVVKGNQKRLESLRELAGKENLEYPSVTLPPQPHTKEGLDAYNEVIARVRMWVNLNLWQKLKLSRDDAKPLLRLKGFPSFPLVERQANEVDWWDMVCNVKKLINEKKEDGKVFWQNLAGYKRQEALRPYLSSEEDRKKGKKFARYQLGDLLLHLEKKHGERDWGKVYDEAWERIDKKVEGLSKHIKLEEERRSEDAQSKAALTDWLRAKASFVIEGLKEADKDEFCRCELKLQKWYGDLRGKPFAIEAENSILDISGFSKQYNCAFIWQKDGVKKLNLYLIINYFKGGKLRFKKIKPEAFEANRFYTVINKKSGEIVPMEVNFNFDDPNLIILPLAFGKRQGREFIWNDLLSLETGSLKLANGRVIEKTLYNRRTRQDEPALFVALTFERREVLDSSNIKPMNLIGVDRGENIPAVIALTDPEGCPLSRFKDSLGNPTHILRIGESYKEKQRTIQAKKEVEQRRAGGYSRKYASKAKNLADDMVRNTARDLLYYAVTQDAMLIFENLSRGFGRQGKRTFMAERQYTRMEDWLTAKLAYEGLPSKTYLSKTLAQYTSKTCSNCGFTITSADYDRVLEKLKKTATGWMTTINGKELKVEGQITYYNRYKRQNVVKDLSVELDRLSEESVNNDISSWTKGRSGEALSLLKKRFSHRPVQEKFVCLNCGFETHADEQAALNIARSWLFLRSQEYKKYQTNKTTGNTDKRAFVETWQSFYRKKLKEVWKPAV

SEQ ID NO: 43615 - protein, 978 aa, synthetic construct
  REGION 1..978: note = engineered CasX variant
QEIKRINKIRRRLVKDSNTKKAGKTGPMKTLLVRVMTPDLRERLENLRKKPENIPQPISNTSRANLNKLLTDYTEMKKAILHVYWEEFQKDPVGLMSRVAQPASKKIDQNKLKPEMDEKGNLTTAGFACSQCGQPLFVYKLEQVSEKGKAYTNYFGRCNVAEHEKLILLAQLKPEKDSDEAVTYSLGKFGQRALDFYSIHVTKESTHPVKPLAQIAGNRYASPVGKALSDACMGTIASFLSKYQDIIIEHQKVVKGNQKRLESLRELAGKENLEYPSVTLPPQPHTKEGLDAYNEVIARVRMWVNLNLWQKLKLSRDDAKPLLRLKGFPSFPLVERQANEVDWWDMVCNVKKLINEKKEDGKVFWQNLAGYKRQEALRPYLSSEEDRKKGKKFARYQLGDLLLHLEKKHGERDWGKVYDEAWERIDKKVEGLSKHIKLEEERRSEDAQSKAALTDWLRAKASFVIEGLKEADKDEFCRCELKLQKWYGDLRGKPFAIEAENSILDISGFSKQYNCAFIWQKDGVKKLNLYLIINYFKGGKLRFKKIKPEAFEANRFYTVINKKSGEIVPMEVNFNFDDPNLIILPLAFGKRQGREFIWNDLLSLETGSLKLANGRVIEKTLYNRRTRQDEPALFVALTFERREVLDSSNIKPMNLIGVDRGENIPAVIALTDPEGCPLSRFKDSLGNPTHILRIGESYKEKQRTIQAKKEVEQRRAGGYSRKYASKAKNLADDMVRNTARDLLYYAVTQDAMLIFENLSRGFGRQGKRTFMAERQYTRMEDWLTAKLAYEGLPSKTYLSKTLAQYTSKTCSNCGFTITSADYDRVLEKLKKTATGWMTTINGKELKVEGQITYYNRYKRQNVVKDLSVELDRLSEESVNNDISSWTKGRSGEALSLLKKRFSHRPVQEKFVCLNCGFETHADEQAALNIARSWLFLRSQEYKKYQTNKTTGNTDKRAFVETWQSFYRKKLKEVWKPAV

SEQ ID NO: 43616 - protein, 979 aa, synthetic construct
  REGION 1..979: note = engineered CasX variant
QEIKRINKIRRRLVKDSNTKKAGKTGPMKTLLVRVMTPDLRERLENLRKKPENIPQPISNTSRANLNKLLTDYTEMKKAILHVYWEEFQKDPVGLMSRVAQPASKKIDQNKLKPEMDEKGNLTTAGFACSQCGQPLFVYKLEQVSEKGKAYTNYFGRCNVAEHEKLILLAQLKPEKDSDEAVTYSLGKFGQRALDFYSIHVTKESTHPVKPLAQIAGNRYASYPVGKALSDACMGTIASFLSKYQDIIIEHQKVVKGNQKRLESLRELAGKENLEYPSVTLPPQPHTKEGLDAYNEVIARVRMWVNLNLWQKLKLSRDDAKPLLRLKGFPSFPLVERQANEVDWWDMVCNVKKLINEKKEDGKVFWQNLAGYKRQEALRPYLSSEEDRKKGKKFARYQLGDLLLHLEKKHGEYDWGKVYDEAWERIDKKVEGLSKHIKLEEERRSEDAQSKAALTDWLRAKASFVIEGLKEADKDEFCRCELKLQKWYGDLRGKPFAIEAENSILDISGFSKQYNCAFIWQKDGVKKLNLYLIINYFKGGKLRFKKIKPEAFEANRFYTVINKKSGEIVPMEVNFNFDDPNLIILPLAFGKRQGREFIWNDLLSLETGSLKLANGRVIEKTLYNRRTRQDEPALFVALTFERREVLDSSNIKPMNLIGVDRGENIPAVIALTDPEGCPLSRFKDSLGNPTHILRIGESYKEKQRTIQAKKEVEQRRAGGYSRKYASKAKNLADDMVRNTARDLLYYAVTQDAMLIFENLSRGFGRQGKRTFMAERQYTRMEDWLTAKLAYEGLPSKTYLSKTLAQYTSKTCSNCGFTITSADYDRVLEKLKKTATGWMTTINGKELKVEGQITYYNRYKRQNVVKDLSVELDRLSEESVNNDISSWTKGRSGEALSLLKKRFSHRPVQEKFVCLNCGFETHADEQAALNIARSWLFLRSQEYKKYQTNKTTGNTDKRAFVETWQSFYRKKLKEVWKPAV

SEQ ID NO: 43617 - protein, 979 aa, synthetic construct
  REGION 1..979: note = engineered CasX variant
QEIKRINKIRRRLVKDSNTKKAGKTGPMKTLLVRVMTPDLRERLENLRKKPENIPQPISNTSRANLNKLLTDYTEMKKAILHVYWEEFQKDPVGLMSRVAQPASKKIDQNKLKPEMDEKGNLTTAGFACSQCGQPLFVYKLEQVSEKGKAYTNYFGRCNVAEHEKLILLAQLKPEKDSDEAVTYSLGKFGQRALDFYSIHVTKESTHPVKPLAQIAGNRYASHPVGKALSDACMGTIASFLSKYQDIIIEHQKVVKGNQKRLESLRELAGKENLEYPSVTLPPQPHTKEGLDAYNEVIARVRMWVNLNLWQKLKLSRDDAKPLLRLKGFPSFPLVERQANEVDWWDMVCNVKKLINEKKEDGKVFWQNLAGYKRQEALRPYLSSEEDRKKGKKFARYQLGDLLLHLEKKHGEYDWGKVYDEAWERIDKKVEGLSKHIKLEEERRSEDAQSKAALTDWLRAKASFVIEGLKEADKDEFCRCELKLQKWYGDLRGKPFAIEAENSILDISGFSKQYNCAFIWQKDGVKKLNLYLIINYFKGGKLRFKKIKPEAFEANRFYTVINKKSGEIVPMEVNFNFDDPNLIILPLAFGKRQGREFIWNDLLSLETGSLKLANGRVIEKTLYNRRTRQDEPALFVALTFERREVLDSSNIKPMNLIGVDRGENIPAVIALTDPEGCPLSRFKDSLGNPTHILRIGESYKEKQRTIQAKKEVEQRRAGGYSRKYASKAKNLADDMVRNTARDLLYYAVTQDAMLIFENLSRGFGRQGKRTFMAERQYTRMEDWLTAKLAYEGLPSKTYLSKTLAQYTSKTCSNCGFTITSADYDRVLEKLKKTATGWMTTINGKELKVEGQITYYNRYKRQNVVKDLSVELDRLSEESVNNDISSWTKGRSGEALSLLKKRFSHRPVQEKFVCLNCGFETHADEQAALNIARSWLFLRSQEYKKYQTNKTTGNTDKRAFVETWQSFYRKKLKEVWKPAV

SEQ ID NO: 43618 - protein, 979 aa, synthetic construct
  REGION 1..979: note = engineered CasX variant
QEIKRINKIRRRLVKDSNTKKAGKTGPMKTLLVRVMTPDLRERLENLRKKPENIPQPISNTSRANLNKLLTDYTEMKKAILHVYWEEFQKDPVGLMSRVAQPASKKIDQNKLKPEMDEKGNLTTAGFACSQCGQPLFVYKLEQVSEKGKAYTNYFGRCNVAEHEKLILLAQLKPEKDSDEAVTYSLGKFGQRALDFYSIHVTKESTHPVKPLAQIAGNRYASSPVGKALSDACMGTIASFLSKYQDIIIEHQKVVKGNQKRLESLRELAGKENLEYPSVTLPPQPHTKEGLDAYNEVIARVRMWVNLNLWQKLKLSRDDAKPLLRLKGFPSFPLVERQANEVDWWDMVCNVKKLINEKKEDGKVFWQNLAGYKRQEALRPYLSSEEDRKKGKKFARYQLGDLLLHLEKKHGEYDWGKVYDEAWERIDKKVEGLSKHIKLEEERRSEDAQSKAALTDWLRAKASFVIEGLKEADKDEFCRCELKLQKWYGDLRGKPFAIEAENSILDISGFSKQYNCAFIWQKDGVKKLNLYLIINYFKGGKLRFKKIKPEAFEANRFYTVINKKSGEIVPMEVNFNFDDPNLIILPLAFGKRQGREFIWNDLLSLETGSLKLANGRVIEKTLYNRRTRQDEPALFVALTFERREVLDSSNIKPMNLIGVDRGENIPAVIALTDPEGCPLSRFKDSLGNPTHILRIGESYKEKQRTIQAKKEVEQRRAGGYSRKYASKAKNLADDMVRNTARDLLYYAVTQDAMLIFENLSRGFGRQGKRTFMAERQYTRMEDWLTAKLAYEGLPSKTYLSKTLAQYTSKTCSNCGFTITSADYDRVLEKLKKTATGWMTTINGKELKVEGQITYYNRYKRQNVVKDLSVELDRLSEESVNNDISSWTKGRSGEALSLLKKRFSHRPVQEKFVCLNCGFETHADEQAALNIARSWLFLRSQEYKKYQTNKTTGNTDKRAFVETWQSFYRKKLKEVWKPAV

SEQ ID NO: 43619 - protein, 979 aa, synthetic construct
  REGION 1..979: note = engineered CasX variant
QEIKRINKIRRRLVKDSNTKKAGKTGPMKTLLVRVMTPDLRERLENLRKKPENIPQPISNTSRANLNKLLTDYTEMKKAILHVYWEEFQKDPVGLMSRVAQPASKKIDQNKLKPEMDEKGNLTTAGFACSQCGQPLFVYKLEQVSEKGKAYTNYFGRCNVAEHEKLILLAQLKPEKDSDEAVTYSLGKFGQRALDFYSIHVTKESTHPVKPLAQIAGNRYASTPVGKALSDACMGTIASFLSKYQDIIIEHQKVVKGNQKRLESLRELAGKENLEYPSVTLPPQPHTKEGLDAYNEVIARVRMWVNLNLWQKLKLSRDDAKPLLRLKGFPSFPLVERQANEVDWWDMVCNVKKLINEKKEDGKVFWQNLAGYKRQEALRPYLSSEEDRKKGKKFARYQLGDLLLHLEKKHGEYDWGKVYDEAWERIDKKVEGLSKHIKLEEERRSEDAQSKAALTDWLRAKASFVIEGLKEADKDEFCRCELKLQKWYGDLRGKPFAIEAENSILDISGFSKQYNCAFIWQKDGVKKLNLYLIINYFKGGKLRFKKIKPEAFEANRFYTVINKKSGEIVPMEVNFNFDDPNLIILPLAFGKRQGREFIWNDLLSLETGSLKLANGRVIEKTLYNRRTRQDEPALFVALTFERREVLDSSNIKPMNLIGVDRGENIPAVIALTDPEGCPLSRFKDSLGNPTHILRIGESYKEKQRTIQAKKEVEQRRAGGYSRKYASKAKNLADDMVRNTARDLLYYAVTQDAMLIFENLSRGFGRQGKRTFMAERQYTRMEDWLTAKLAYEGLPSKTYLSKTLAQYTSKTCSNCGFTITSADYDRVLEKLKKTATGWMTTINGKELKVEGQITYYNRYKRQNVVKDLSVELDRLSEESVNNDISSWTKGRSGEALSLLKKRFSHRPVQEKFVCLNCGFETHADEQAALNIARSWLFLRSQEYKKYQTNKTTGNTDKRAFVETWQSFYRKKLKEVWKPAV

SEQ ID NO: 43620 - protein, 979 aa, synthetic construct
  REGION 1..979: note = engineered CasX variant
QEIKRINKIRRRLVKDSNTKKAGKTGPMKTLLVRVMTPDLRERLENLRKKPENIPQPISNTSRANLNKLLTDYTEMKKAILHVYWEEFQKDPVGLMSRVAQPASKKIDQNKLKPEMDEKGNLTTAGFACSQCGQPLFVYKLEQVSEKGKAYTNYFGRCNVAEHEKLILLAQLKPEKDSDEAVTYSLGKFGQRALDFYSIHVTKESTHPVKPLAQIAGNRYASAPVGKALSDACMGTIASFLSKYQDIIIEHQKVVKGNQKRLESLRELAGKENLEYPSVTLPPQPHTKEGLDAYNEVIARVRMWVNLNLWQKLKLSRDDAKPLLRLKGFPSFPLVERQANEVDWWDMVCNVKKLINEKKEDGKVFWQNLAGYKRQEALRPYLSSEEDRKKGKKFARYQLGDLLLHLEKKHGEYDWGKVYDEAWERIDKKVEGLSKHIKLEEERRSEDAQSKAALTDWLRAKASFVIEGLKEADKDEFCRCELKLQKWYGDLRGKPFAIEAENSILDISGFSKQYNCAFIWQKDGVKKLNLYLIINYFKGGKLRFKKIKPEAFEANRFYTVINKKSGEIVPMEVNFNFDDPNLIILPLAFGKRQGREFIWNDLLSLETGSLKLANGRVIEKTLYNRRTRQDEPALFVALTFERREVLDSSNIKPMNLIGVDRGENIPAVIALTDPEGCPLSRFKDSLGNPTHILRIGESYKEKQRTIQAKKEVEQRRAGGYSRKYASKAKNLADDMVRNTARDLLYYAVTQDAMLIFENLSRGFGRQGKRTFMAERQYTRMEDWLTAKLAYEGLPSKTYLSKTLAQYTSKTCSNCGFTITSADYDRVLEKLKKTATGWMTTINGKELKVEGQITYYNRYKRQNVVKDLSVELDRLSEESVNNDISSWTKGRSGEALSLLKKRFSHRPVQEKFVCLNCGFETHADEQAALNIARSWLFLRSQEYKKYQTNKTTGNTDKRAFVETWQSFYRKKLKEVWKPAV

SEQ ID NO: 43621 - protein, 979 aa, synthetic construct
  REGION 1..979: note = engineered CasX variant
QEIKRINKIRRRLVKDSNTKKAGKTGPMKTLLVRVMTPDLRERLENLRKKPENIPQPISNTSRANLNKLLTDYTEMKKAILHVYWEEFQKDPVGLMSRVAQPASKKIDQNKLKPEMDEKGNLTTAGFACSQCGQPLFVYKLEQVSEKGKAYTNYFGRCNVAEHEKLILLAQLKPEKDSDEAVTYSLGKFGQRALDFYSIHVTKESTHPVKPLAQIAGNRYASVPVGKALSDACMGTIASFLSKYQDIIIEHQKVVKGNQKRLESLRELAGKENLEYPSVTLPPQPHTKEGLDAYNEVIARVRMWVNLNLWQKLKLSRDDAKPLLRLKGFPSFPLVERQANEVDWWDMVCNVKKLINEKKEDGKVFWQNLAGYKRQEALRPYLSSEEDRKKGKKFARYQLGDLLLHLEKKHGEYDWGKVYDEAWERIDKKVEGLSKHIKLEEERRSEDAQSKAALTDWLRAKASFVIEGLKEADKDEFCRCELKLQKWYGDLRGKPFAIEAENSILDISGFSKQYNCAFIWQKDGVKKLNLYLIINYFKGGKLRFKKIKPEAFEANRFYTVINKKSGEIVPMEVNFNFDDPNLIILPLAFGKRQGREFIWNDLLSLETGSLKLANGRVIEKTLYNRRTRQDEPALFVALTFERREVLDSSNIKPMNLIGVDRGENIPAVIALTDPEGCPLSRFKDSLGNPTHILRIGESYKEKQRTIQAKKEVEQRRAGGYSRKYASKAKNLADDMVRNTARDLLYYAVTQDAMLIFENLSRGFGRQGKRTFMAERQYTRMEDWLTAKLAYEGLPSKTYLSKTLAQYTSKTCSNCGFTITSADYDRVLEKLKKTATGWMTTINGKELKVEGQITYYNRYKRQNVVKDLSVELDRLSEESVNNDISSWTKGRSGEALSLLKKRFSHRPVQEKFVCLNCGFETHADEQAALNIARSWLFLRSQEYKKYQTNKTTGNTDKRAFVETWQSFYRKKLKEVWKPAV

SEQ ID NO: 43622 - protein, 979 aa, synthetic construct
  REGION 1..979: note = engineered CasX variant
QEIKRINKIRRRLVKDSNTKKAGKTGPMKTLLVRVMTPDLRERLENLRKKPENIPQPISNTSRANLNKLLTDYTEMKKAILHVYWEEFQKDPVGLMSRVAQPASKKIDQNKLKPEMDEKGNLTTAGFACSQCGQPLFVYKLEQVSEKGKAYTNYFGRCNVAEHEKLIKLAQLKPEKDSDEAVTYSLGKFGQRALDFYSIHVTKESTHPVKPLAQIAGNRYASGPVGKALSDACMGTIASFLSKYQDIIIEHQKVVKGNQKRLESLRELAGKENLEYPSVTLPPQPHTKEGLDAYNEVIARVRMWVNLNLWQKLKLSRDDAKPLLRLKGFPSFPLVERQANEVDWWDMVCNVKKLINEKKEDGKVFWQNLAGYKRQEALRPYLSSEEDRKKGKKFARYQLGDLLLHLEKKHGEYDWGKVYDEAWERIDKKVEGLSKHIKLEEERRSEDAQSKAALTDWLRAKASFVIEGLKEADKDEFCRCELKLQKWYGDLRGKPFAIEAENSILDISGFSKQYNCAFIWQKDGVKKLNLYLIINYFKGGKLRFKKIKPEAFEANRFYTVINKKSGEIVPMEVNFNFDDPNLIILPLAFGKRQGREFIWNDLLSLETGSLKLANGRVIEKTLYNRRTRQDEPALFVALTFERREVLDSSNIKPMNLIGVDRGENIPAVIALTDPEGCPLSRFKDSLGNPTHILRIGESYKEKQRTIQAKKEVEQRRAGGYSRKYASKAKNLADDMVRNTARDLLYYAVTQDAMLIFENLSRGFGRQGKRTFMAERQYTRMEDWLTAKLAYEGLPSKTYLSKTLAQYTSKTCSNCGFTITSADYDRVLEKLKKTATGWMTTINGKELKVEGQITYYNRYKRQNVVKDLSVELDRLSEESVNNDISSWTKGRSGEALSLLKKRFSHRPVQEKFVCLNCGFETHADEQAALNIARSWLFLRSQEYKKYQTNKTTGNTDKRAFVETWQSFYRKKLKEVWKPAV

SEQ ID NO: 43623 - protein, 978 aa, synthetic construct
  REGION 1..978: note = engineered CasX variant
QEIKRINKIRRRLVKDSNTKKAGKTGPMKTLLVRVMTPDLRERLENLRKKPENIPQPISNTSRANLNKLLTDYTEMKKAILHVYWEEFQKDPVGLMSRVAQPASKKIDQNKLKPEMDEKGNLTTAGFACSQCGQPLFVYKLEQVSEKGKAYTNYFGRCNVAEHEKLILLAQLKPEKDSDEAVTYSLGKFGQRALDFYSIHVTKESTHPVKPLAQIAGNRYASPVGKALSDACMGTIASFLSKYQDIIIEHQKVVKGNQKRLESLRELAGKENLEYPSVTLPPQPHTKEGLDAYNEVIARVRMWVNLNLWQKLKLSRDDAKPLLRLKGFPSFPLVERQANEVDWWDMVCNVKKLINEKKEDGKVFWQNLAGYKRQEALRPYLSSEEDRKKGKKFARYQLGDLLLHLEKKHGEYDWGKVYDEAWERIDKKVEGLSKHIKLEEERRSEDAQSKAALTDWLRAKASFVIEGLKEADKDEFCRCELKLQKWYGDLRGKPFAIEAENSILDISGFSKQYNCAFIWQKDGVKKLNLYLIINYFKGGKLRFKKIKPEAFEANRFYTVINKKSGEIVPMEVNFNFDDPNLIILPLAFGKRQGREFIWNDLLSLETGSLKLANGRVIEKTLYNRRTRQDEPALFVALTFERREVLDSSNIKPMNLIGVDRGENIPAVIALTDPEGCPLSRFKDSLGNPTHILRIGESYKEKQRTIQAKKEVEQRRAGGYSRKYASKAKNLADDMVRNTARDLLYYAVTQDAMLIFENLSRGFGRQGKRTFMAERQYTRMEDWLTAKLAYEGLPSKTYLSKTLAQYTSKTCSNCGFTITSADYDRVLEKLKKTATGWMTTINGKELKVEGQITYYNRYKRQNVVKDLSVELDRLSEESVNNDISSWTKGRSGEALSLLKKRFSHRPVQEKFVCLNCGFETHADEQAALNIARSWLFLRSQEYKKYQTNKTTGNTDKRAFVETWQSFYRKKLKEVWKPAV

SEQ ID NO: 43624 - protein, 978 aa, synthetic construct
  REGION 1..978: note = engineered CasX variant
QEIKRINKIRRRLVKDSNTKKAGKTGPMKTLLVRVMTPDLRERLENLRKKPENIPQPISNTSRANLNKLLTDYTEMKKAILHVYWEEFQKDPVGLMSRVAQPASKKIDQNKLKPEMDEKGNLTTAGFACSQCGQPLFVYKLEQVSEKGKAYTNYFGRCNVAEHEKLILLAQLKPEKDSDEAVTYSLGKFGQRALDFYSIHVTKESTHPVKPLAQIAGNRYASYPVGKALSDACMGTIASFLSKYQDIIIEHQKVVKGNQKRLESLRELAGKENLEYPSVTLPPQPHTKEGLDAYNEVIARVRMWVNLNLWQKLKLSRDDAKPLLRLKGFPSFPLVERQANEVDWWDMVCNVKKLINEKKEDGKVFWQNLAGYKRQEALRPYLSSEEDRKKGKKFARYQLGDLLLHLEKKHGEDWGDVYDEAWERIDKKVEGLSKHIKLEEERRSEDAQSKAALTDWLRAKASFVIEGLKEADKDEFCRCELKLQKWYGDLRGKPFAIEAENSILDISGFSKQYNCAFIWQKDGVKKLNLYLIINYFKGGKLRFKKIKPEAFEANRFYTVINKKSGEIVPMEVNFNFDDPNLIILPLAFGKRQGREFIWNDLLSLETGSLKLANGRVIEKTLYNRRTRQDEPALFVALTFERREVLDSSNIKPMNLIGVDRGENIPAVIALTDPEGCPLSRFKDSLGNPTHILRIGESYKEKQRTIQAKKEVEQRRAGGYSRKYASKAKNLADDMVRNTARDLLYYAVTQDAMLIFENLSRGFGRQGKRTFMAERQYTRMEDWLTAKLAYEGLPSKTYLSKTLAQYTSKTCSNCGFTITSADYDRVLEKLKKTATGWMTTINGKELKVEGQITYYNRYKRQNVVKDLSVELDRLSEESVNNDISSWTKGRSGEALSLLKKRFSHRPVQEKFVCLNCGFETHADEQAALNIARSWLFLRSQEYKKYQTNKTTGNTDKRAFVETWQSFYRKKLKEVWKPAV

SEQ ID NO: 43625 - protein, 978 aa, synthetic construct
  REGION 1..978: note = engineered CasX variant
QEIKRINKIRRRLVKDSNTKKAGKTGPMKTLLVRVMTPDLRERLENLRKKPENIPQPISNTSRANLNKLLTDYTEMKKAILHVYWEEFQKDPVGLMSRVAQPASKKIDQNKLKPEMDEKGNLTTAGFACSQCGQPLFVYKLEQVSEKGKAYTNYFGRCNVAEHEKLILLAQLKPEKDSDEAVTYSLGKFGQRALDFYSIHVTKESTHPVKPLAQIAGNRYASHPVGKALSDACMGTIASFLSKYQDIIIEHQKVVKGNQKRLESLRELAGKENLEYPSVTLPPQPHTKEGLDAYNEVIARVRMWVNLNLWQKLKLSRDDAKPLLRLKGFPSFPLVERQANEVDWWDMVCNVKKLINEKKEDGKVFWQNLAGYKRQEALRPYLSSEEDRKKGKKFARYQLGDLLLHLEKKHGEDWGDVYDEAWERIDKKVEGLSKHIKLEEERRSEDAQSKAALTDWLRAKASFVIEGLKEADKDEFCRCELKLQKWYGDLRGKPFAIEAENSILDISGFSKQYNCAFIWQKDGVKKLNLYLIINYFKGGKLRFKKIKPEAFEANRFYTVINKKSGEIVPMEVNFNFDDPNLIILPLAFGKRQGREFIWNDLLSLETGSLKLANGRVIEKTLYNRRTRQDEPALFVALTFERREVLDSSNIKPMNLIGVDRGENIPAVIALTDPEGCPLSRFKDSLGNPTHILRIGESYKEKQRTIQAKKEVEQRRAGGYSRKYASKAKNLADDMVRNTARDLLYYAVTQDAMLIFENLSRGFGRQGKRTFMAERQYTRMEDWLTAKLAYEGLPSKTYLSKTLAQYTSKTCSNCGFTITSADYDRVLEKLKKTATGWMTTINGKELKVEGQITYYNRYKRQNVVKDLSVELDRLSEESVNNDISSWTKGRSGEALSLLKKRFSHRPVQEKFVCLNCGFETHADEQAALNIARSWLFLRSQEYKKYQTNKTTGNTDKRAFVETWQSFYRKKLKEVWKPAV

SEQ ID NO: 43626 - protein, 978 aa, synthetic construct
  REGION 1..978: note = engineered CasX variant
QEIKRINKIRRRLVKDSNTKKAGKTGPMKTLLVRVMTPDLRERLENLRKKPENIPQPISNTSRANLNKLLTDYTEMKKAILHVYWEEFQKDPVGLMSRVAQPASKKIDQNKLKPEMDEKGNLTTAGFACSQCGQPLFVYKLEQVSEKGKAYTNYFGRCNVAEHEKLILLAQLKPEKDSDEAVTYSLGKFGQRALDFYSIHVTKESTHPVKPLAQIAGNRYASSPVGKALSDACMGTIASFLSKYQDIIIEHQKVVKGNQKRLESLRELAGKENLEYPSVTLPPQPHTKEGLDAYNEVIARVRMWVNLNLWQKLKLSRDDAKPLLRLKGFPSFPLVERQANEVDWWDMVCNVKKLINEKKEDGKVFWQNLAGYKRQEALRPYLSSEEDRKKGKKFARYQLGDLLLHLEKKHGEDWGDVYDEAWERIDKKVEGLSKHIKLEEERRSEDAQSKAALTDWLRAKASFVIEGLKEADKDEFCRCELKLQKWYGDLRGKPFAIEAENSILDISGFSKQYNCAFIWQKDGVKKLNLYLIINYFKGGKLRFKKIKPEAFEANRFYTVINKKSGEIVPMEVNFNFDDPNLIILPLAFGKRQGREFIWNDLLSLETGSLKLANGRVIEKTLYNRRTRQDEPALFVALTFERREVLDSSNIKPMNLIGVDRGENIPAVIALTDPEGCPLSRFKDSLGNPTHILRIGESYKEKQRTIQAKKEVEQRRAGGYSRKYASKAKNLADDMVRNTARDLLYYAVTQDAMLIFENLSRGFGRQGKRTFMAERQYTRMEDWLTAKLAYEGLPSKTYLSKTLAQYTSKTCSNCGFTITSADYDRVLEKLKKTATGWMTTINGKELKVEGQITYYNRYKRQNVVKDLSVELDRLSEESVNNDISSWTKGRSGEALSLLKKRFSHRPVQEKFVCLNCGFETHADEQAALNIARSWLFLRSQEYKKYQTNKTTGNTDKRAFVETWQSFYRKKLKEVWKPAV

SEQ ID NO: 43627 - protein, 978 aa, synthetic construct
  REGION 1..978: note = engineered CasX variant
QEIKRINKIRRRLVKDSNTKKAGKTGPMKTLLVRVMTPDLRERLENLRKKPENIPQPISNTSRANLNKLLTDYTEMKKAILHVYWEEFQKDPVGLMSRVAQPASKKIDQNKLKPEMDEKGNLTTAGFACSQCGQPLFVYKLEQVSEKGKAYTNYFGRCNVAEHEKLILLAQLKPEKDSDEAVTYSLGKFGQRALDFYSIHVTKESTHPVKPLAQIAGNRYASTPVGKALSDACMGTIASFLSKYQDIIIEHQKVVKGNQKRLESLRELAGKENLEYPSVTLPPQPHTKEGLDAYNEVIARVRMWVNLNLWQKLKLSRDDAKPLLRLKGFPSFPLVERQANEVDWWDMVCNVKKLINEKKEDGKVFWQNLAGYKRQEALRPYLSSEEDRKKGKKFARYQLGDLLLHLEKKHGEDWGDVYDEAWERIDKKVEGLSKHIKLEEERRSEDAQSKAALTDWLRAKASFVIEGLKEADKDEFCRCELKLQKWYGDLRGKPFAIEAENSILDISGFSKQYNCAFIWQKDGVKKLNLYLIINYFKGGKLRFKKIKPEAFEANRFYTVINKKSGEIVPMEVNFNFDDPNLIILPLAFGKRQGREFIWNDLLSLETGSLKLANGRVIEKTLYNRRTRQDEPALFVALTFERREVLDSSNIKPMNLIGVDRGENIPAVIALTDPEGCPLSRFKDSLGNPTHILRIGESYKEKQRTIQAKKEVEQRRAGGYSRKYASKAKNLADDMVRNTARDLLYYAVTQDAMLIFENLSRGFGRQGKRTFMAERQYTRMEDWLTAKLAYEGLPSKTYLSKTLAQYTSKTCSNCGFTITSADYDRVLEKLKKTATGWMTTINGKELKVEGQITYYNRYKRQNVVKDLSVELDRLSEESVNNDISSWTKGRSGEALSLLKKRFSHRPVQEKFVCLNCGFETHADEQAALNIARSWLFLRSQEYKKYQTNKTTGNTDKRAFVETWQSFYRKKLKEVWKPAV

SEQ ID NO: 43628 - protein, 978 aa, synthetic construct
  REGION 1..978: note = engineered CasX variant
QEIKRINKIRRRLVKDSNTKKAGKTGPMKTLLVRVMTPDLRERLENLRKKPENIPQPISNTSRANLNKLLTDYTEMKKAILHVYWEEFQKDPVGLMSRVAQPASKKIDQNKLKPEMDEKGNLTTAGFACSQCGQPLFVYKLEQVSEKGKAYTNYFGRCNVAEHEKLILLAQLKPEKDSDEAVTYSLGKFGQRALDFYSIHVTKESTHPVKPLAQIAGNRYASAPVGKALSDACMGTIASFLSKYQDIIIEHQKVVKGNQKRLESLRELAGKENLEYPSVTLPPQPHTKEGLDAYNEVIARVRMWVNLNLWQKLKLSRDDAKPLLRLKGFPSFPLVERQANEVDWWDMVCNVKKLINEKKEDGKVFWQNLAGYKRQEALRPYLSSEEDRKKGKKFARYQLGDLLLHLEKKHGEDWGDVYDEAWERIDKKVEGLSKHIKLEEERRSEDAQSKAALTDWLRAKASFVIEGLKEADKDEFCRCELKLQKWYGDLRGKPFAIEAENSILDISGFSKQYNCAFIWQKDGVKKLNLYLIINYFKGGKLRFKKIKPEAFEANRFYTVINKKSGEIVPMEVNFNFDDPNLIILPLAFGKRQGREFIWNDLLSLETGSLKLANGRVIEKTLYNRRTRQDEPALFVALTFERREVLDSSNIKPMNLIGVDRGENIPAVIALTDPEGCPLSRFKDSLGNPTHILRIGESYKEKQRTIQAKKEVEQRRAGGYSRKYASKAKNLADDMVRNTARDLLYYAVTQDAMLIFENLSRGFGRQGKRTFMAERQYTRMEDWLTAKLAYEGLPSKTYLSKTLAQYTSKTCSNCGFTITSADYDRVLEKLKKTATGWMTTINGKELKVEGQITYYNRYKRQNVVKDLSVELDRLSEESVNNDISSWTKGRSGEALSLLKKRFSHRPVQEKFVCLNCGFETHADEQAALNIARSWLFLRSQEYKKYQTNKTTGNTDKRAFVETWQSFYRKKLKEVWKPAV

SEQ ID NO: 43629 - protein, 978 aa, synthetic construct
  REGION 1..978: note = engineered CasX variant
QEIKRINKIRRRLVKDSNTKKAGKTGPMKTLLVRVMTPDLRERLENLRKKPENIPQPISNTSRANLNKLLTDYTEMKKAILHVYWEEFQKDPVGLMSRVAQPASKKIDQNKLKPEMDEKGNLTTAGFACSQCGQPLFVYKLEQVSEKGKAYTNYFGRCNVAEHEKLILLAQLKPEKDSDEAVTYSLGKFGQRALDFYSIHVTKESTHPVKPLAQIAGNRYASVPVGKALSDACMGTIASFLSKYQDIIIEHQKVVKGNQKRLESLRELAGKENLEYPSVTLPPQPHTKEGLDAYNEVIARVRMWVNLNLWQKLKLSRDDAKPLLRLKGFPSFPLVERQANEVDWWDMVCNVKKLINEKKEDGKVFWQNLAGYKRQEALRPYLSSEEDRKKGKKFARYQLGDLLLHLEKKHGEDWGDVYDEAWERIDKKVEGLSKHIKLEEERRSEDAQSKAALTDWLRAKASFVIEGLKEADKDEFCRCELKLQKWYGDLRGKPFAIEAENSILDISGFSKQYNCAFIWQKDGVKKLNLYLIINYFKGGKLRFKKIKPEAFEANRFYTVINKKSGEIVPMEVNFNFDDPNLIILPLAFGKRQGREFIWNDLLSLETGSLKLANGRVIEKTLYNRRTRQDEPALFVALTFERREVLDSSNIKPMNLIGVDRGENIPAVIALTDPEGCPLSRFKDSLGNPTHILRIGESYKEKQRTIQAKKEVEQRRAGGYSRKYASKAKNLADDMVRNTARDLLYYAVTQDAMLIFENLSRGFGRQGKRTFMAERQYTRMEDWLTAKLAYEGLPSKTYLSKTLAQYTSKTCSNCGFTITSADYDRVLEKLKKTATGWMTTINGKELKVEGQITYYNRYKRQNVVKDLSVELDRLSEESVNNDISSWTKGRSGEALSLLKKRFSHRPVQEKFVCLNCGFETHADEQAALNIARSWLFLRSQEYKKYQTNKTTGNTDKRAFVETWQSFYRKKLKEVWKPAV

SEQ ID NO: 43630 - protein, 978 aa, synthetic construct
  REGION 1..978: note = engineered CasX variant
QEIKRINKIRRRLVKDSNTKKAGKTGPMKTLLVRVMTPDLRERLENLRKKPENIPQPISNTSRANLNKLLTDYTEMKKAILHVYWEEFQKDPVGLMSRVAQPASKKIDQNKLKPEMDEKGNLTTAGFACSQCGQPLFVYKLEQVSEKGKAYTNYFGRCNVAEHEKLIKLAQLKPEKDSDEAVTYSLGKFGQRALDFYSIHVTKESTHPVKPLAQIAGNRYASGPVGKALSDACMGTIASFLSKYQDIIIEHQKVVKGNQKRLESLRELAGKENLEYPSVTLPPQPHTKEGLDAYNEVIARVRMWVNLNLWQKLKLSRDDAKPLLRLKGFPSFPLVERQANEVDWWDMVCNVKKLINEKKEDGKVFWQNLAGYKRQEALRPYLSSEEDRKKGKKFARYQLGDLLLHLEKKHGEDWGDVYDEAWERIDKKVEGLSKHIKLEEERRSEDAQSKAALTDWLRAKASFVIEGLKEADKDEFCRCELKLQKWYGDLRGKPFAIEAENSILDISGFSKQYNCAFIWQKDGVKKLNLYLIINYFKGGKLRFKKIKPEAFEANRFYTVINKKSGEIVPMEVNFNFDDPNLIILPLAFGKRQGREFIWNDLLSLETGSLKLANGRVIEKTLYNRRTRQDEPALFVALTFERREVLDSSNIKPMNLIGVDRGENIPAVIALTDPEGCPLSRFKDSLGNPTHILRIGESYKEKQRTIQAKKEVEQRRAGGYSRKYASKAKNLADDMVRNTARDLLYYAVTQDAMLIFENLSRGFGRQGKRTFMAERQYTRMEDWLTAKLAYEGLPSKTYLSKTLAQYTSKTCSNCGFTITSADYDRVLEKLKKTATGWMTTINGKELKVEGQITYYNRYKRQNVVKDLSVELDRLSEESVNNDISSWTKGRSGEALSLLKKRFSHRPVQEKFVCLNCGFETHADEQAALNIARSWLFLRSQEYKKYQTNKTTGNTDKRAFVETWQSFYRKKLKEVWKPAV

SEQ ID NO: 43631 - protein, 977 aa, synthetic construct
  REGION 1..977: note = engineered CasX variant
QEIKRINKIRRRLVKDSNTKKAGKTGPMKTLLVRVMTPDLRERLENLRKKPENIPQPISNTSRANLNKLLTDYTEMKKAILHVYWEEFQKDPVGLMSRVAQPASKKIDQNKLKPEMDEKGNLTTAGFACSQCGQPLFVYKLEQVSEKGKAYTNYFGRCNVAEHEKLILLAQLKPEKDSDEAVTYSLGKFGQRALDFYSIHVTKESTHPVKPLAQIAGNRYASPVGKALSDACMGTIASFLSKYQDIIIEHQKVVKGNQKRLESLRELAGKENLEYPSVTLPPQPHTKEGLDAYNEVIARVRMWVNLNLWQKLKLSRDDAKPLLRLKGFPSFPLVERQANEVDWWDMVCNVKKLINEKKEDGKVFWQNLAGYKRQEALRPYLSSEEDRKKGKKFARYQLGDLLLHLEKKHGEDWGDVYDEAWERIDKKVEGLSKHIKLEEERRSEDAQSKAALTDWLRAKASFVIEGLKEADKDEFCRCELKLQKWYGDLRGKPFAIEAENSILDISGFSKQYNCAFIWQKDGVKKLNLYLIINYFKGGKLRFKKIKPEAFEANRFYTVINKKSGEIVPMEVNFNFDDPNLIILPLAFGKRQGREFIWNDLLSLETGSLKLANGRVIEKTLYNRRTRQDEPALFVALTFERREVLDSSNIKPMNLIGVDRGENIPAVIALTDPEGCPLSRFKDSLGNPTHILRIGESYKEKQRTIQAKKEVEQRRAGGYSRKYASKAKNLADDMVRNTARDLLYYAVTQDAMLIFENLSRGFGRQGKRTFMAERQYTRMEDWLTAKLAYEGLPSKTYLSKTLAQYTSKTCSNCGFTITSADYDRVLEKLKKTATGWMTTINGKELKVEGQITYYNRYKRQNVVKDLSVELDRLSEESVNNDISSWTKGRSGEALSLLKKRFSHRPVQEKFVCLNCGFETHADEQAALNIARSWLFLRSQEYKKYQTNKTTGNTDKRAFVETWQSFYRKKLKEVWKPAV

SEQ ID NO: 43632 - protein, 978 aa, synthetic construct
  REGION 1..978: note = engineered CasX variant
QEIKRINKIRRRLVKDSNTKKAGKTGPMKTLLVRVMTPDLRERLENLRKKPENIPQPISNTSRANLNKLLTDYTEMKKAILHVYWEEFQKDPVGLMSRVAQPASKKIDQNKLKPEMDEKGNLTTAGFACSQCGQPLFVYKLEQVSEKGKAYTNYFGRCNVAEHEKLILLAQLKPEKDSDEAVTYSLGKFGQRALDFYSIHVTKESTHPVKPLAQIAGNRYASYPVGKALSDACMGTIASFLSKYQDIIIEHQKVVKGNQKRLESLRELAGKENLEYPSVTLPPQPHTKEGLDAYNEVIARVRMWVNLNLWQKLKLSRDDAKPLLRLKGFPSFPLVERQANEVDWWDMVCNVKKLINEKKEDGKVFWQNLAGYKRQEALRPYLSSEEDRKKGKKFARYQLGDLLLHLEKKHGEDWGKVYGEAWERIDKKVEGLSKHIKLEEERRSEDAQSKAALTDWLRAKASFVIEGLKEADKDEFCRCELKLQKWYGDLRGKPFAIEAENSILDISGFSKQYNCAFIWQKDGVKKLNLYLIINYFKGGKLRFKKIKPEAFEANRFYTVINKKSGEIVPMEVNFNFDDPNLIILPLAFGKRQGREFIWNDLLSLETGSLKLANGRVIEKTLYNRRTRQDEPALFVALTFERREVLDSSNIKPMNLIGVDRGENIPAVIALTDPEGCPLSRFKDSLGNPTHILRIGESYKEKQRTIQAKKEVEQRRAGGYSRKYASKAKNLADDMVRNTARDLLYYAVTQDAMLIFENLSRGFGRQGKRTFMAERQYTRMEDWLTAKLAYEGLPSKTYLSKTLAQYTSKTCSNCGFTITSADYDRVLEKLKKTATGWMTTINGKELKVEGQITYYNRYKRQNVVKDLSVELDRLSEESVNNDISSWTKGRSGEALSLLKKRFSHRPVQEKFVCLNCGFETHADEQAALNIARSWLFLRSQEYKKYQTNKTTGNTDKRAFVETWQSFYRKKLKEVWKPAV

SEQ ID NO: 43633 - protein, 978 aa, synthetic construct
  REGION 1..978: note = engineered CasX variant
QEIKRINKIRRRLVKDSNTKKAGKTGPMKTLLVRVMTPDLRERLENLRKKPENIPQPISNTSRANLNKLLTDYTEMKKAILHVYWEEFQKDPVGLMSRVAQPASKKIDQNKLKPEMDEKGNLTTAGFACSQCGQPLFVYKLEQVSEKGKAYTNYFGRCNVAEHEKLILLAQLKPEKDSDEAVTYSLGKFGQRALDFYSIHVTKESTHPVKPLAQIAGNRYASHPVGKALSDACMGTIASFLSKYQDIIIEHQKVVKGNQKRLESLRELAGKENLEYPSVTLPPQPHTKEGLDAYNEVIARVRMWVNLNLWQKLKLSRDDAKPLLRLKGFPSFPLVERQANEVDWWDMVCNVKKLINEKKEDGKVFWQNLAGYKRQEALRPYLSSEEDRKKGKKFARYQLGDLLLHLEKKHGEDWGKVYGEAWERIDKKVEGLSKHIKLEEERRSEDAQSKAALTDWLRAKASFVIEGLKEADKDEFCRCELKLQKWYGDLRGKPFAIEAENSILDISGFSKQYNCAFIWQKDGVKKLNLYLIINYFKGGKLRFKKIKPEAFEANRFYTVINKKSGEIVPMEVNFNFDDPNLIILPLAFGKRQGREFIWNDLLSLETGSLKLANGRVIEKTLYNRRTRQDEPALFVALTFERREVLDSSNIKPMNLIGVDRGENIPAVIALTDPEGCPLSRFKDSLGNPTHILRIGESYKEKQRTIQAKKEVEQRRAGGYSRKYASKAKNLADDMVRNTARDLLYYAVTQDAMLIFENLSRGFGRQGKRTFMAERQYTRMEDWLTAKLAYEGLPSKTYLSKTLAQYTSKTCSNCGFTITSADYDRVLEKLKKTATGWMTTINGKELKVEGQITYYNRYKRQNVVKDLSVELDRLSEESVNNDISSWTKGRSGEALSLLKKRFSHRPVQEKFVCLNCGFETHADEQAALNIARSWLFLRSQEYKKYQTNKTTGNTDKRAFVETWQSFYRKKLKEVWKPAV

SEQ ID NO: 43634 - protein, 978 aa, synthetic construct
  REGION 1..978: note = engineered CasX variant
QEIKRINKIRRRLVKDSNTKKAGKTGPMKTLLVRVMTPDLRERLENLRKKPENIPQPISNTSRANLNKLLTDYTEMKKAILHVYWEEFQKDPVGLMSRVAQPASKKIDQNKLKPEMDEKGNLTTAGFACSQCGQPLFVYKLEQVSEKGKAYTNYFGRCNVAEHEKLILLAQLKPEKDSDEAVTYSLGKFGQRALDFYSIHVTKESTHPVKPLAQIAGNRYASSPVGKALSDACMGTIASFLSKYQDIIIEHQKVVKGNQKRLESLRELAGKENLEYPSVTLPPQPHTKEGLDAYNEVIARVRMWVNLNLWQKLKLSRDDAKPLLRLKGFPSFPLVERQANEVDWWDMVCNVKKLINEKKEDGKVFWQNLAGYKRQEALRPYLSSEEDRKKGKKFARYQLGDLLLHLEKKHGEDWGKVYGEAWERIDKKVEGLSKHIKLEEERRSEDAQSKAALTDWLRAKASFVIEGLKEADKDEFCRCELKLQKWYGDLRGKPFAIEAENSILDISGFSKQYNCAFIWQKDGVKKLNLYLIINYFKGGKLRFKKIKPEAFEANRFYTVINKKSGEIVPMEVNFNFDDPNLIILPLAFGKRQGREFIWNDLLSLETGSLKLANGRVIEKTLYNRRTRQDEPALFVALTFERREVLDSSNIKPMNLIGVDRGENIPAVIALTDPEGCPLSRFKDSLGNPTHILRIGESYKEKQRTIQAKKEVEQRRAGGYSRKYASKAKNLADDMVRNTARDLLYYAVTQDAMLIFENLSRGFGRQGKRTFMAERQYTRMEDWLTAKLAYEGLPSKTYLSKTLAQYTSKTCSNCGFTITSADYDRVLEKLKKTATGWMTTINGKELKVEGQITYYNRYKRQNVVKDLSVELDRLSEESVNNDISSWTKGRSGEALSLLKKRFSHRPVQEKFVCLNCGFETHADEQAALNIARSWLFLRSQEYKKYQTNKTTGNTDKRAFVETWQSFYRKKLKEVWKPAV

SEQ ID NO: 43635 - protein, 978 aa, synthetic construct
  REGION 1..978: note = engineered CasX variant
QEIKRINKIRRRLVKDSNTKKAGKTGPMKTLLVRVMTPDLRERLENLRKKPENIPQPISNTSRANLNKLLTDYTEMKKAILHVYWEEFQKDPVGLMSRVAQPASKKIDQNKLKPEMDEKGNLTTAGFACSQCGQPLFVYKLEQVSEKGKAYTNYFGRCNVAEHEKLILLAQLKPEKDSDEAVTYSLGKFGQRALDFYSIHVTKESTHPVKPLAQIAGNRYASTPVGKALSDACMGTIASFLSKYQDIIIEHQKVVKGNQKRLESLRELAGKENLEYPSVTLPPQPHTKEGLDAYNEVIARVRMWVNLNLWQKLKLSRDDAKPLLRLKGFPSFPLVERQANEVDWWDMVCNVKKLINEKKEDGKVFWQNLAGYKRQEALRPYLSSEEDRKKGKKFARYQLGDLLLHLEKKHGEDWGKVYGEAWERIDKKVEGLSKHIKLEEERRSEDAQSKAALTDWLRAKASFVIEGLKEADKDEFCRCELKLQKWYGDLRGKPFAIEAENSILDISGFSKQYNCAFIWQKDGVKKLNLYLIINYFKGGKLRFKKIKPEAFEANRFYTVINKKSGEIVPMEVNFNFDDPNLIILPLAFGKRQGREFIWNDLLSLETGSLKLANGRVIEKTLYNRRTRQDEPALFVALTFERREVLDSSNIKPMNLIGVDRGENIPAVIALTDPEGCPLSRFKDSLGNPTHILRIGESYKEKQRTIQAKKEVEQRRAGGYSRKYASKAKNLADDMVRNTARDLLYYAVTQDAMLIFENLSRGFGRQGKRTFMAERQYTRMEDWLTAKLAYEGLPSKTYLSKTLAQYTSKTCSNCGFTITSADYDRVLEKLKKTATGWMTTINGKELKVEGQITYYNRYKRQNVVKDLSVELDRLSEESVNNDISSWTKGRSGEALSLLKKRFSHRPVQEKFVCLNCGFETHADEQAALNIARSWLFLRSQEYKKYQTNKTTGNTDKRAFVETWQSFYRKKLKEVWKPAV

SEQ ID NO: 43636 - protein, 978 aa, synthetic construct
  REGION 1..978: note = engineered CasX variant
QEIKRINKIRRRLVKDSNTKKAGKTGPMKTLLVRVMTPDLRERLENLRKKPENIPQPISNTSRANLNKLLTDYTEMKKAILHVYWEEFQKDPVGLMSRVAQPASKKIDQNKLKPEMDEKGNLTTAGFACSQCGQPLFVYKLEQVSEKGKAYTNYFGRCNVAEHEKLILLAQLKPEKDSDEAVTYSLGKFGQRALDFYSIHVTKESTHPVKPLAQIAGNRYASAPVGKALSDACMGTIASFLSKYQDIIIEHQKVVKGNQKRLESLRELAGKENLEYPSVTLPPQPHTKEGLDAYNEVIARVRMWVNLNLWQKLKLSRDDAKPLLRLKGFPSFPLVERQANEVDWWDMVCNVKKLINEKKEDGKVFWQNLAGYKRQEALRPYLSSEEDRKKGKKFARYQLGDLLLHLEKKHGEDWGKVYGEAWERIDKKVEGLSKHIKLEEERRSEDAQSKAALTDWLRAKASFVIEGLKEADKDEFCRCELKLQKWYGDLRGKPFAIEAENSILDISGFSKQYNCAFIWQKDGVKKLNLYLIINYFKGGKLRFKKIKPEAFEANRFYTVINKKSGEIVPMEVNFNFDDPNLIILPLAFGKRQGREFIWNDLLSLETGSLKLANGRVIEKTLYNRRTRQDEPALFVALTFERREVLDSSNIKPMNLIGVDRGENIPAVIALTDPEGCPLSRFKDSLGNPTHILRIGESYKEKQRTIQAKKEVEQRRAGGYSRKYASKAKNLADDMVRNTARDLLYYAVTQDAMLIFENLSRGFGRQGKRTFMAERQYTRMEDWLTAKLAYEGLPSKTYLSKTLAQYTSKTCSNCGFTITSADYDRVLEKLKKTATGWMTTINGKELKVEGQITYYNRYKRQNVVKDLSVELDRLSEESVNNDISSWTKGRSGEALSLLKKRFSHRPVQEKFVCLNCGFETHADEQAALNIARSWLFLRSQEYKKYQTNKTTGNTDKRAFVETWQSFYRKKLKEVWKPAV

SEQ ID NO: 43637 - protein, 978 aa, synthetic construct
  REGION 1..978: note = engineered CasX variant
QEIKRINKIRRRLVKDSNTKKAGKTGPMKTLLVRVMTPDLRERLENLRKKPENIPQPISNTSRANLNKLLTDYTEMKKAILHVYWEEFQKDPVGLMSRVAQPASKKIDQNKLKPEMDEKGNLTTAGFACSQCGQPLFVYKLEQVSEKGKAYTNYFGRCNVAEHEKLILLAQLKPEKDSDEAVTYSLGKFGQRALDFYSIHVTKESTHPVKPLAQIAGNRYASVPVGKALSDACMGTIASFLSKYQDIIIEHQKVVKGNQKRLESLRELAGKENLEYPSVTLPPQPHTKEGLDAYNEVIARVRMWVNLNLWQKLKLSRDDAKPLLRLKGFPSFPLVERQANEVDWWDMVCNVKKLINEKKEDGKVFWQNLAGYKRQEALRPYLSSEEDRKKGKKFARYQLGDLLLHLEKKHGEDWGKVYGEAWERIDKKVEGLSKHIKLEEERRSEDAQSKAALTDWLRAKASFVIEGLKEADKDEFCRCELKLQKWYGDLRGKPFAIEAENSILDISGFSKQYNCAFIWQKDGVKKLNLYLIINYFKGGKLRFKKIKPEAFEANRFYTVINKKSGEIVPMEVNFNFDDPNLIILPLAFGKRQGREFIWNDLLSLETGSLKLANGRVIEKTLYNRRTRQDEPALFVALTFERREVLDSSNIKPMNLIGVDRGENIPAVIALTDPEGCPLSRFKDSLGNPTHILRIGESYKEKQRTIQAKKEVEQRRAGGYSRKYASKAKNLADDMVRNTARDLLYYAVTQDAMLIFENLSRGFGRQGKRTFMAERQYTRMEDWLTAKLAYEGLPSKTYLSKTLAQYTSKTCSNCGFTITSADYDRVLEKLKKTATGWMTTINGKELKVEGQITYYNRYKRQNVVKDLSVELDRLSEESVNNDISSWTKGRSGEALSLLKKRFSHRPVQEKFVCLNCGFETHADEQAALNIARSWLFLRSQEYKKYQTNKTTGNTDKRAFVETWQSFYRKKLKEVWKPAV

SEQ ID NO: 43638 - protein, 978 aa, synthetic construct
  REGION 1..978: note = engineered CasX variant
QEIKRINKIRRRLVKDSNTKKAGKTGPMKTLLVRVMTPDLRERLENLRKKPENIPQPISNTSRANLNKLLTDYTEMKKAILHVYWEEFQKDPVGLMSRVAQPASKKIDQNKLKPEMDEKGNLTTAGFACSQCGQPLFVYKLEQVSEKGKAYTNYFGRCNVAEHEKLIKLAQLKPEKDSDEAVTYSLGKFGQRALDFYSIHVTKESTHPVKPLAQIAGNRYASGPVGKALSDACMGTIASFLSKYQDIIIEHQKVVKGNQKRLESLRELAGKENLEYPSVTLPPQPHTKEGLDAYNEVIARVRMWVNLNLWQKLKLSRDDAKPLLRLKGFPSFPLVERQANEVDWWDMVCNVKKLINEKKEDGKVFWQNLAGYKRQEALRPYLSSEEDRKKGKKFARYQLGDLLLHLEKKHGEDWGKVYGEAWERIDKKVEGLSKHIKLEEERRSEDAQSKAALTDWLRAKASFVIEGLKEADKDEFCRCELKLQKWYGDLRGKPFAIEAENSILDISGFSKQYNCAFIWQKDGVKKLNLYLIINYFKGGKLRFKKIKPEAFEANRFYTVINKKSGEIVPMEVNFNFDDPNLIILPLAFGKRQGREFIWNDLLSLETGSLKLANGRVIEKTLYNRRTRQDEPALFVALTFERREVLDSSNIKPMNLIGVDRGENIPAVIALTDPEGCPLSRFKDSLGNPTHILRIGESYKEKQRTIQAKKEVEQRRAGGYSRKYASKAKNLADDMVRNTARDLLYYAVTQDAMLIFENLSRGFGRQGKRTFMAERQYTRMEDWLTAKLAYEGLPSKTYLSKTLAQYTSKTCSNCGFTITSADYDRVLEKLKKTATGWMTTINGKELKVEGQITYYNRYKRQNVVKDLSVELDRLSEESVNNDISSWTKGRSGEALSLLKKRFSHRPVQEKFVCLNCGFETHADEQAALNIARSWLFLRSQEYKKYQTNKTTGNTDKRAFVETWQSFYRKKLKEVWKPAV

SEQ ID NO: 43639 - protein, 977 aa, synthetic construct
  REGION 1..977: note = engineered CasX variant
QEIKRINKIRRRLVKDSNTKKAGKTGPMKTLLVRVMTPDLRERLENLRKKPENIPQPISNTSRANLNKLLTDYTEMKKAILHVYWEEFQKDPVGLMSRVAQPASKKIDQNKLKPEMDEKGNLTTAGFACSQCGQPLFVYKLEQVSEKGKAYTNYFGRCNVAEHEKLILLAQLKPEKDSDEAVTYSLGKFGQRALDFYSIHVTKESTHPVKPLAQIAGNRYASPVGKALSDACMGTIASFLSKYQDIIIEHQKVVKGNQKRLESLRELAGKENLEYPSVTLPPQPHTKEGLDAYNEVIARVRMWVNLNLWQKLKLSRDDAKPLLRLKGFPSFPLVERQANEVDWWDMVCNVKKLINEKKEDGKVFWQNLAGYKRQEALRPYLSSEEDRKKGKKFARYQLGDLLLHLEKKHGEDWGKVYGEAWERIDKKVEGLSKHIKLEEERRSEDAQSKAALTDWLRAKASFVIEGLKEADKDEFCRCELKLQKWYGDLRGKPFAIEAENSILDISGFSKQYNCAFIWQKDGVKKLNLYLIINYFKGGKLRFKKIKPEAFEANRFYTVINKKSGEIVPMEVNFNFDDPNLIILPLAFGKRQGREFIWNDLLSLETGSLKLANGRVIEKTLYNRRTRQDEPALFVALTFERREVLDSSNIKPMNLIGVDRGENIPAVIALTDPEGCPLSRFKDSLGNPTHILRIGESYKEKQRTIQAKKEVEQRRAGGYSRKYASKAKNLADDMVRNTARDLLYYAVTQDAMLIFENLSRGFGRQGKRTFMAERQYTRMEDWLTAKLAYEGLPSKTYLSKTLAQYTSKTCSNCGFTITSADYDRVLEKLKKTATGWMTTINGKELKVEGQITYYNRYKRQNVVKDLSVELDRLSEESVNNDISSWTKGRSGEALSLLKKRFSHRPVQEKFVCLNCGFETHADEQAALNIARSWLFLRSQEYKKYQTNKTTGNTDKRAFVETWQSFYRKKLKEVWKPAV

SEQ ID NO: 43640 - protein, 978 aa, synthetic construct
  REGION 1..978: note = engineered CasX variant
QEIKRINKIRRRLVKDSNTKKAGKTGPMKTLLVRVMTPDLRERLENLRKKPENIPQPISNTSRANLNKLLTDYTEMKKAILHVYWEEFQKDPVGLMSRVAQPASKKIDQNKLKPEMDEKGNLTTAGFACSQCGQPLFVYKLEQVSEKGKAYTNYFGRCNVAEHEKLILLAQLKPEKDSDEAVTYSLGKFGQRALDFYSIHVTKESTHPVKPLAQIAGNRYASYPVGKALSDACMGTIASFLSKYQDIIIEHQKVVKGNQKRLESLRELAGKENLEYPSVTLPPQPHTKEGLDAYNEVIARVRMWVNLNLWQKLKLSRDDAKPLLRLKGFPSFPLVERQANEVDWWDMVCNVKKLINEKKEDGKVFWQNLAGYKRQEALRPYLSSEEDRKKGKKFARYQLGDLLLHLEKKHGEDWGKVYDEAWERIDKKVEGLSKHIKLEEERRSEDAQSKAALTDWLRAKASFVIEGKKEADKDEFCRCELKLQKWYGDLRGKPFAIEAENSILDISGFSKQYNCAFIWQKDGVKKLNLYLIINYFKGGKLRFKKIKPEAFEANRFYTVINKKSGEIVPMEVNFNFDDPNLIILPLAFGKRQGREFIWNDLLSLETGSLKLANGRVIEKTLYNRRTRQDEPALFVALTFERREVLDSSNIKPMNLIGVDRGENIPAVIALTDPEGCPLSRFKDSLGNPTHILRIGESYKEKQRTIQAKKEVEQRRAGGYSRKYASKAKNLADDMVRNTARDLLYYAVTQDAMLIFENLSRGFGRQGKRTFMAERQYTRMEDWLTAKLAYEGLPSKTYLSKTLAQYTSKTCSNCGFTITSADYDRVLEKLKKTATGWMTTINGKELKVEGQITYYNRYKRQNVVKDLSVELDRLSEESVNNDISSWTKGRSGEALSLLKKRFSHRPVQEKFVCLNCGFETHADEQAALNIARSWLFLRSQEYKKYQTNKTTGNTDKRAFVETWQSFYRKKLKEVWKPAV

SEQ ID NO: 43641 - protein, 978 aa, synthetic construct
  REGION 1..978: note = engineered CasX variant
QEIKRINKIRRRLVKDSNTKKAGKTGPMKTLLVRVMTPDLRERLENLRKKPENIPQPISNTSRANLNKLLTDYTEMKKAILHVYWEEFQKDPVGLMSRVAQPASKKIDQNKLKPEMDEKGNLTTAGFACSQCGQPLFVYKLEQVSEKGKAYTNYFGRCNVAEHEKLILLAQLKPEKDSDEAVTYSLGKFGQRALDFYSIHVTKESTHPVKPLAQIAGNRYASHPVGKALSDACMGTIASFLSKYQDIIIEHQKVVKGNQKRLESLRELAGKENLEYPSVTLPPQPHTKEGLDAYNEVIARVRMWVNLNLWQKLKLSRDDAKPLLRLKGFPSFPLVERQANEVDWWDMVCNVKKLINEKKEDGKVFWQNLAGYKRQEALRPYLSSEEDRKKGKKFARYQLGDLLLHLEKKHGEDWGKVYDEAWERIDKKVEGLSKHIKLEEERRSEDAQSKAALTDWLRAKASFVIEGKKEADKDEFCRCELKLQKWYGDLRGKPFAIEAENSILDISGFSKQYNCAFIWQKDGVKKLNLYLIINYFKGGKLRFKKIKPEAFEANRFYTVINKKSGEIVPMEVNFNFDDPNLIILPLAFGKRQGREFIWNDLLSLETGSLKLANGRVIEKTLYNRRTRQDEPALFVALTFERREVLDSSNIKPMNLIGVDRGENIPAVIALTDPEGCPLSRFKDSLGNPTHILRIGESYKEKQRTIQAKKEVEQRRAGGYSRKYASKAKNLADDMVRNTARDLLYYAVTQDAMLIFENLSRGFGRQGKRTFMAERQYTRMEDWLTAKLAYEGLPSKTYLSKTLAQYTSKTCSNCGFTITSADYDRVLEKLKKTATGWMTTINGKELKVEGQITYYNRYKRQNVVKDLSVELDRLSEESVNNDISSWTKGRSGEALSLLKKRFSHRPVQEKFVCLNCGFETHADEQAALNIARSWLFLRSQEYKKYQTNKTTGNTDKRAFVETWQSFYRKKLKEVWKPAV

SEQ ID NO: 43642 - protein, 978 aa, synthetic construct
  REGION 1..978: note = engineered CasX variant
QEIKRINKIRRRLVKDSNTKKAGKTGPMKTLLVRVMTPDLRERLENLRKKPENIPQPISNTSRANLNKLLTDYTEMKKAILHVYWEEFQKDPVGLMSRVAQPASKKIDQNKLKPEMDEKGNLTTAGFACSQCGQPLFVYKLEQVSEKGKAYTNYFGRCNVAEHEKLILLAQLKPEKDSDEAVTYSLGKFGQRALDFYSIHVTKESTHPVKPLAQIAGNRYASSPVGKALSDACMGTIASFLSKYQDIIIEHQKVVKGNQKRLESLRELAGKENLEYPSVTLPPQPHTKEGLDAYNEVIARVRMWVNLNLWQKLKLSRDDAKPLLRLKGFPSFPLVERQANEVDWWDMVCNVKKLINEKKEDGKVFWQNLAGYKRQEALRPYLSSEEDRKKGKKFARYQLGDLLLHLEKKHGEDWGKVYDEAWERIDKKVEGLSKHIKLEEERRSEDAQSKAALTDWLRAKASFVIEGKKEADKDEFCRCELKLQKWYGDLRGKPFAIEAENSILDISGFSKQYNCAFIWQKDGVKKLNLYLIINYFKGGKLRFKKIKPEAFEANRFYTVINKKSGEIVPMEVNFNFDDPNLIILPLAFGKRQGREFIWNDLLSLETGSLKLANGRVIEKTLYNRRTRQDEPALFVALTFERREVLDSSNIKPMNLIGVDRGENIPAVIALTDPEGCPLSRFKDSLGNPTHILRIGESYKEKQRTIQAKKEVEQRRAGGYSRKYASKAKNLADDMVRNTARDLLYYAVTQDAMLIFENLSRGFGRQGKRTFMAERQYTRMEDWLTAKLAYEGLPSKTYLSKTLAQYTSKTCSNCGFTITSADYDRVLEKLKKTATGWMTTINGKELKVEGQITYYNRYKRQNVVKDLSVELDRLSEESVNNDISSWTKGRSGEALSLLKKRFSHRPVQEKFVCLNCGFETHADEQAALNIARSWLFLRSQEYKKYQTNKTTGNTDKRAFVETWQSFYRKKLKEVWKPAV

SEQ ID NO: 43643 - protein, 978 aa, synthetic construct
  REGION 1..978: note = engineered CasX variant
QEIKRINKIRRRLVKDSNTKKAGKTGPMKTLLVRVMTPDLRERLENLRKKPENIPQPISNTSRANLNKLLTDYTEMKKAILHVYWEEFQKDPVGLMSRVAQPASKKIDQNKLKPEMDEKGNLTTAGFACSQCGQPLFVYKLEQVSEKGKAYTNYFGRCNVAEHEKLILLAQLKPEKDSDEAVTYSLGKFGQRALDFYSIHVTKESTHPVKPLAQIAGNRYASTPVGKALSDACMGTIASFLSKYQDIIIEHQKVVKGNQKRLESLRELAGKENLEYPSVTLPPQPHTKEGLDAYNEVIARVRMWVNLNLWQKLKLSRDDAKPLLRLKGFPSFPLVERQANEVDWWDMVCNVKKLINEKKEDGKVFWQNLAGYKRQEALRPYLSSEEDRKKGKKFARYQLGDLLLHLEKKHGEDWGKVYDEAWERIDKKVEGLSKHIKLEEERRSEDAQSKAALTDWLRAKASFVIEGKKEADKDEFCRCELKLQKWYGDLRGKPFAIEAENSILDISGFSKQYNCAFIWQKDGVKKLNLYLIINYFKGGKLRFKKIKPEAFEANRFYTVINKKSGEIVPMEVNFNFDDPNLIILPLAFGKRQGREFIWNDLLSLETGSLKLANGRVIEKTLYNRRTRQDEPALFVALTFERREVLDSSNIKPMNLIGVDRGENIPAVIALTDPEGCPLSRFKDSLGNPTHILRIGESYKEKQRTIQAKKEVEQRRAGGYSRKYASKAKNLADDMVRNTARDLLYYAVTQDAMLIFENLSRGFGRQGKRTFMAERQYTRMEDWLTAKLAYEGLPSKTYLSKTLAQYTSKTCSNCGFTITSADYDRVLEKLKKTATGWMTTINGKELKVEGQITYYNRYKRQNVVKDLSVELDRLSEESVNNDISSWTKGRSGEALSLLKKRFSHRPVQEKFVCLNCGFETHADEQAALNIARSWLFLRSQEYKKYQTNKTTGNTDKRAFVETWQSFYRKKLKEVWKPAV

SEQ ID NO: 43644 - protein, 978 aa, synthetic construct
  REGION 1..978: note = engineered CasX variant
QEIKRINKIRRRLVKDSNTKKAGKTGPMKTLLVRVMTPDLRERLENLRKKPENIPQPISNTSRANLNKLLTDYTEMKKAILHVYWEEFQKDPVGLMSRVAQPASKKIDQNKLKPEMDEKGNLTTAGFACSQCGQPLFVYKLEQVSEKGKAYTNYFGRCNVAEHEKLILLAQLKPEKDSDEAVTYSLGKFGQRALDFYSIHVTKESTHPVKPLAQIAGNRYASAPVGKALSDACMGTIASFLSKYQDIIIEHQKVVKGNQKRLESLRELAGKENLEYPSVTLPPQPHTKEGLDAYNEVIARVRMWVNLNLWQKLKLSRDDAKPLLRLKGFPSFPLVERQANEVDWWDMVCNVKKLINEKKEDGKVFWQNLAGYKRQEALRPYLSSEEDRKKGKKFARYQLGDLLLHLEKKHGEDWGKVYDEAWERIDKKVEGLSKHIKLEEERRSEDAQSKAALTDWLRAKASFVIEGKKEADKDEFCRCELKLQKWYGDLRGKPFAIEAENSILDISGFSKQYNCAFIWQKDGVKKLNLYLIINYFKGGKLRFKKIKPEAFEANRFYTVINKKSGEIVPMEVNFNFDDPNLIILPLAFGKRQGREFIWNDLLSLETGSLKLANGRVIEKTLYNRRTRQDEPALFVALTFERREVLDSSNIKPMNLIGVDRGENIPAVIALTDPEGCPLSRFKDSLGNPTHILRIGESYKEKQRTIQAKKEVEQRRAGGYSRKYASKAKNLADDMVRNTARDLLYYAVTQDAMLIFENLSRGFGRQGKRTFMAERQYTRMEDWLTAKLAYEGLPSKTYLSKTLAQYTSKTCSNCGFTITSADYDRVLEKLKKTATGWMTTINGKELKVEGQITYYNRYKRQNVVKDLSVELDRLSEESVNNDISSWTKGRSGEALSLLKKRFSHRPVQEKFVCLNCGFETHADEQAALNIARSWLFLRSQEYKKYQTNKTTGNTDKRAFVETWQSFYRKKLKEVWKPAV

SEQ ID NO: 43645 - protein, 978 aa, synthetic construct
  REGION 1..978: note = engineered CasX variant
QEIKRINKIRRRLVKDSNTKKAGKTGPMKTLLVRVMTPDLRERLENLRKKPENIPQPISNTSRANLNKLLTDYTEMKKAILHVYWEEFQKDPVGLMSRVAQPASKKIDQNKLKPEMDEKGNLTTAGFACSQCGQPLFVYKLEQVSEKGKAYTNYFGRCNVAEHEKLILLAQLKPEKDSDEAVTYSLGKFGQRALDFYSIHVTKESTHPVKPLAQIAGNRYASVPVGKALSDACMGTIASFLSKYQDIIIEHQKVVKGNQKRLESLRELAGKENLEYPSVTLPPQPHTKEGLDAYNEVIARVRMWVNLNLWQKLKLSRDDAKPLLRLKGFPSFPLVERQANEVDWWDMVCNVKKLINEKKEDGKVFWQNLAGYKRQEALRPYLSSEEDRKKGKKFARYQLGDLLLHLEKKHGEDWGKVYDEAWERIDKKVEGLSKHIKLEEERRSEDAQSKAALTDWLRAKASFVIEGKKEADKDEFCRCELKLQKWYGDLRGKPFAIEAENSILDISGFSKQYNCAFIWQKDGVKKLNLYLIINYFKGGKLRFKKIKPEAFEANRFYTVINKKSGEIVPMEVNFNFDDPNLIILPLAFGKRQGREFIWNDLLSLETGSLKLANGRVIEKTLYNRRTRQDEPALFVALTFERREVLDSSNIKPMNLIGVDRGENIPAVIALTDPEGCPLSRFKDSLGNPTHILRIGESYKEKQRTIQAKKEVEQRRAGGYSRKYASKAKNLADDMVRNTARDLLYYAVTQDAMLIFENLSRGFGRQGKRTFMAERQYTRMEDWLTAKLAYEGLPSKTYLSKTLAQYTSKTCSNCGFTITSADYDRVLEKLKKTATGWMTTINGKELKVEGQITYYNRYKRQNVVKDLSVELDRLSEESVNNDISSWTKGRSGEALSLLKKRFSHRPVQEKFVCLNCGFETHADEQAALNIARSWLFLRSQEYKKYQTNKTTGNTDKRAFVETWQSFYRKKLKEVWKPAV

SEQ ID NO: 43646 - protein, 978 aa, synthetic construct
  REGION 1..978: note = engineered CasX variant
QEIKRINKIRRRLVKDSNTKKAGKTGPMKTLLVRVMTPDLRERLENLRKKPENIPQPISNTSRANLNKLLTDYTEMKKAILHVYWEEFQKDPVGLMSRVAQPASKKIDQNKLKPEMDEKGNLTTAGFACSQCGQPLFVYKLEQVSEKGKAYTNYFGRCNVAEHEKLIKLAQLKPEKDSDEAVTYSLGKFGQRALDFYSIHVTKESTHPVKPLAQIAGNRYASGPVGKALSDACMGTIASFLSKYQDIIIEHQKVVKGNQKRLESLRELAGKENLEYPSVTLPPQPHTKEGLDAYNEVIARVRMWVNLNLWQKLKLSRDDAKPLLRLKGFPSFPLVERQANEVDWWDMVCNVKKLINEKKEDGKVFWQNLAGYKRQEALRPYLSSEEDRKKGKKFARYQLGDLLLHLEKKHGEDWGKVYDEAWERIDKKVEGLSKHIKLEEERRSEDAQSKAALTDWLRAKASFVIEGKKEADKDEFCRCELKLQKWYGDLRGKPFAIEAENSILDISGFSKQYNCAFIWQKDGVKKLNLYLIINYFKGGKLRFKKIKPEAFEANRFYTVINKKSGEIVPMEVNFNFDDPNLIILPLAFGKRQGREFIWNDLLSLETGSLKLANGRVIEKTLYNRRTRQDEPALFVALTFERREVLDSSNIKPMNLIGVDRGENIPAVIALTDPEGCPLSRFKDSLGNPTHILRIGESYKEKQRTIQAKKEVEQRRAGGYSRKYASKAKNLADDMVRNTARDLLYYAVTQDAMLIFENLSRGFGRQGKRTFMAERQYTRMEDWLTAKLAYEGLPSKTYLSKTLAQYTSKTCSNCGFTITSADYDRVLEKLKKTATGWMTTINGKELKVEGQITYYNRYKRQNVVKDLSVELDRLSEESVNNDISSWTKGRSGEALSLLKKRFSHRPVQEKFVCLNCGFETHADEQAALNIARSWLFLRSQEYKKYQTNKTTGNTDKRAFVETWQSFYRKKLKEVWKPAV

SEQ ID NO: 43647 - protein, 977 aa, synthetic construct
  REGION 1..977: note = engineered CasX variant
QEIKRINKIRRRLVKDSNTKKAGKTGPMKTLLVRVMTPDLRERLENLRKKPENIPQPISNTSRANLNKLLTDYTEMKKAILHVYWEEFQKDPVGLMSRVAQPASKKIDQNKLKPEMDEKGNLTTAGFACSQCGQPLFVYKLEQVSEKGKAYTNYFGRCNVAEHEKLILLAQLKPEKDSDEAVTYSLGKFGQRALDFYSIHVTKESTHPVKPLAQIAGNRYASPVGKALSDACMGTIASFLSKYQDIIIEHQKVVKGNQKRLESLRELAGKENLEYPSVTLPPQPHTKEGLDAYNEVIARVRMWVNLNLWQKLKLSRDDAKPLLRLKGFPSFPLVERQANEVDWWDMVCNVKKLINEKKEDGKVFWQNLAGYKRQEALRPYLSSEEDRKKGKKFARYQLGDLLLHLEKKHGEDWGKVYDEAWERIDKKVEGLSKHIKLEEERRSEDAQSKAALTDWLRAKASFVIEGKKEADKDEFCRCELKLQKWYGDLRGKPFAIEAENSILDISGFSKQYNCAFIWQKDGVKKLNLYLIINYFKGGKLRFKKIKPEAFEANRFYTVINKKSGEIVPMEVNFNFDDPNLIILPLAFGKRQGREFIWNDLLSLETGSLKLANGRVIEKTLYNRRTRQDEPALFVALTFERREVLDSSNIKPMNLIGVDRGENIPAVIALTDPEGCPLSRFKDSLGNPTHILRIGESYKEKQRTIQAKKEVEQRRAGGYSRKYASKAKNLADDMVRNTARDLLYYAVTQDAMLIFENLSRGFGRQGKRTFMAERQYTRMEDWLTAKLAYEGLPSKTYLSKTLAQYTSKTCSNCGFTITSADYDRVLEKLKKTATGWMTTINGKELKVEGQITYYNRYKRQNVVKDLSVELDRLSEESVNNDISSWTKGRSGEALSLLKKRFSHRPVQEKFVCLNCGFETHADEQAALNIARSWLFLRSQEYKKYQTNKTTGNTDKRAFVETWQSFYRKKLKEVWKPAV

SEQ ID NO: 43648 - protein, 978 aa, synthetic construct
  REGION 1..978: note = engineered CasX variant
QEIKRINKIRRRLVKDSNTKKAGKTGPMKTLLVRVMTPDLRERLENLRKKPENIPQPISNTSRANLNKLLTDYTEMKKAILHVYWEEFQKDPVGLMSRVAQPASKKIDQNKLKPEMDEKGNLTTAGFACSQCGQPLFVYKLEQVSEKGKAYTNYFGRCNVAEHEKLILLAQLKPEKDSDEAVTYSLGKFGQRALDFYSIHVTKESTHPVKPLAQIAGNRYASYPVGKALSDACMGTIASFLSKYQDIIIEHQKVVKGNQKRLESLRELAGKENLEYPSVTLPPQPHTKEGLDAYNEVIARVRMWVNLNLWQKLKLSRDDAKPLLRLKGFPSFPLVERQANEVDWWDMVCNVKKLINEKKEDGKVFWQNLAGYKRQEALRPYLSSEEDRKKGKKFARYQLGDLLLHLEKKHGEDWGKVYDEAWERIDKKVEGLSKHIKLEEERRSEDAQSKAALTDWLRAKASFVIEGSKEADKDEFCRCELKLQKWYGDLRGKPFAIEAENSILDISGFSKQYNCAFIWQKDGVKKLNLYLIINYFKGGKLRFKKIKPEAFEANRFYTVINKKSGEIVPMEVNFNFDDPNLIILPLAFGKRQGREFIWNDLLSLETGSLKLANGRVIEKTLYNRRTRQDEPALFVALTFERREVLDSSNIKPMNLIGVDRGENIPAVIALTDPEGCPLSRFKDSLGNPTHILRIGESYKEKQRTIQAKKEVEQRRAGGYSRKYASKAKNLADDMVRNTARDLLYYAVTQDAMLIFENLSRGFGRQGKRTFMAERQYTRMEDWLTAKLAYEGLPSKTYLSKTLAQYTSKTCSNCGFTITSADYDRVLEKLKKTATGWMTTINGKELKVEGQITYYNRYKRQNVVKDLSVELDRLSEESVNNDISSWTKGRSGEALSLLKKRFSHRPVQEKFVCLNCGFETHADEQAALNIARSWLFLRSQEYKKYQTNKTTGNTDKRAFVETWQSFYRKKLKEVWKPAV

SEQ ID NO: 43649 - protein, 978 aa, synthetic construct
  REGION 1..978: note = engineered CasX variant
QEIKRINKIRRRLVKDSNTKKAGKTGPMKTLLVRVMTPDLRERLENLRKKPENIPQPISNTSRANLNKLLTDYTEMKKAILHVYWEEFQKDPVGLMSRVAQPASKKIDQNKLKPEMDEKGNLTTAGFACSQCGQPLFVYKLEQVSEKGKAYTNYFGRCNVAEHEKLILLAQLKPEKDSDEAVTYSLGKFGQRALDFYSIHVTKESTHPVKPLAQIAGNRYASHPVGKALSDACMGTIASFLSKYQDIIIEHQKVVKGNQKRLESLRELAGKENLEYPSVTLPPQPHTKEGLDAYNEVIARVRMWVNLNLWQKLKLSRDDAKPLLRLKGFPSFPLVERQANEVDWWDMVCNVKKLINEKKEDGKVFWQNLAGYKRQEALRPYLSSEEDRKKGKKFARYQLGDLLLHLEKKHGEDWGKVYDEAWERIDKKVEGLSKHIKLEEERRSEDAQSKAALTDWLRAKASFVIEGSKEADKDEFCRCELKLQKWYGDLRGKPFAIEAENSILDISGFSKQYNCAFIWQKDGVKKLNLYLIINYFKGGKLRFKKIKPEAFEANRFYTVINKKSGEIVPMEVNFNFDDPNLIILPLAFGKRQGREFIWNDLLSLETGSLKLANGRVIEKTLYNRRTRQDEPALFVALTFERREVLDSSNIKPMNLIGVDRGENIPAVIALTDPEGCPLSRFKDSLGNPTHILRIGESYKEKQRTIQAKKEVEQRRAGGYSRKYASKAKNLADDMVRNTARDLLYYAVTQDAMLIFENLSRGFGRQGKRTFMAERQYTRMEDWLTAKLAYEGLPSKTYLSKTLAQYTSKTCSNCGFTITSADYDRVLEKLKKTATGWMTTINGKELKVEGQITYYNRYKRQNVVKDLSVELDRLSEESVNNDISSWTKGRSGEALSLLKKRFSHRPVQEKFVCLNCGFETHADEQAALNIARSWLFLRSQEYKKYQTNKTTGNTDKRAFVETWQSFYRKKLKEVWKPAV

SEQ ID NO: 43650 - protein, 978 aa, synthetic construct
  REGION 1..978: note = engineered CasX variant
QEIKRINKIRRRLVKDSNTKKAGKTGPMKTLLVRVMTPDLRERLENLRKKPENIPQPISNTSRANLNKLLTDYTEMKKAILHVYWEEFQKDPVGLMSRVAQPASKKIDQNKLKPEMDEKGNLTTAGFACSQCGQPLFVYKLEQVSEKGKAYTNYFGRCNVAEHEKLILLAQLKPEKDSDEAVTYSLGKFGQRALDFYSIHVTKESTHPVKPLAQIAGNRYASSPVGKALSDACMGTIASFLSKYQDIIIEHQKVVKGNQKRLESLRELAGKENLEYPSVTLPPQPHTKEGLDAYNEVIARVRMWVNLNLWQKLKLSRDDAKPLLRLKGFPSFPLVERQANEVDWWDMVCNVKKLINEKKEDGKVFWQNLAGYKRQEALRPYLSSEEDRKKGKKFARYQLGDLLLHLEKKHGEDWGKVYDEAWERIDKKVEGLSKHIKLEEERRSEDAQSKAALTDWLRAKASFVIEGSKEADKDEFCRCELKLQKWYGDLRGKPFAIEAENSILDISGFSKQYNCAFIWQKDGVKKLNLYLIINYFKGGKLRFKKIKPEAFEANRFYTVINKKSGEIVPMEVNFNFDDPNLIILPLAFGKRQGREFIWNDLLSLETGSLKLANGRVIEKTLYNRRTRQDEPALFVALTFERREVLDSSNIKPMNLIGVDRGENIPAVIALTDPEGCPLSRFKDSLGNPTHILRIGESYKEKQRTIQAKKEVEQRRAGGYSRKYASKAKNLADDMVRNTARDLLYYAVTQDAMLIFENLSRGFGRQGKRTFMAERQYTRMEDWLTAKLAYEGLPSKTYLSKTLAQYTSKTCSNCGFTITSADYDRVLEKLKKTATGWMTTINGKELKVEGQITYYNRYKRQNVVKDLSVELDRLSEESVNNDISSWTKGRSGEALSLLKKRFSHRPVQEKFVCLNCGFETHADEQAALNIARSWLFLRSQEYKKYQTNKTTGNTDKRAFVETWQSFYRKKLKEVWKPAV

SEQ ID NO: 43651 - protein, 978 aa, synthetic construct
  REGION 1..978: note = engineered CasX variant
QEIKRINKIRRRLVKDSNTKKAGKTGPMKTLLVRVMTPDLRERLENLRKKPENIPQPISNTSRANLNKLLTDYTEMKKAILHVYWEEFQKDPVGLMSRVAQPASKKIDQNKLKPEMDEKGNLTTAGFACSQCGQPLFVYKLEQVSEKGKAYTNYFGRCNVAEHEKLILLAQLKPEKDSDEAVTYSLGKFGQRALDFYSIHVTKESTHPVKPLAQIAGNRYASTPVGKALSDACMGTIASFLSKYQDIIIEHQKVVKGNQKRLESLRELAGKENLEYPSVTLPPQPHTKEGLDAYNEVIARVRMWVNLNLWQKLKLSRDDAKPLLRLKGFPSFPLVERQANEVDWWDMVCNVKKLINEKKEDGKVFWQNLAGYKRQEALRPYLSSEEDRKKGKKFARYQLGDLLLHLEKKHGEDWGKVYDEAWERIDKKVEGLSKHIKLEEERRSEDAQSKAALTDWLRAKASFVIEGSKEADKDEFCRCELKLQKWYGDLRGKPFAIEAENSILDISGFSKQYNCAFIWQKDGVKKLNLYLIINYFKGGKLRFKKIKPEAFEANRFYTVINKKSGEIVPMEVNFNFDDPNLIILPLAFGKRQGREFIWNDLLSLETGSLKLANGRVIEKTLYNRRTRQDEPALFVALTFERREVLDSSNIKPMNLIGVDRGENIPAVIALTDPEGCPLSRFKDSLGNPTHILRIGESYKEKQRTIQAKKEVEQRRAGGYSRKYASKAKNLADDMVRNTARDLLYYAVTQDAMLIFENLSRGFGRQGKRTFMAERQYTRMEDWLTAKLAYEGLPSKTYLSKTLAQYTSKTCSNCGFTITSADYDRVLEKLKKTATGWMTTINGKELKVEGQITYYNRYKRQNVVKDLSVELDRLSEESVNNDISSWTKGRSGEALSLLKKRFSHRPVQEKFVCLNCGFETHADEQAALNIARSWLFLRSQEYKKYQTNKTTGNTDKRAFVETWQSFYRKKLKEVWKPAV

SEQ ID NO: 43652 - protein, 978 aa, synthetic construct
  REGION 1..978: note = engineered CasX variant
QEIKRINKIRRRLVKDSNTKKAGKTGPMKTLLVRVMTPDLRERLENLRKKPENIPQPISNTSRANLNKLLTDYTEMKKAILHVYWEEFQKDPVGLMSRVAQPASKKIDQNKLKPEMDEKGNLTTAGFACSQCGQPLFVYKLEQVSEKGKAYTNYFGRCNVAEHEKLILLAQLKPEKDSDEAVTYSLGKFGQRALDFYSIHVTKESTHPVKPLAQIAGNRYASAPVGKALSDACMGTIASFLSKYQDIIIEHQKVVKGNQKRLESLRELAGKENLEYPSVTLPPQPHTKEGLDAYNEVIARVRMWVNLNLWQKLKLSRDDAKPLLRLKGFPSFPLVERQANEVDWWDMVCNVKKLINEKKEDGKVFWQNLAGYKRQEALRPYLSSEEDRKKGKKFARYQLGDLLLHLEKKHGEDWGKVYDEAWERIDKKVEGLSKHIKLEEERRSEDAQSKAALTDWLRAKASFVIEGSKEADKDEFCRCELKLQKWYGDLRGKPFAIEAENSILDISGFSKQYNCAFIWQKDGVKKLNLYLIINYFKGGKLRFKKIKPEAFEANRFYTVINKKSGEIVPMEVNFNFDDPNLIILPLAFGKRQGREFIWNDLLSLETGSLKLANGRVIEKTLYNRRTRQDEPALFVALTFERREVLDSSNIKPMNLIGVDRGENIPAVIALTDPEGCPLSRFKDSLGNPTHILRIGESYKEKQRTIQAKKEVEQRRAGGYSRKYASKAKNLADDMVRNTARDLLYYAVTQDAMLIFENLSRGFGRQGKRTFMAERQYTRMEDWLTAKLAYEGLPSKTYLSKTLAQYTSKTCSNCGFTITSADYDRVLEKLKKTATGWMTTINGKELKVEGQITYYNRYKRQNVVKDLSVELDRLSEESVNNDISSWTKGRSGEALSLLKKRFSHRPVQEKFVCLNCGFETHADEQAALNIARSWLFLRSQEYKKYQTNKTTGNTDKRAFVETWQSFYRKKLKEVWKPAV

SEQ ID NO: 43653 - protein, 978 aa, synthetic construct
  REGION 1..978: note = engineered CasX variant
QEIKRINKIRRRLVKDSNTKKAGKTGPMKTLLVRVMTPDLRERLENLRKKPENIPQPISNTSRANLNKLLTDYTEMKKAILHVYWEEFQKDPVGLMSRVAQPASKKIDQNKLKPEMDEKGNLTTAGFACSQCGQPLFVYKLEQVSEKGKAYTNYFGRCNVAEHEKLILLAQLKPEKDSDEAVTYSLGKFGQRALDFYSIHVTKESTHPVKPLAQIAGNRYASVPVGKALSDACMGTIASFLSKYQDIIIEHQKVVKGNQKRLESLRELAGKENLEYPSVTLPPQPHTKEGLDAYNEVIARVRMWVNLNLWQKLKLSRDDAKPLLRLKGFPSFPLVERQANEVDWWDMVCNVKKLINEKKEDGKVFWQNLAGYKRQEALRPYLSSEEDRKKGKKFARYQLGDLLLHLEKKHGEDWGKVYDEAWERIDKKVEGLSKHIKLEEERRSEDAQSKAALTDWLRAKASFVIEGSKEADKDEFCRCELKLQKWYGDLRGKPFAIEAENSILDISGFSKQYNCAFIWQKDGVKKLNLYLIINYFKGGKLRFKKIKPEAFEANRFYTVINKKSGEIVPMEVNFNFDDPNLIILPLAFGKRQGREFIWNDLLSLETGSLKLANGRVIEKTLYNRRTRQDEPALFVALTFERREVLDSSNIKPMNLIGVDRGENIPAVIALTDPEGCPLSRFKDSLGNPTHILRIGESYKEKQRTIQAKKEVEQRRAGGYSRKYASKAKNLADDMVRNTARDLLYYAVTQDAMLIFENLSRGFGRQGKRTFMAERQYTRMEDWLTAKLAYEGLPSKTYLSKTLAQYTSKTCSNCGFTITSADYDRVLEKLKKTATGWMTTINGKELKVEGQITYYNRYKRQNVVKDLSVELDRLSEESVNNDISSWTKGRSGEALSLLKKRFSHRPVQEKFVCLNCGFETHADEQAALNIARSWLFLRSQEYKKYQTNKTTGNTDKRAFVETWQSFYRKKLKEVWKPAV

SEQ ID NO: 43654 - protein, 978 aa, synthetic construct
  REGION 1..978: note = engineered CasX variant
QEIKRINKIRRRLVKDSNTKKAGKTGPMKTLLVRVMTPDLRERLENLRKKPENIPQPISNTSRANLNKLLTDYTEMKKAILHVYWEEFQKDPVGLMSRVAQPASKKIDQNKLKPEMDEKGNLTTAGFACSQCGQPLFVYKLEQVSEKGKAYTNYFGRCNVAEHEKLIKLAQLKPEKDSDEAVTYSLGKFGQRALDFYSIHVTKESTHPVKPLAQIAGNRYASGPVGKALSDACMGTIASFLSKYQDIIIEHQKVVKGNQKRLESLRELAGKENLEYPSVTLPPQPHTKEGLDAYNEVIARVRMWVNLNLWQKLKLSRDDAKPLLRLKGFPSFPLVERQANEVDWWDMVCNVKKLINEKKEDGKVFWQNLAGYKRQEALRPYLSSEEDRKKGKKFARYQLGDLLLHLEKKHGEDWGKVYDEAWERIDKKVEGLSKHIKLEEERRSEDAQSKAALTDWLRAKASFVIEGSKEADKDEFCRCELKLQKWYGDLRGKPFAIEAENSILDISGFSKQYNCAFIWQKDGVKKLNLYLIINYFKGGKLRFKKIKPEAFEANRFYTVINKKSGEIVPMEVNFNFDDPNLIILPLAFGKRQGREFIWNDLLSLETGSLKLANGRVIEKTLYNRRTRQDEPALFVALTFERREVLDSSNIKPMNLIGVDRGENIPAVIALTDPEGCPLSRFKDSLGNPTHILRIGESYKEKQRTIQAKKEVEQRRAGGYSRKYASKAKNLADDMVRNTARDLLYYAVTQDAMLIFENLSRGFGRQGKRTFMAERQYTRMEDWLTAKLAYEGLPSKTYLSKTLAQYTSKTCSNCGFTITSADYDRVLEKLKKTATGWMTTINGKELKVEGQITYYNRYKRQNVVKDLSVELDRLSEESVNNDISSWTKGRSGEALSLLKKRFSHRPVQEKFVCLNCGFETHADEQAALNIARSWLFLRSQEYKKYQTNKTTGNTDKRAFVETWQSFYRKKLKEVWKPAV

SEQ ID NO: 43655 - protein, 977 aa, synthetic construct
  REGION 1..977: note = engineered CasX variant
QEIKRINKIRRRLVKDSNTKKAGKTGPMKTLLVRVMTPDLRERLENLRKKPENIPQPISNTSRANLNKLLTDYTEMKKAILHVYWEEFQKDPVGLMSRVAQPASKKIDQNKLKPEMDEKGNLTTAGFACSQCGQPLFVYKLEQVSEKGKAYTNYFGRCNVAEHEKLILLAQLKPEKDSDEAVTYSLGKFGQRALDFYSIHVTKESTHPVKPLAQIAGNRYASPVGKALSDACMGTIASFLSKYQDIIIEHQKVVKGNQKRLESLRELAGKENLEYPSVTLPPQPHTKEGLDAYNEVIARVRMWVNLNLWQKLKLSRDDAKPLLRLKGFPSFPLVERQANEVDWWDMVCNVKKLINEKKEDGKVFWQNLAGYKRQEALRPYLSSEEDRKKGKKFARYQLGDLLLHLEKKHGEDWGKVYDEAWERIDKKVEGLSKHIKLEEERRSEDAQSKAALTDWLRAKASFVIEGSKEADKDEFCRCELKLQKWYGDLRGKPFAIEAENSILDISGFSKQYNCAFIWQKDGVKKLNLYLIINYFKGGKLRFKKIKPEAFEANRFYTVINKKSGEIVPMEVNFNFDDPNLIILPLAFGKRQGREFIWNDLLSLETGSLKLANGRVIEKTLYNRRTRQDEPALFVALTFERREVLDSSNIKPMNLIGVDRGENIPAVIALTDPEGCPLSRFKDSLGNPTHILRIGESYKEKQRTIQAKKEVEQRRAGGYSRKYASKAKNLADDMVRNTARDLLYYAVTQDAMLIFENLSRGFGRQGKRTFMAERQYTRMEDWLTAKLAYEGLPSKTYLSKTLAQYTSKTCSNCGFTITSADYDRVLEKLKKTATGWMTTINGKELKVEGQITYYNRYKRQNVVKDLSVELDRLSEESVNNDISSWTKGRSGEALSLLKKRFSHRPVQEKFVCLNCGFETHADEQAALNIARSWLFLRSQEYKKYQTNKTTGNTDKRAFVETWQSFYRKKLKEVWKPAV

SEQ ID NO: 43656 - protein, 979 aa, synthetic construct
  REGION 1..979: note = engineered CasX variant
QEIKRINKIRRRLVKDSNTKKAGKTGPMKTLLVRVMTPDLRERLENLRKKPENIPQPISNTSRANLNKLLTDYTEMKKAILHVYWEEFQKDPVGLMSRVAQPASKKIDQNKLKPEMDEKGNLTTAGFACSQCGQPLFVYKLEQVSEKGKAYTNYFGRCNVAEHEKLILLAQLKPEKDSDEAVTYSLGKFGQRALDFYSIHVTKESTHPVKPLAQIAGNRYASYPVGKALSDACMGTIASFLSKYQDIIIEHQKVVKGNQKRLESLRELAGKENLEYPSVTLPPQPHTKEGLDAYNEVIARVRMWVNLNLWQKLKLSRDDAKPLLRLKGFPSFPLVERQANEVDWWDMVCNVKKLINEKKEDGKVFWQNLAGYKRQEALRPYLSSEEDRKKGKKFARYQLGDLLLHLEKKHGEDWGKVYDEAWERIDKKVEGLSKHIKLEEERRSEDAQSKAALTDWLRAKASFVIEGLKEADDKDEFCRCELKLQKWYGDLRGKPFAIEAENSILDISGFSKQYNCAFIWQKDGVKKLNLYLIINYFKGGKLRFKKIKPEAFEANRFYTVINKKSGEIVPMEVNFNFDDPNLIILPLAFGKRQGREFIWNDLLSLETGSLKLANGRVIEKTLYNRRTRQDEPALFVALTFERREVLDSSNIKPMNLIGVDRGENIPAVIALTDPEGCPLSRFKDSLGNPTHILRIGESYKEKQRTIQAKKEVEQRRAGGYSRKYASKAKNLADDMVRNTARDLLYYAVTQDAMLIFENLSRGFGRQGKRTFMAERQYTRMEDWLTAKLAYEGLPSKTYLSKTLAQYTSKTCSNCGFTITSADYDRVLEKLKKTATGWMTTINGKELKVEGQITYYNRYKRQNVVKDLSVELDRLSEESVNNDISSWTKGRSGEALSLLKKRFSHRPVQEKFVCLNCGFETHADEQAALNIARSWLFLRSQEYKKYQTNKTTGNTDKRAFVETWQSFYRKKLKEVWKPAV

SEQ ID NO: 43657 - protein, 979 aa, synthetic construct
  REGION 1..979: note = engineered CasX variant
QEIKRINKIRRRLVKDSNTKKAGKTGPMKTLLVRVMTPDLRERLENLRKKPENIPQPISNTSRANLNKLLTDYTEMKKAILHVYWEEFQKDPVGLMSRVAQPASKKIDQNKLKPEMDEKGNLTTAGFACSQCGQPLFVYKLEQVSEKGKAYTNYFGRCNVAEHEKLILLAQLKPEKDSDEAVTYSLGKFGQRALDFYSIHVTKESTHPVKPLAQIAGNRYASHPVGKALSDACMGTIASFLSKYQDIIIEHQKVVKGNQKRLESLRELAGKENLEYPSVTLPPQPHTKEGLDAYNEVIARVRMWVNLNLWQKLKLSRDDAKPLLRLKGFPSFPLVERQANEVDWWDMVCNVKKLINEKKEDGKVFWQNLAGYKRQEALRPYLSSEEDRKKGKKFARYQLGDLLLHLEKKHGEDWGKVYDEAWERIDKKVEGLSKHIKLEEERRSEDAQSKAALTDWLRAKASFVIEGLKEADDKDEFCRCELKLQKWYGDLRGKPFAIEAENSILDISGFSKQYNCAFIWQKDGVKKLNLYLIINYFKGGKLRFKKIKPEAFEANRFYTVINKKSGEIVPMEVNFNFDDPNLIILPLAFGKRQGREFIWNDLLSLETGSLKLANGRVIEKTLYNRRTRQDEPALFVALTFERREVLDSSNIKPMNLIGVDRGENIPAVIALTDPEGCPLSRFKDSLGNPTHILRIGESYKEKQRTIQAKKEVEQRRAGGYSRKYASKAKNLADDMVRNTARDLLYYAVTQDAMLIFENLSRGFGRQGKRTFMAERQYTRMEDWLTAKLAYEGLPSKTYLSKTLAQYTSKTCSNCGFTITSADYDRVLEKLKKTATGWMTTINGKELKVEGQITYYNRYKRQNVVKDLSVELDRLSEESVNNDISSWTKGRSGEALSLLKKRFSHRPVQEKFVCLNCGFETHADEQAALNIARSWLFLRSQEYKKYQTNKTTGNTDKRAFVETWQSFYRKKLKEVWKPAV

SEQ ID NO: 43658 - protein, 979 aa, synthetic construct
  REGION 1..979: note = engineered CasX variant
QEIKRINKIRRRLVKDSNTKKAGKTGPMKTLLVRVMTPDLRERLENLRKKPENIPQPISNTSRANLNKLLTDYTEMKKAILHVYWEEFQKDPVGLMSRVAQPASKKIDQNKLKPEMDEKGNLTTAGFACSQCGQPLFVYKLEQVSEKGKAYTNYFGRCNVAEHEKLILLAQLKPEKDSDEAVTYSLGKFGQRALDFYSIHVTKESTHPVKPLAQIAGNRYASSPVGKALSDACMGTIASFLSKYQDIIIEHQKVVKGNQKRLESLRELAGKENLEYPSVTLPPQPHTKEGLDAYNEVIARVRMWVNLNLWQKLKLSRDDAKPLLRLKGFPSFPLVERQANEVDWWDMVCNVKKLINEKKEDGKVFWQNLAGYKRQEALRPYLSSEEDRKKGKKFARYQLGDLLLHLEKKHGEDWGKVYDEAWERIDKKVEGLSKHIKLEEERRSEDAQSKAALTDWLRAKASFVIEGLKEADDKDEFCRCELKLQKWYGDLRGKPFAIEAENSILDISGFSKQYNCAFIWQKDGVKKLNLYLIINYFKGGKLRFKKIKPEAFEANRFYTVINKKSGEIVPMEVNFNFDDPNLIILPLAFGKRQGREFIWNDLLSLETGSLKLANGRVIEKTLYNRRTRQDEPALFVALTFERREVLDSSNIKPMNLIGVDRGENIPAVIALTDPEGCPLSRFKDSLGNPTHILRIGESYKEKQRTIQAKKEVEQRRAGGYSRKYASKAKNLADDMVRNTARDLLYYAVTQDAMLIFENLSRGFGRQGKRTFMAERQYTRMEDWLTAKLAYEGLPSKTYLSKTLAQYTSKTCSNCGFTITSADYDRVLEKLKKTATGWMTTINGKELKVEGQITYYNRYKRQNVVKDLSVELDRLSEESVNNDISSWTKGRSGEALSLLKKRFSHRPVQEKFVCLNCGFETHADEQAALNIARSWLFLRSQEYKKYQTNKTTGNTDKRAFVETWQSFYRKKLKEVWKPAV

SEQ ID NO: 43659 - protein, 979 aa, synthetic construct
  REGION 1..979: note = engineered CasX variant
QEIKRINKIRRRLVKDSNTKKAGKTGPMKTLLVRVMTPDLRERLENLRKKPENIPQPISNTSRANLNKLLTDYTEMKKAILHVYWEEFQKDPVGLMSRVAQPASKKIDQNKLKPEMDEKGNLTTAGFACSQCGQPLFVYKLEQVSEKGKAYTNYFGRCNVAEHEKLILLAQLKPEKDSDEAVTYSLGKFGQRALDFYSIHVTKESTHPVKPLAQIAGNRYASTPVGKALSDACMGTIASFLSKYQDIIIEHQKVVKGNQKRLESLRELAGKENLEYPSVTLPPQPHTKEGLDAYNEVIARVRMWVNLNLWQKLKLSRDDAKPLLRLKGFPSFPLVERQANEVDWWDMVCNVKKLINEKKEDGKVFWQNLAGYKRQEALRPYLSSEEDRKKGKKFARYQLGDLLLHLEKKHGEDWGKVYDEAWERIDKKVEGLSKHIKLEEERRSEDAQSKAALTDWLRAKASFVIEGLKEADDKDEFCRCELKLQKWYGDLRGKPFAIEAENSILDISGFSKQYNCAFIWQKDGVKKLNLYLIINYFKGGKLRFKKIKPEAFEANRFYTVINKKSGEIVPMEVNFNFDDPNLIILPLAFGKRQGREFIWNDLLSLETGSLKLANGRVIEKTLYNRRTRQDEPALFVALTFERREVLDSSNIKPMNLIGVDRGENIPAVIALTDPEGCPLSRFKDSLGNPTHILRIGESYKEKQRTIQAKKEVEQRRAGGYSRKYASKAKNLADDMVRNTARDLLYYAVTQDAMLIFENLSRGFGRQGKRTFMAERQYTRMEDWLTAKLAYEGLPSKTYLSKTLAQYTSKTCSNCGFTITSADYDRVLEKLKKTATGWMTTINGKELKVEGQITYYNRYKRQNVVKDLSVELDRLSEESVNNDISSWTKGRSGEALSLLKKRFSHRPVQEKFVCLNCGFETHADEQAALNIARSWLFLRSQEYKKYQTNKTTGNTDKRAFVETWQSFYRKKLKEVWKPAV

SEQ ID NO: 43660 - protein, 979 aa, synthetic construct
  REGION 1..979: note = engineered CasX variant
QEIKRINKIRRRLVKDSNTKKAGKTGPMKTLLVRVMTPDLRERLENLRKKPENIPQPISNTSRANLNKLLTDYTEMKKAILHVYWEEFQKDPVGLMSRVAQPASKKIDQNKLKPEMDEKGNLTTAGFACSQCGQPLFVYKLEQVSEKGKAYTNYFGRCNVAEHEKLILLAQLKPEKDSDEAVTYSLGKFGQRALDFYSIHVTKESTHPVKPLAQIAGNRYASAPVGKALSDACMGTIASFLSKYQDIIIEHQKVVKGNQKRLESLRELAGKENLEYPSVTLPPQPHTKEGLDAYNEVIARVRMWVNLNLWQKLKLSRDDAKPLLRLKGFPSFPLVERQANEVDWWDMVCNVKKLINEKKEDGKVFWQNLAGYKRQEALRPYLSSEEDRKKGKKFARYQLGDLLLHLEKKHGEDWGKVYDEAWERIDKKVEGLSKHIKLEEERRSEDAQSKAALTDWLRAKASFVIEGLKEADDKDEFCRCELKLQKWYGDLRGKPFAIEAENSILDISGFSKQYNCAFIWQKDGVKKLNLYLIINYFKGGKLRFKKIKPEAFEANRFYTVINKKSGEIVPMEVNFNFDDPNLIILPLAFGKRQGREFIWNDLLSLETGSLKLANGRVIEKTLYNRRTRQDEPALFVALTFERREVLDSSNIKPMNLIGVDRGENIPAVIALTDPEGCPLSRFKDSLGNPTHILRIGESYKEKQRTIQAKKEVEQRRAGGYSRKYASKAKNLADDMVRNTARDLLYYAVTQDAMLIFENLSRGFGRQGKRTFMAERQYTRMEDWLTAKLAYEGLPSKTYLSKTLAQYTSKTCSNCGFTITSADYDRVLEKLKKTATGWMTTINGKELKVEGQITYYNRYKRQNVVKDLSVELDRLSEESVNNDISSWTKGRSGEALSLLKKRFSHRPVQEKFVCLNCGFETHADEQAALNIARSWLFLRSQEYKKYQTNKTTGNTDKRAFVETWQSFYRKKLKEVWKPAV

SEQ ID NO: 43661 - protein, 979 aa, synthetic construct
  REGION 1..979: note = engineered CasX variant
QEIKRINKIRRRLVKDSNTKKAGKTGPMKTLLVRVMTPDLRERLENLRKKPENIPQPISNTSRANLNKLLTDYTEMKKAILHVYWEEFQKDPVGLMSRVAQPASKKIDQNKLKPEMDEKGNLTTAGFACSQCGQPLFVYKLEQVSEKGKAYTNYFGRCNVAEHEKLILLAQLKPEKDSDEAVTYSLGKFGQRALDFYSIHVTKESTHPVKPLAQIAGNRYASVPVGKALSDACMGTIASFLSKYQDIIIEHQKVVKGNQKRLESLRELAGKENLEYPSVTLPPQPHTKEGLDAYNEVIARVRMWVNLNLWQKLKLSRDDAKPLLRLKGFPSFPLVERQANEVDWWDMVCNVKKLINEKKEDGKVFWQNLAGYKRQEALRPYLSSEEDRKKGKKFARYQLGDLLLHLEKKHGEDWGKVYDEAWERIDKKVEGLSKHIKLEEERRSEDAQSKAALTDWLRAKASFVIEGLKEADDKDEFCRCELKLQKWYGDLRGKPFAIEAENSILDISGFSKQYNCAFIWQKDGVKKLNLYLIINYFKGGKLRFKKIKPEAFEANRFYTVINKKSGEIVPMEVNFNFDDPNLIILPLAFGKRQGREFIWNDLLSLETGSLKLANGRVIEKTLYNRRTRQDEPALFVALTFERREVLDSSNIKPMNLIGVDRGENIPAVIALTDPEGCPLSRFKDSLGNPTHILRIGESYKEKQRTIQAKKEVEQRRAGGYSRKYASKAKNLADDMVRNTARDLLYYAVTQDAMLIFENLSRGFGRQGKRTFMAERQYTRMEDWLTAKLAYEGLPSKTYLSKTLAQYTSKTCSNCGFTITSADYDRVLEKLKKTATGWMTTINGKELKVEGQITYYNRYKRQNVVKDLSVELDRLSEESVNNDISSWTKGRSGEALSLLKKRFSHRPVQEKFVCLNCGFETHADEQAALNIARSWLFLRSQEYKKYQTNKTTGNTDKRAFVETWQSFYRKKLKEVWKPAV

SEQ ID NO: 43662 - protein, 979 aa, synthetic construct
  REGION 1..979: note = engineered CasX variant
QEIKRINKIRRRLVKDSNTKKAGKTGPMKTLLVRVMTPDLRERLENLRKKPENIPQPISNTSRANLNKLLTDYTEMKKAILHVYWEEFQKDPVGLMSRVAQPASKKIDQNKLKPEMDEKGNLTTAGFACSQCGQPLFVYKLEQVSEKGKAYTNYFGRCNVAEHEKLIKLAQLKPEKDSDEAVTYSLGKFGQRALDFYSIHVTKESTHPVKPLAQIAGNRYASGPVGKALSDACMGTIASFLSKYQDIIIEHQKVVKGNQKRLESLRELAGKENLEYPSVTLPPQPHTKEGLDAYNEVIARVRMWVNLNLWQKLKLSRDDAKPLLRLKGFPSFPLVERQANEVDWWDMVCNVKKLINEKKEDGKVFWQNLAGYKRQEALRPYLSSEEDRKKGKKFARYQLGDLLLHLEKKHGEDWGKVYDEAWERIDKKVEGLSKHIKLEEERRSEDAQSKAALTDWLRAKASFVIEGLKEADDKDEFCRCELKLQKWYGDLRGKPFAIEAENSILDISGFSKQYNCAFIWQKDGVKKLNLYLIINYFKGGKLRFKKIKPEAFEANRFYTVINKKSGEIVPMEVNFNFDDPNLIILPLAFGKRQGREFIWNDLLSLETGSLKLANGRVIEKTLYNRRTRQDEPALFVALTFERREVLDSSNIKPMNLIGVDRGENIPAVIALTDPEGCPLSRFKDSLGNPTHILRIGESYKEKQRTIQAKKEVEQRRAGGYSRKYASKAKNLADDMVRNTARDLLYYAVTQDAMLIFENLSRGFGRQGKRTFMAERQYTRMEDWLTAKLAYEGLPSKTYLSKTLAQYTSKTCSNCGFTITSADYDRVLEKLKKTATGWMTTINGKELKVEGQITYYNRYKRQNVVKDLSVELDRLSEESVNNDISSWTKGRSGEALSLLKKRFSHRPVQEKFVCLNCGFETHADEQAALNIARSWLFLRSQEYKKYQTNKTTGNTDKRAFVETWQSFYRKKLKEVWKPAV

SEQ ID NO: 43663 - protein, 978 aa, synthetic construct
  REGION 1..978: note = engineered CasX variant
QEIKRINKIRRRLVKDSNTKKAGKTGPMKTLLVRVMTPDLRERLENLRKKPENIPQPISNTSRANLNKLLTDYTEMKKAILHVYWEEFQKDPVGLMSRVAQPASKKIDQNKLKPEMDEKGNLTTAGFACSQCGQPLFVYKLEQVSEKGKAYTNYFGRCNVAEHEKLILLAQLKPEKDSDEAVTYSLGKFGQRALDFYSIHVTKESTHPVKPLAQIAGNRYASPVGKALSDACMGTIASFLSKYQDIIIEHQKVVKGNQKRLESLRELAGKENLEYPSVTLPPQPHTKEGLDAYNEVIARVRMWVNLNLWQKLKLSRDDAKPLLRLKGFPSFPLVERQANEVDWWDMVCNVKKLINEKKEDGKVFWQNLAGYKRQEALRPYLSSEEDRKKGKKFARYQLGDLLLHLEKKHGEDWGKVYDEAWERIDKKVEGLSKHIKLEEERRSEDAQSKAALTDWLRAKASFVIEGLKEADDKDEFCRCELKLQKWYGDLRGKPFAIEAENSILDISGFSKQYNCAFIWQKDGVKKLNLYLIINYFKGGKLRFKKIKPEAFEANRFYTVINKKSGEIVPMEVNFNFDDPNLIILPLAFGKRQGREFIWNDLLSLETGSLKLANGRVIEKTLYNRRTRQDEPALFVALTFERREVLDSSNIKPMNLIGVDRGENIPAVIALTDPEGCPLSRFKDSLGNPTHILRIGESYKEKQRTIQAKKEVEQRRAGGYSRKYASKAKNLADDMVRNTARDLLYYAVTQDAMLIFENLSRGFGRQGKRTFMAERQYTRMEDWLTAKLAYEGLPSKTYLSKTLAQYTSKTCSNCGFTITSADYDRVLEKLKKTATGWMTTINGKELKVEGQITYYNRYKRQNVVKDLSVELDRLSEESVNNDISSWTKGRSGEALSLLKKRFSHRPVQEKFVCLNCGFETHADEQAALNIARSWLFLRSQEYKKYQTNKTTGNTDKRAFVETWQSFYRKKLKEVWKPAV

SEQ ID NO: 43664 - protein, 979 aa, synthetic construct
  REGION 1..979: note = engineered CasX variant
QEIKRINKIRRRLVKDSNTKKAGKTGPMKTLLVRVMTPDLRERLENLRKKPENIPQPISNTSRANLNKLLTDYTEMKKAILHVYWEEFQKDPVGLMSRVAQPASKKIDQNKLKPEMDEKGNLTTAGFACSQCGQPLFVYKLEQVSEKGKAYTNYFGRCNVAEHEKLILLAQLKPEKDSDEAVTYSLGKFGQRALDFYSIHVTKESTHPVKPLAQIAGNRYASYPVGKALSDACMGTIASFLSKYQDIIIEHQKVVKGNQKRLESLRELAGKENLEYPSVTLPPQPHTKEGLDAYNEVIARVRMWVNLNLWQKLKLSRDDAKPLLRLKGFPSFPLVERQANEVDWWDMVCNVKKLINEKKEDGKVFWQNLAGYKRQEALRPYLSSEEDRKKGKKFARYQLGDLLLHLEKKHGEDWGKVYDEAWERIDKKVEGLSKHIKLEEERRSEDAQSKAALTDWLRAKASFVIEGLKEADKDEFCRCELKLQKWYGDLRGKPFAIEAENSILDISGFSKQYNCAFIWQKDGVKKLNLYLIINYFKGGKLRFKKIKPEAFEANRFYTVINKKSGEIVPMEVNFNFDDPNLIILPLAFGKRQGREFIWNDLLSLETGSLKLANGRVIEKTLYNRRTRQDEPALFVALTFERREVLDSSNIKPMNLIGVDRGENIPAVIALTDPEGCPLSRFKDSLGNPTHILRIGESYKEKQRTIQAKKEVEQRRAGGYSRKYASKAKNLADDMVRNTARDLLYYAVTQDAMLIFENLSRGFGRQGKRTFMAERQYTRMEDWLTAKLAYEGLPSKTYLSKTLAQYTSKTCSNCGFTITSADYDRVLEKLKKTATGWMTTINGKELKVEGQITYYNRYKRQNVVKDLSVELDRLSEESVNNDISSWTKGRSGNEALSLLKKRFSHRPVQEKFVCLNCGFETHADEQAALNIARSWLFLRSQEYKKYQTNKTTGNTDKRAFVETWQSFYRKKLKEVWKPAV

SEQ ID NO: 43665 - protein, 979 aa, synthetic construct
  REGION 1..979: note = engineered CasX variant
QEIKRINKIRRRLVKDSNTKKAGKTGPMKTLLVRVMTPDLRERLENLRKKPENIPQPISNTSRANLNKLLTDYTEMKKAILHVYWEEFQKDPVGLMSRVAQPASKKIDQNKLKPEMDEKGNLTTAGFACSQCGQPLFVYKLEQVSEKGKAYTNYFGRCNVAEHEKLILLAQLKPEKDSDEAVTYSLGKFGQRALDFYSIHVTKESTHPVKPLAQIAGNRYASHPVGKALSDACMGTIASFLSKYQDIIIEHQKVVKGNQKRLESLRELAGKENLEYPSVTLPPQPHTKEGLDAYNEVIARVRMWVNLNLWQKLKLSRDDAKPLLRLKGFPSFPLVERQANEVDWWDMVCNVKKLINEKKEDGKVFWQNLAGYKRQEALRPYLSSEEDRKKGKKFARYQLGDLLLHLEKKHGEDWGKVYDEAWERIDKKVEGLSKHIKLEEERRSEDAQSKAALTDWLRAKASFVIEGLKEADKDEFCRCELKLQKWYGDLRGKPFAIEAENSILDISGFSKQYNCAFIWQKDGVKKLNLYLIINYFKGGKLRFKKIKPEAFEANRFYTVINKKSGEIVPMEVNFNFDDPNLIILPLAFGKRQGREFIWNDLLSLETGSLKLANGRVIEKTLYNRRTRQDEPALFVALTFERREVLDSSNIKPMNLIGVDRGENIPAVIALTDPEGCPLSRFKDSLGNPTHILRIGESYKEKQRTIQAKKEVEQRRAGGYSRKYASKAKNLADDMVRNTARDLLYYAVTQDAMLIFENLSRGFGRQGKRTFMAERQYTRMEDWLTAKLAYEGLPSKTYLSKTLAQYTSKTCSNCGFTITSADYDRVLEKLKKTATGWMTTINGKELKVEGQITYYNRYKRQNVVKDLSVELDRLSEESVNNDISSWTKGRSGNEALSLLKKRFSHRPVQEKFVCLNCGFETHADEQAALNIARSWLFLRSQEYKKYQTNKTTGNTDKRAFVETWQSFYRKKLKEVWKPAV

SEQ ID NO: 43666 - protein, 979 aa, synthetic construct
  REGION 1..979: note = engineered CasX variant
QEIKRINKIRRRLVKDSNTKKAGKTGPMKTLLVRVMTPDLRERLENLRKKPENIPQPISNTSRANLNKLLTDYTEMKKAILHVYWEEFQKDPVGLMSRVAQPASKKIDQNKLKPEMDEKGNLTTAGFACSQCGQPLFVYKLEQVSEKGKAYTNYFGRCNVAEHEKLILLAQLKPEKDSDEAVTYSLGKFGQRALDFYSIHVTKESTHPVKPLAQIAGNRYASSPVGKALSDACMGTIASFLSKYQDIIIEHQKVVKGNQKRLESLRELAGKENLEYPSVTLPPQPHTKEGLDAYNEVIARVRMWVNLNLWQKLKLSRDDAKPLLRLKGFPSFPLVERQANEVDWWDMVCNVKKLINEKKEDGKVFWQNLAGYKRQEALRPYLSSEEDRKKGKKFARYQLGDLLLHLEKKHGEDWGKVYDEAWERIDKKVEGLSKHIKLEEERRSEDAQSKAALTDWLRAKASFVIEGLKEADKDEFCRCELKLQKWYGDLRGKPFAIEAENSILDISGFSKQYNCAFIWQKDGVKKLNLYLIINYFKGGKLRFKKIKPEAFEANRFYTVINKKSGEIVPMEVNFNFDDPNLIILPLAFGKRQGREFIWNDLLSLETGSLKLANGRVIEKTLYNRRTRQDEPALFVALTFERREVLDSSNIKPMNLIGVDRGENIPAVIALTDPEGCPLSRFKDSLGNPTHILRIGESYKEKQRTIQAKKEVEQRRAGGYSRKYASKAKNLADDMVRNTARDLLYYAVTQDAMLIFENLSRGFGRQGKRTFMAERQYTRMEDWLTAKLAYEGLPSKTYLSKTLAQYTSKTCSNCGFTITSADYDRVLEKLKKTATGWMTTINGKELKVEGQITYYNRYKRQNVVKDLSVELDRLSEESVNNDISSWTKGRSGNEALSLLKKRFSHRPVQEKFVCLNCGFETHADEQAALNIARSWLFLRSQEYKKYQTNKTTGNTDKRAFVETWQSFYRKKLKEVWKPAV

SEQ ID NO: 43667 - protein, 979 aa, synthetic construct
  REGION 1..979: note = engineered CasX variant
QEIKRINKIRRRLVKDSNTKKAGKTGPMKTLLVRVMTPDLRERLENLRKKPENIPQPISNTSRANLNKLLTDYTEMKKAILHVYWEEFQKDPVGLMSRVAQPASKKIDQNKLKPEMDEKGNLTTAGFACSQCGQPLFVYKLEQVSEKGKAYTNYFGRCNVAEHEKLILLAQLKPEKDSDEAVTYSLGKFGQRALDFYSIHVTKESTHPVKPLAQIAGNRYASTPVGKALSDACMGTIASFLSKYQDIIIEHQKVVKGNQKRLESLRELAGKENLEYPSVTLPPQPHTKEGLDAYNEVIARVRMWVNLNLWQKLKLSRDDAKPLLRLKGFPSFPLVERQANEVDWWDMVCNVKKLINEKKEDGKVFWQNLAGYKRQEALRPYLSSEEDRKKGKKFARYQLGDLLLHLEKKHGEDWGKVYDEAWERIDKKVEGLSKHIKLEEERRSEDAQSKAALTDWLRAKASFVIEGLKEADKDEFCRCELKLQKWYGDLRGKPFAIEAENSILDISGFSKQYNCAFIWQKDGVKKLNLYLIINYFKGGKLRFKKIKPEAFEANRFYTVINKKSGEIVPMEVNFNFDDPNLIILPLAFGKRQGREFIWNDLLSLETGSLKLANGRVIEKTLYNRRTRQDEPALFVALTFERREVLDSSNIKPMNLIGVDRGENIPAVIALTDPEGCPLSRFKDSLGNPTHILRIGESYKEKQRTIQAKKEVEQRRAGGYSRKYASKAKNLADDMVRNTARDLLYYAVTQDAMLIFENLSRGFGRQGKRTFMAERQYTRMEDWLTAKLAYEGLPSKTYLSKTLAQYTSKTCSNCGFTITSADYDRVLEKLKKTATGWMTTINGKELKVEGQITYYNRYKRQNVVKDLSVELDRLSEESVNNDISSWTKGRSGNEALSLLKKRFSHRPVQEKFVCLNCGFETHADEQAALNIARSWLFLRSQEYKKYQTNKTTGNTDKRAFVETWQSFYRKKLKEVWKPAV

SEQ ID NO: 43668 - protein, 979 aa, synthetic construct
  REGION 1..979: note = engineered CasX variant
QEIKRINKIRRRLVKDSNTKKAGKTGPMKTLLVRVMTPDLRERLENLRKKPENIPQPISNTSRANLNKLLTDYTEMKKAILHVYWEEFQKDPVGLMSRVAQPASKKIDQNKLKPEMDEKGNLTTAGFACSQCGQPLFVYKLEQVSEKGKAYTNYFGRCNVAEHEKLILLAQLKPEKDSDEAVTYSLGKFGQRALDFYSIHVTKESTHPVKPLAQIAGNRYASAPVGKALSDACMGTIASFLSKYQDIIIEHQKVVKGNQKRLESLRELAGKENLEYPSVTLPPQPHTKEGLDAYNEVIARVRMWVNLNLWQKLKLSRDDAKPLLRLKGFPSFPLVERQANEVDWWDMVCNVKKLINEKKEDGKVFWQNLAGYKRQEALRPYLSSEEDRKKGKKFARYQLGDLLLHLEKKHGEDWGKVYDEAWERIDKKVEGLSKHIKLEEERRSEDAQSKAALTDWLRAKASFVIEGLKEADKDEFCRCELKLQKWYGDLRGKPFAIEAENSILDISGFSKQYNCAFIWQKDGVKKLNLYLIINYFKGGKLRFKKIKPEAFEANRFYTVINKKSGEIVPMEVNFNFDDPNLIILPLAFGKRQGREFIWNDLLSLETGSLKLANGRVIEKTLYNRRTRQDEPALFVALTFERREVLDSSNIKPMNLIGVDRGENIPAVIALTDPEGCPLSRFKDSLGNPTHILRIGESYKEKQRTIQAKKEVEQRRAGGYSRKYASKAKNLADDMVRNTARDLLYYAVTQDAMLIFENLSRGFGRQGKRTFMAERQYTRMEDWLTAKLAYEGLPSKTYLSKTLAQYTSKTCSNCGFTITSADYDRVLEKLKKTATGWMTTINGKELKVEGQITYYNRYKRQNVVKDLSVELDRLSEESVNNDISSWTKGRSGNEALSLLKKRFSHRPVQEKFVCLNCGFETHADEQAALNIARSWLFLRSQEYKKYQTNKTTGNTDKRAFVETWQSFYRKKLKEVWKPAV

SEQ ID NO: 43669 - protein, 979 aa, synthetic construct
  REGION 1..979: note = engineered CasX variant
QEIKRINKIRRRLVKDSNTKKAGKTGPMKTLLVRVMTPDLRERLENLRKKPENIPQPISNTSRANLNKLLTDYTEMKKAILHVYWEEFQKDPVGLMSRVAQPASKKIDQNKLKPEMDEKGNLTTAGFACSQCGQPLFVYKLEQVSEKGKAYTNYFGRCNVAEHEKLILLAQLKPEKDSDEAVTYSLGKFGQRALDFYSIHVTKESTHPVKPLAQIAGNRYASVPVGKALSDACMGTIASFLSKYQDIIIEHQKVVKGNQKRLESLRELAGKENLEYPSVTLPPQPHTKEGLDAYNEVIARVRMWVNLNLWQKLKLSRDDAKPLLRLKGFPSFPLVERQANEVDWWDMVCNVKKLINEKKEDGKVFWQNLAGYKRQEALRPYLSSEEDRKKGKKFARYQLGDLLLHLEKKHGEDWGKVYDEAWERIDKKVEGLSKHIKLEEERRSEDAQSKAALTDWLRAKASFVIEGLKEADKDEFCRCELKLQKWYGDLRGKPFAIEAENSILDISGFSKQYNCAFIWQKDGVKKLNLYLIINYFKGGKLRFKKIKPEAFEANRFYTVINKKSGEIVPMEVNFNFDDPNLIILPLAFGKRQGREFIWNDLLSLETGSLKLANGRVIEKTLYNRRTRQDEPALFVALTFERREVLDSSNIKPMNLIGVDRGENIPAVIALTDPEGCPLSRFKDSLGNPTHILRIGESYKEKQRTIQAKKEVEQRRAGGYSRKYASKAKNLADDMVRNTARDLLYYAVTQDAMLIFENLSRGFGRQGKRTFMAERQYTRMEDWLTAKLAYEGLPSKTYLSKTLAQYTSKTCSNCGFTITSADYDRVLEKLKKTATGWMTTINGKELKVEGQITYYNRYKRQNVVKDLSVELDRLSEESVNNDISSWTKGRSGNEALSLLKKRFSHRPVQEKFVCLNCGFETHADEQAALNIARSWLFLRSQEYKKYQTNKTTGNTDKRAFVETWQSFYRKKLKEVWKPAV

SEQ ID NO: 43670 - protein, 979 aa, synthetic construct
  REGION 1..979: note = engineered CasX variant
QEIKRINKIRRRLVKDSNTKKAGKTGPMKTLLVRVMTPDLRERLENLRKKPENIPQPISNTSRANLNKLLTDYTEMKKAILHVYWEEFQKDPVGLMSRVAQPASKKIDQNKLKPEMDEKGNLTTAGFACSQCGQPLFVYKLEQVSEKGKAYTNYFGRCNVAEHEKLIKLAQLKPEKDSDEAVTYSLGKFGQRALDFYSIHVTKESTHPVKPLAQIAGNRYASGPVGKALSDACMGTIASFLSKYQDIIIEHQKVVKGNQKRLESLRELAGKENLEYPSVTLPPQPHTKEGLDAYNEVIARVRMWVNLNLWQKLKLSRDDAKPLLRLKGFPSFPLVERQANEVDWWDMVCNVKKLINEKKEDGKVFWQNLAGYKRQEALRPYLSSEEDRKKGKKFARYQLGDLLLHLEKKHGEDWGKVYDEAWERIDKKVEGLSKHIKLEEERRSEDAQSKAALTDWLRAKASFVIEGLKEADKDEFCRCELKLQKWYGDLRGKPFAIEAENSILDISGFSKQYNCAFIWQKDGVKKLNLYLIINYFKGGKLRFKKIKPEAFEANRFYTVINKKSGEIVPMEVNFNFDDPNLIILPLAFGKRQGREFIWNDLLSLETGSLKLANGRVIEKTLYNRRTRQDEPALFVALTFERREVLDSSNIKPMNLIGVDRGENIPAVIALTDPEGCPLSRFKDSLGNPTHILRIGESYKEKQRTIQAKKEVEQRRAGGYSRKYASKAKNLADDMVRNTARDLLYYAVTQDAMLIFENLSRGFGRQGKRTFMAERQYTRMEDWLTAKLAYEGLPSKTYLSKTLAQYTSKTCSNCGFTITSADYDRVLEKLKKTATGWMTTINGKELKVEGQITYYNRYKRQNVVKDLSVELDRLSEESVNNDISSWTKGRSGNEALSLLKKRFSHRPVQEKFVCLNCGFETHADEQAALNIARSWLFLRSQEYKKYQTNKTTGNTDKRAFVETWQSFYRKKLKEVWKPAV

SEQ ID NO: 43671 - protein, 978 aa, synthetic construct
  REGION 1..978: note = engineered CasX variant
QEIKRINKIRRRLVKDSNTKKAGKTGPMKTLLVRVMTPDLRERLENLRKKPENIPQPISNTSRANLNKLLTDYTEMKKAILHVYWEEFQKDPVGLMSRVAQPASKKIDQNKLKPEMDEKGNLTTAGFACSQCGQPLFVYKLEQVSEKGKAYTNYFGRCNVAEHEKLILLAQLKPEKDSDEAVTYSLGKFGQRALDFYSIHVTKESTHPVKPLAQIAGNRYASPVGKALSDACMGTIASFLSKYQDIIIEHQKVVKGNQKRLESLRELAGKENLEYPSVTLPPQPHTKEGLDAYNEVIARVRMWVNLNLWQKLKLSRDDAKPLLRLKGFPSFPLVERQANEVDWWDMVCNVKKLINEKKEDGKVFWQNLAGYKRQEALRPYLSSEEDRKKGKKFARYQLGDLLLHLEKKHGEDWGKVYDEAWERIDKKVEGLSKHIKLEEERRSEDAQSKAALTDWLRAKASFVIEGLKEADKDEFCRCELKLQKWYGDLRGKPFAIEAENSILDISGFSKQYNCAFIWQKDGVKKLNLYLIINYFKGGKLRFKKIKPEAFEANRFYTVINKKSGEIVPMEVNFNFDDPNLIILPLAFGKRQGREFIWNDLLSLETGSLKLANGRVIEKTLYNRRTRQDEPALFVALTFERREVLDSSNIKPMNLIGVDRGENIPAVIALTDPEGCPLSRFKDSLGNPTHILRIGESYKEKQRTIQAKKEVEQRRAGGYSRKYASKAKNLADDMVRNTARDLLYYAVTQDAMLIFENLSRGFGRQGKRTFMAERQYTRMEDWLTAKLAYEGLPSKTYLSKTLAQYTSKTCSNCGFTITSADYDRVLEKLKKTATGWMTTINGKELKVEGQITYYNRYKRQNVVKDLSVELDRLSEESVNNDISSWTKGRSGNEALSLLKKRFSHRPVQEKFVCLNCGFETHADEQAALNIARSWLFLRSQEYKKYQTNKTTGNTDKRAFVETWQSFYRKKLKEVWKPAV

SEQ ID NO: 43672 - protein, 978 aa, synthetic construct
  REGION 1..978: note = engineered CasX variant
QEIKRINKIRRRLVKDSNTKKAGKTGPMKTLLVRVMTPDLRERLENLRKKPENIPQPISNTSRANLNKLLTDYTEMKKAILHVYWEEFQKDPVGLMSRVAQPASKKIDQNKLKPEMDEKGNLTTAGFACSQCGQPLFVYKLEQVSEKGKAYTNYFGRCNVAEHEKLILLAQLKPEKDSDEAVTYSLGKFGQRALDFYSIHVTKESTHPVKPLAQIAGNRYASYPVGKALSDACMGTIASFLSKYQDIIIEHQKVVKGNQKRLESLRELAGKENLEYPSVTLPPQPHTKEGLDAYNEVIARVRMWVNLNLWQKLKLSRDDAKPLLRLKGFPSFPLVERQANEVDWWDMVCNVKKLINEKKEDGKVFWQNLAGYKRQEALRPYLSSEEDRQKGKKFARYQLGDLLLHLEKKHGEDWGKVYDEAWERIDKKVEGLSKHIKLEEERRSEDAQSKAALTDWLRAKASFVIEGLKEADKDEFCRCELKLQKWYGDLRGKPFAIEAENSILDISGFSKQYNCAFIWQKDGVKKLNLYLIINYFKGGKLRFKKIKPEAFEANRFYTVINKKSGEIVPMEVNFNFDDPNLIILPLAFGKRQGREFIWNDLLSLETGSLKLANGRVIEKTLYNRRTRQDEPALFVALTFERREVLDSSNIKPMNLIGVDRGENIPAVIALTDPEGCPLSRFKDSLGNPTHILRIGESYKEKQRTIQAKKEVEQRRAGGYSRKYASKAKNLADDMVRNTARDLLYYAVTQDAMLIFENLSRGFGRQGKRTFMAERQYTRMEDWLTAKLAYEGLPSKTYLSKTLAQYTSKTCSNCGFTITSADYDRVLEKLKKTATGWMTTINGKELKVEGQITYYNRYKRQNVVKDLSVELDRLSEESVNNDISSWTKGRSGEALSLLKKRFSHRPVQEKFVCLNCGFETHADEQAALNIARSWLFLRSQEYKKYQTNKTTGNTDKRAFVETWQSFYRKKLKEVWKPAV

SEQ ID NO: 43673 - protein, 978 aa, synthetic construct
  REGION 1..978: note = engineered CasX variant
QEIKRINKIRRRLVKDSNTKKAGKTGPMKTLLVRVMTPDLRERLENLRKKPENIPQPISNTSRANLNKLLTDYTEMKKAILHVYWEEFQKDPVGLMSRVAQPASKKIDQNKLKPEMDEKGNLTTAGFACSQCGQPLFVYKLEQVSEKGKAYTNYFGRCNVAEHEKLILLAQLKPEKDSDEAVTYSLGKFGQRALDFYSIHVTKESTHPVKPLAQIAGNRYASHPVGKALSDACMGTIASFLSKYQDIIIEHQKVVKGNQKRLESLRELAGKENLEYPSVTLPPQPHTKEGLDAYNEVIARVRMWVNLNLWQKLKLSRDDAKPLLRLKGFPSFPLVERQANEVDWWDMVCNVKKLINEKKEDGKVFWQNLAGYKRQEALRPYLSSEEDRQKGKKFARYQLGDLLLHLEKKHGEDWGKVYDEAWERIDKKVEGLSKHIKLEEERRSEDAQSKAALTDWLRAKASFVIEGLKEADKDEFCRCELKLQKWYGDLRGKPFAIEAENSILDISGFSKQYNCAFIWQKDGVKKLNLYLIINYFKGGKLRFKKIKPEAFEANRFYTVINKKSGEIVPMEVNFNFDDPNLIILPLAFGKRQGREFIWNDLLSLETGSLKLANGRVIEKTLYNRRTRQDEPALFVALTFERREVLDSSNIKPMNLIGVDRGENIPAVIALTDPEGCPLSRFKDSLGNPTHILRIGESYKEKQRTIQAKKEVEQRRAGGYSRKYASKAKNLADDMVRNTARDLLYYAVTQDAMLIFENLSRGFGRQGKRTFMAERQYTRMEDWLTAKLAYEGLPSKTYLSKTLAQYTSKTCSNCGFTITSADYDRVLEKLKKTATGWMTTINGKELKVEGQITYYNRYKRQNVVKDLSVELDRLSEESVNNDISSWTKGRSGEALSLLKKRFSHRPVQEKFVCLNCGFETHADEQAALNIARSWLFLRSQEYKKYQTNKTTGNTDKRAFVETWQSFYRKKLKEVWKPAV

SEQ ID NO: 43674 - protein, 978 aa, synthetic construct
  REGION 1..978: note = engineered CasX variant
QEIKRINKIRRRLVKDSNTKKAGKTGPMKTLLVRVMTPDLRERLENLRKKPENIPQPISNTSRANLNKLLTDYTEMKKAILHVYWEEFQKDPVGLMSRVAQPASKKIDQNKLKPEMDEKGNLTTAGFACSQCGQPLFVYKLEQVSEKGKAYTNYFGRCNVAEHEKLILLAQLKPEKDSDEAVTYSLGKFGQRALDFYSIHVTKESTHPVKPLAQIAGNRYASSPVGKALSDACMGTIASFLSKYQDIIIEHQKVVKGNQKRLESLRELAGKENLEYPSVTLPPQPHTKEGLDAYNEVIARVRMWVNLNLWQKLKLSRDDAKPLLRLKGFPSFPLVERQANEVDWWDMVCNVKKLINEKKEDGKVFWQNLAGYKRQEALRPYLSSEEDRQKGKKFARYQLGDLLLHLEKKHGEDWGKVYDEAWERIDKKVEGLSKHIKLEEERRSEDAQSKAALTDWLRAKASFVIEGLKEADKDEFCRCELKLQKWYGDLRGKPFAIEAENSILDISGFSKQYNCAFIWQKDGVKKLNLYLIINYFKGGKLRFKKIKPEAFEANRFYTVINKKSGEIVPMEVNFNFDDPNLIILPLAFGKRQGREFIWNDLLSLETGSLKLANGRVIEKTLYNRRTRQDEPALFVALTFERREVLDSSNIKPMNLIGVDRGENIPAVIALTDPEGCPLSRFKDSLGNPTHILRIGESYKEKQRTIQAKKEVEQRRAGGYSRKYASKAKNLADDMVRNTARDLLYYAVTQDAMLIFENLSRGFGRQGKRTFMAERQYTRMEDWLTAKLAYEGLPSKTYLSKTLAQYTSKTCSNCGFTITSADYDRVLEKLKKTATGWMTTINGKELKVEGQITYYNRYKRQNVVKDLSVELDRLSEESVNNDISSWTKGRSGEALSLLKKRFSHRPVQEKFVCLNCGFETHADEQAALNIARSWLFLRSQEYKKYQTNKTTGNTDKRAFVETWQSFYRKKLKEVWKPAV

SEQ ID NO: 43675 - protein, 978 aa, synthetic construct
  REGION 1..978: note = engineered CasX variant
QEIKRINKIRRRLVKDSNTKKAGKTGPMKTLLVRVMTPDLRERLENLRKKPENIPQPISNTSRANLNKLLTDYTEMKKAILHVYWEEFQKDPVGLMSRVAQPASKKIDQNKLKPEMDEKGNLTTAGFACSQCGQPLFVYKLEQVSEKGKAYTNYFGRCNVAEHEKLILLAQLKPEKDSDEAVTYSLGKFGQRALDFYSIHVTKESTHPVKPLAQIAGNRYASTPVGKALSDACMGTIASFLSKYQDIIIEHQKVVKGNQKRLESLRELAGKENLEYPSVTLPPQPHTKEGLDAYNEVIARVRMWVNLNLWQKLKLSRDDAKPLLRLKGFPSFPLVERQANEVDWWDMVCNVKKLINEKKEDGKVFWQNLAGYKRQEALRPYLSSEEDRQKGKKFARYQLGDLLLHLEKKHGEDWGKVYDEAWERIDKKVEGLSKHIKLEEERRSEDAQSKAALTDWLRAKASFVIEGLKEADKDEFCRCELKLQKWYGDLRGKPFAIEAENSILDISGFSKQYNCAFIWQKDGVKKLNLYLIINYFKGGKLRFKKIKPEAFEANRFYTVINKKSGEIVPMEVNFNFDDPNLIILPLAFGKRQGREFIWNDLLSLETGSLKLANGRVIEKTLYNRRTRQDEPALFVALTFERREVLDSSNIKPMNLIGVDRGENIPAVIALTDPEGCPLSRFKDSLGNPTHILRIGESYKEKQRTIQAKKEVEQRRAGGYSRKYASKAKNLADDMVRNTARDLLYYAVTQDAMLIFENLSRGFGRQGKRTFMAERQYTRMEDWLTAKLAYEGLPSKTYLSKTLAQYTSKTCSNCGFTITSADYDRVLEKLKKTATGWMTTINGKELKVEGQITYYNRYKRQNVVKDLSVELDRLSEESVNNDISSWTKGRSGEALSLLKKRFSHRPVQEKFVCLNCGFETHADEQAALNIARSWLFLRSQEYKKYQTNKTTGNTDKRAFVETWQSFYRKKLKEVWKPAV

SEQ ID NO: 43676 - protein, 978 aa, synthetic construct
  REGION 1..978: note = engineered CasX variant
QEIKRINKIRRRLVKDSNTKKAGKTGPMKTLLVRVMTPDLRERLENLRKKPENIPQPISNTSRANLNKLLTDYTEMKKAILHVYWEEFQKDPVGLMSRVAQPASKKIDQNKLKPEMDEKGNLTTAGFACSQCGQPLFVYKLEQVSEKGKAYTNYFGRCNVAEHEKLILLAQLKPEKDSDEAVTYSLGKFGQRALDFYSIHVTKESTHPVKPLAQIAGNRYASAPVGKALSDACMGTIASFLSKYQDIIIEHQKVVKGNQKRLESLRELAGKENLEYPSVTLPPQPHTKEGLDAYNEVIARVRMWVNLNLWQKLKLSRDDAKPLLRLKGFPSFPLVERQANEVDWWDMVCNVKKLINEKKEDGKVFWQNLAGYKRQEALRPYLSSEEDRQKGKKFARYQLGDLLLHLEKKHGEDWGKVYDEAWERIDKKVEGLSKHIKLEEERRSEDAQSKAALTDWLRAKASFVIEGLKEADKDEFCRCELKLQKWYGDLRGKPFAIEAENSILDISGFSKQYNCAFIWQKDGVKKLNLYLIINYFKGGKLRFKKIKPEAFEANRFYTVINKKSGEIVPMEVNFNFDDPNLIILPLAFGKRQGREFIWNDLLSLETGSLKLANGRVIEKTLYNRRTRQDEPALFVALTFERREVLDSSNIKPMNLIGVDRGENIPAVIALTDPEGCPLSRFKDSLGNPTHILRIGESYKEKQRTIQAKKEVEQRRAGGYSRKYASKAKNLADDMVRNTARDLLYYAVTQDAMLIFENLSRGFGRQGKRTFMAERQYTRMEDWLTAKLAYEGLPSKTYLSKTLAQYTSKTCSNCGFTITSADYDRVLEKLKKTATGWMTTINGKELKVEGQITYYNRYKRQNVVKDLSVELDRLSEESVNNDISSWTKGRSGEALSLLKKRFSHRPVQEKFVCLNCGFETHADEQAALNIARSWLFLRSQEYKKYQTNKTTGNTDKRAFVETWQSFYRKKLKEVWKPAV

SEQ ID NO: 43677 - protein, 978 aa, synthetic construct
  REGION 1..978: note = engineered CasX variant
QEIKRINKIRRRLVKDSNTKKAGKTGPMKTLLVRVMTPDLRERLENLRKKPENIPQPISNTSRANLNKLLTDYTEMKKAILHVYWEEFQKDPVGLMSRVAQPASKKIDQNKLKPEMDEKGNLTTAGFACSQCGQPLFVYKLEQVSEKGKAYTNYFGRCNVAEHEKLILLAQLKPEKDSDEAVTYSLGKFGQRALDFYSIHVTKESTHPVKPLAQIAGNRYASVPVGKALSDACMGTIASFLSKYQDIIIEHQKVVKGNQKRLESLRELAGKENLEYPSVTLPPQPHTKEGLDAYNEVIARVRMWVNLNLWQKLKLSRDDAKPLLRLKGFPSFPLVERQANEVDWWDMVCNVKKLINEKKEDGKVFWQNLAGYKRQEALRPYLSSEEDRQKGKKFARYQLGDLLLHLEKKHGEDWGKVYDEAWERIDKKVEGLSKHIKLEEERRSEDAQSKAALTDWLRAKASFVIEGLKEADKDEFCRCELKLQKWYGDLRGKPFAIEAENSILDISGFSKQYNCAFIWQKDGVKKLNLYLIINYFKGGKLRFKKIKPEAFEANRFYTVINKKSGEIVPMEVNFNFDDPNLIILPLAFGKRQGREFIWNDLLSLETGSLKLANGRVIEKTLYNRRTRQDEPALFVALTFERREVLDSSNIKPMNLIGVDRGENIPAVIALTDPEGCPLSRFKDSLGNPTHILRIGESYKEKQRTIQAKKEVEQRRAGGYSRKYASKAKNLADDMVRNTARDLLYYAVTQDAMLIFENLSRGFGRQGKRTFMAERQYTRMEDWLTAKLAYEGLPSKTYLSKTLAQYTSKTCSNCGFTITSADYDRVLEKLKKTATGWMTTINGKELKVEGQITYYNRYKRQNVVKDLSVELDRLSEESVNNDISSWTKGRSGEALSLLKKRFSHRPVQEKFVCLNCGFETHADEQAALNIARSWLFLRSQEYKKYQTNKTTGNTDKRAFVETWQSFYRKKLKEVWKPAV

SEQ ID NO: 43678 - protein, 978 aa, synthetic construct
  REGION 1..978: note = engineered CasX variant
QEIKRINKIRRRLVKDSNTKKAGKTGPMKTLLVRVMTPDLRERLENLRKKPENIPQPISNTSRANLNKLLTDYTEMKKAILHVYWEEFQKDPVGLMSRVAQPASKKIDQNKLKPEMDEKGNLTTAGFACSQCGQPLFVYKLEQVSEKGKAYTNYFGRCNVAEHEKLIKLAQLKPEKDSDEAVTYSLGKFGQRALDFYSIHVTKESTHPVKPLAQIAGNRYASGPVGKALSDACMGTIASFLSKYQDIIIEHQKVVKGNQKRLESLRELAGKENLEYPSVTLPPQPHTKEGLDAYNEVIARVRMWVNLNLWQKLKLSRDDAKPLLRLKGFPSFPLVERQANEVDWWDMVCNVKKLINEKKEDGKVFWQNLAGYKRQEALRPYLSSEEDRQKGKKFARYQLGDLLLHLEKKHGEDWGKVYDEAWERIDKKVEGLSKHIKLEEERRSEDAQSKAALTDWLRAKASFVIEGLKEADKDEFCRCELKLQKWYGDLRGKPFAIEAENSILDISGFSKQYNCAFIWQKDGVKKLNLYLIINYFKGGKLRFKKIKPEAFEANRFYTVINKKSGEIVPMEVNFNFDDPNLIILPLAFGKRQGREFIWNDLLSLETGSLKLANGRVIEKTLYNRRTRQDEPALFVALTFERREVLDSSNIKPMNLIGVDRGENIPAVIALTDPEGCPLSRFKDSLGNPTHILRIGESYKEKQRTIQAKKEVEQRRAGGYSRKYASKAKNLADDMVRNTARDLLYYAVTQDAMLIFENLSRGFGRQGKRTFMAERQYTRMEDWLTAKLAYEGLPSKTYLSKTLAQYTSKTCSNCGFTITSADYDRVLEKLKKTATGWMTTINGKELKVEGQITYYNRYKRQNVVKDLSVELDRLSEESVNNDISSWTKGRSGEALSLLKKRFSHRPVQEKFVCLNCGFETHADEQAALNIARSWLFLRSQEYKKYQTNKTTGNTDKRAFVETWQSFYRKKLKEVWKPAV

SEQ ID NO: 43679 - protein, 977 aa, synthetic construct
  REGION 1..977: note = engineered CasX variant
QEIKRINKIRRRLVKDSNTKKAGKTGPMKTLLVRVMTPDLRERLENLRKKPENIPQPISNTSRANLNKLLTDYTEMKKAILHVYWEEFQKDPVGLMSRVAQPASKKIDQNKLKPEMDEKGNLTTAGFACSQCGQPLFVYKLEQVSEKGKAYTNYFGRCNVAEHEKLILLAQLKPEKDSDEAVTYSLGKFGQRALDFYSIHVTKESTHPVKPLAQIAGNRYASPVGKALSDACMGTIASFLSKYQDIIIEHQKVVKGNQKRLESLRELAGKENLEYPSVTLPPQPHTKEGLDAYNEVIARVRMWVNLNLWQKLKLSRDDAKPLLRLKGFPSFPLVERQANEVDWWDMVCNVKKLINEKKEDGKVFWQNLAGYKRQEALRPYLSSEEDRQKGKKFARYQLGDLLLHLEKKHGEDWGKVYDEAWERIDKKVEGLSKHIKLEEERRSEDAQSKAALTDWLRAKASFVIEGLKEADKDEFCRCELKLQKWYGDLRGKPFAIEAENSILDISGFSKQYNCAFIWQKDGVKKLNLYLIINYFKGGKLRFKKIKPEAFEANRFYTVINKKSGEIVPMEVNFNFDDPNLIILPLAFGKRQGREFIWNDLLSLETGSLKLANGRVIEKTLYNRRTRQDEPALFVALTFERREVLDSSNIKPMNLIGVDRGENIPAVIALTDPEGCPLSRFKDSLGNPTHILRIGESYKEKQRTIQAKKEVEQRRAGGYSRKYASKAKNLADDMVRNTARDLLYYAVTQDAMLIFENLSRGFGRQGKRTFMAERQYTRMEDWLTAKLAYEGLPSKTYLSKTLAQYTSKTCSNCGFTITSADYDRVLEKLKKTATGWMTTINGKELKVEGQITYYNRYKRQNVVKDLSVELDRLSEESVNNDISSWTKGRSGEALSLLKKRFSHRPVQEKFVCLNCGFETHADEQAALNIARSWLFLRSQEYKKYQTNKTTGNTDKRAFVETWQSFYRKKLKEVWKPAV

SEQ ID NO: 43680 - protein, 978 aa, synthetic construct
  REGION 1..978: note = engineered CasX variant
QEIKRINKIRRRLVKDSNTKKAGKTGPMKTLLVRVMTPDLRERLENLRKKPENIPQPISNTSRANLNKLLTDYTEMKKAILHVYWEEFQKDPVGLMSRVAQPASKKIDQNKLKPEMDEKGNLTTAGFACSQCGQPLFVYKLEQVSEKGKAYTNYFGRCNVAEHEKLILLAQLKPEKDSDEAVTYSLGKFGQRALDFYSIHVTKESTHPVKPLAQIAGNRYASYPVGKALSDACMGTIASFLSKYQDIIIEHQKVVKGNQKRLESLRELAGKENLEYPSVTLPPQPHTKEGLDAYNEVIARVRMWVNLNLWQKLKLSRDDAKPLLRLKGFPSFPLVERQANEVDWWDMVCNVKKLINEKKEDGKVFWQNLAGYKRQEALRPYLSSEEDRKKGKKFARYQLGDLLLHLEKKHGEDWGKVYDEAWERIDKKVEGLSKHIKLEEERRSEDAQSKAALTDWLRAKASFVIEGLKEADKDEFCRCELKLQKWYGDLRGKPFAIEAENSILDISGFSKQYNCAFIWQKDGVKKLNLYLIINYFKGGKLRFKKIKPEAFEANRFYTVINKKSGEIVPMEVNFNFDDPNLIILPLAFGKRQGREFIWNDLLSLETGSLKLANGRVIEKTLYNRRTRQDEPALFVALTFERREVLDSSNIKPMNLIGVDRGENIPAVIALTDPEGCPLSRFKDSLGNPTHILRIGESYKEKQRTIQAKKEVEQRRAGGYSRKYASKAKNLADDMVRNTARDLLYYAVTQDAMLIFENLSRGFGRQGKRTFMAERQYTRMEDWLTAKLAYEGLPSQTYLSKTLAQYTSKTCSNCGFTITSADYDRVLEKLKKTATGWMTTINGKELKVEGQITYYNRYKRQNVVKDLSVELDRLSEESVNNDISSWTKGRSGEALSLLKKRFSHRPVQEKFVCLNCGFETHADEQAALNIARSWLFLRSQEYKKYQTNKTTGNTDKRAFVETWQSFYRKKLKEVWKPAV

SEQ ID NO: 43681 - protein, 978 aa, synthetic construct
  REGION 1..978: note = engineered CasX variant
QEIKRINKIRRRLVKDSNTKKAGKTGPMKTLLVRVMTPDLRERLENLRKKPENIPQPISNTSRANLNKLLTDYTEMKKAILHVYWEEFQKDPVGLMSRVAQPASKKIDQNKLKPEMDEKGNLTTAGFACSQCGQPLFVYKLEQVSEKGKAYTNYFGRCNVAEHEKLILLAQLKPEKDSDEAVTYSLGKFGQRALDFYSIHVTKESTHPVKPLAQIAGNRYASHPVGKALSDACMGTIASFLSKYQDIIIEHQKVVKGNQKRLESLRELAGKENLEYPSVTLPPQPHTKEGLDAYNEVIARVRMWVNLNLWQKLKLSRDDAKPLLRLKGFPSFPLVERQANEVDWWDMVCNVKKLINEKKEDGKVFWQNLAGYKRQEALRPYLSSEEDRKKGKKFARYQLGDLLLHLEKKHGEDWGKVYDEAWERIDKKVEGLSKHIKLEEERRSEDAQSKAALTDWLRAKASFVIEGLKEADKDEFCRCELKLQKWYGDLRGKPFAIEAENSILDISGFSKQYNCAFIWQKDGVKKLNLYLIINYFKGGKLRFKKIKPEAFEANRFYTVINKKSGEIVPMEVNFNFDDPNLIILPLAFGKRQGREFIWNDLLSLETGSLKLANGRVIEKTLYNRRTRQDEPALFVALTFERREVLDSSNIKPMNLIGVDRGENIPAVIALTDPEGCPLSRFKDSLGNPTHILRIGESYKEKQRTIQAKKEVEQRRAGGYSRKYASKAKNLADDMVRNTARDLLYYAVTQDAMLIFENLSRGFGRQGKRTFMAERQYTRMEDWLTAKLAYEGLPSQTYLSKTLAQYTSKTCSNCGFTITSADYDRVLEKLKKTATGWMTTINGKELKVEGQITYYNRYKRQNVVKDLSVELDRLSEESVNNDISSWTKGRSGEALSLLKKRFSHRPVQEKFVCLNCGFETHADEQAALNIARSWLFLRSQEYKKYQTNKTTGNTDKRAFVETWQSFYRKKLKEVWKPAV

SEQ ID NO: 43682 - protein, 978 aa, synthetic construct
  REGION 1..978: note = engineered CasX variant
QEIKRINKIRRRLVKDSNTKKAGKTGPMKTLLVRVMTPDLRERLENLRKKPENIPQPISNTSRANLNKLLTDYTEMKKAILHVYWEEFQKDPVGLMSRVAQPASKKIDQNKLKPEMDEKGNLTTAGFACSQCGQPLFVYKLEQVSEKGKAYTNYFGRCNVAEHEKLILLAQLKPEKDSDEAVTYSLGKFGQRALDFYSIHVTKESTHPVKPLAQIAGNRYASSPVGKALSDACMGTIASFLSKYQDIIIEHQKVVKGNQKRLESLRELAGKENLEYPSVTLPPQPHTKEGLDAYNEVIARVRMWVNLNLWQKLKLSRDDAKPLLRLKGFPSFPLVERQANEVDWWDMVCNVKKLINEKKEDGKVFWQNLAGYKRQEALRPYLSSEEDRKKGKKFARYQLGDLLLHLEKKHGEDWGKVYDEAWERIDKKVEGLSKHIKLEEERRSEDAQSKAALTDWLRAKASFVIEGLKEADKDEFCRCELKLQKWYGDLRGKPFAIEAENSILDISGFSKQYNCAFIWQKDGVKKLNLYLIINYFKGGKLRFKKIKPEAFEANRFYTVINKKSGEIVPMEVNFNFDDPNLIILPLAFGKRQGREFIWNDLLSLETGSLKLANGRVIEKTLYNRRTRQDEPALFVALTFERREVLDSSNIKPMNLIGVDRGENIPAVIALTDPEGCPLSRFKDSLGNPTHILRIGESYKEKQRTIQAKKEVEQRRAGGYSRKYASKAKNLADDMVRNTARDLLYYAVTQDAMLIFENLSRGFGRQGKRTFMAERQYTRMEDWLTAKLAYEGLPSQTYLSKTLAQYTSKTCSNCGFTITSADYDRVLEKLKKTATGWMTTINGKELKVEGQITYYNRYKRQNVVKDLSVELDRLSEESVNNDISSWTKGRSGEALSLLKKRFSHRPVQEKFVCLNCGFETHADEQAALNIARSWLFLRSQEYKKYQTNKTTGNTDKRAFVETWQSFYRKKLKEVWKPAV

SEQ ID NO: 43683 - protein, 978 aa, synthetic construct
  REGION 1..978: note = engineered CasX variant
QEIKRINKIRRRLVKDSNTKKAGKTGPMKTLLVRVMTPDLRERLENLRKKPENIPQPISNTSRANLNKLLTDYTEMKKAILHVYWEEFQKDPVGLMSRVAQPASKKIDQNKLKPEMDEKGNLTTAGFACSQCGQPLFVYKLEQVSEKGKAYTNYFGRCNVAEHEKLILLAQLKPEKDSDEAVTYSLGKFGQRALDFYSIHVTKESTHPVKPLAQIAGNRYASTPVGKALSDACMGTIASFLSKYQDIIIEHQKVVKGNQKRLESLRELAGKENLEYPSVTLPPQPHTKEGLDAYNEVIARVRMWVNLNLWQKLKLSRDDAKPLLRLKGFPSFPLVERQANEVDWWDMVCNVKKLINEKKEDGKVFWQNLAGYKRQEALRPYLSSEEDRKKGKKFARYQLGDLLLHLEKKHGEDWGKVYDEAWERIDKKVEGLSKHIKLEEERRSEDAQSKAALTDWLRAKASFVIEGLKEADKDEFCRCELKLQKWYGDLRGKPFAIEAENSILDISGFSKQYNCAFIWQKDGVKKLNLYLIINYFKGGKLRFKKIKPEAFEANRFYTVINKKSGEIVPMEVNFNFDDPNLIILPLAFGKRQGREFIWNDLLSLETGSLKLANGRVIEKTLYNRRTRQDEPALFVALTFERREVLDSSNIKPMNLIGVDRGENIPAVIALTDPEGCPLSRFKDSLGNPTHILRIGESYKEKQRTIQAKKEVEQRRAGGYSRKYASKAKNLADDMVRNTARDLLYYAVTQDAMLIFENLSRGFGRQGKRTFMAERQYTRMEDWLTAKLAYEGLPSQTYLSKTLAQYTSKTCSNCGFTITSADYDRVLEKLKKTATGWMTTINGKELKVEGQITYYNRYKRQNVVKDLSVELDRLSEESVNNDISSWTKGRSGEALSLLKKRFSHRPVQEKFVCLNCGFETHADEQAALNIARSWLFLRSQEYKKYQTNKTTGNTDKRAFVETWQSFYRKKLKEVWKPAV

SEQ ID NO: 43684 - protein, 978 aa, synthetic construct
  REGION 1..978: note = engineered CasX variant
QEIKRINKIRRRLVKDSNTKKAGKTGPMKTLLVRVMTPDLRERLENLRKKPENIPQPISNTSRANLNKLLTDYTEMKKAILHVYWEEFQKDPVGLMSRVAQPASKKIDQNKLKPEMDEKGNLTTAGFACSQCGQPLFVYKLEQVSEKGKAYTNYFGRCNVAEHEKLILLAQLKPEKDSDEAVTYSLGKFGQRALDFYSIHVTKESTHPVKPLAQIAGNRYASAPVGKALSDACMGTIASFLSKYQDIIIEHQKVVKGNQKRLESLRELAGKENLEYPSVTLPPQPHTKEGLDAYNEVIARVRMWVNLNLWQKLKLSRDDAKPLLRLKGFPSFPLVERQANEVDWWDMVCNVKKLINEKKEDGKVFWQNLAGYKRQEALRPYLSSEEDRKKGKKFARYQLGDLLLHLEKKHGEDWGKVYDEAWERIDKKVEGLSKHIKLEEERRSEDAQSKAALTDWLRAKASFVIEGLKEADKDEFCRCELKLQKWYGDLRGKPFAIEAENSILDISGFSKQYNCAFIWQKDGVKKLNLYLIINYFKGGKLRFKKIKPEAFEANRFYTVINKKSGEIVPMEVNFNFDDPNLIILPLAFGKRQGREFIWNDLLSLETGSLKLANGRVIEKTLYNRRTRQDEPALFVALTFERREVLDSSNIKPMNLIGVDRGENIPAVIALTDPEGCPLSRFKDSLGNPTHILRIGESYKEKQRTIQAKKEVEQRRAGGYSRKYASKAKNLADDMVRNTARDLLYYAVTQDAMLIFENLSRGFGRQGKRTFMAERQYTRMEDWLTAKLAYEGLPSQTYLSKTLAQYTSKTCSNCGFTITSADYDRVLEKLKKTATGWMTTINGKELKVEGQITYYNRYKRQNVVKDLSVELDRLSEESVNNDISSWTKGRSGEALSLLKKRFSHRPVQEKFVCLNCGFETHADEQAALNIARSWLFLRSQEYKKYQTNKTTGNTDKRAFVETWQSFYRKKLKEVWKPAV

SEQ ID NO: 43685 - protein, 978 aa, synthetic construct
  REGION 1..978: note = engineered CasX variant
QEIKRINKIRRRLVKDSNTKKAGKTGPMKTLLVRVMTPDLRERLENLRKKPENIPQPISNTSRANLNKLLTDYTEMKKAILHVYWEEFQKDPVGLMSRVAQPASKKIDQNKLKPEMDEKGNLTTAGFACSQCGQPLFVYKLEQVSEKGKAYTNYFGRCNVAEHEKLILLAQLKPEKDSDEAVTYSLGKFGQRALDFYSIHVTKESTHPVKPLAQIAGNRYASVPVGKALSDACMGTIASFLSKYQDIIIEHQKVVKGNQKRLESLRELAGKENLEYPSVTLPPQPHTKEGLDAYNEVIARVRMWVNLNLWQKLKLSRDDAKPLLRLKGFPSFPLVERQANEVDWWDMVCNVKKLINEKKEDGKVFWQNLAGYKRQEALRPYLSSEEDRKKGKKFARYQLGDLLLHLEKKHGEDWGKVYDEAWERIDKKVEGLSKHIKLEEERRSEDAQSKAALTDWLRAKASFVIEGLKEADKDEFCRCELKLQKWYGDLRGKPFAIEAENSILDISGFSKQYNCAFIWQKDGVKKLNLYLIINYFKGGKLRFKKIKPEAFEANRFYTVINKKSGEIVPMEVNFNFDDPNLIILPLAFGKRQGREFIWNDLLSLETGSLKLANGRVIEKTLYNRRTRQDEPALFVALTFERREVLDSSNIKPMNLIGVDRGENIPAVIALTDPEGCPLSRFKDSLGNPTHILRIGESYKEKQRTIQAKKEVEQRRAGGYSRKYASKAKNLADDMVRNTARDLLYYAVTQDAMLIFENLSRGFGRQGKRTFMAERQYTRMEDWLTAKLAYEGLPSQTYLSKTLAQYTSKTCSNCGFTITSADYDRVLEKLKKTATGWMTTINGKELKVEGQITYYNRYKRQNVVKDLSVELDRLSEESVNNDISSWTKGRSGEALSLLKKRFSHRPVQEKFVCLNCGFETHADEQAALNIARSWLFLRSQEYKKYQTNKTTGNTDKRAFVETWQSFYRKKLKEVWKPAV

SEQ ID NO: 43686 - protein, 978 aa, synthetic construct
  REGION 1..978: note = engineered CasX variant
QEIKRINKIRRRLVKDSNTKKAGKTGPMKTLLVRVMTPDLRERLENLRKKPENIPQPISNTSRANLNKLLTDYTEMKKAILHVYWEEFQKDPVGLMSRVAQPASKKIDQNKLKPEMDEKGNLTTAGFACSQCGQPLFVYKLEQVSEKGKAYTNYFGRCNVAEHEKLIKLAQLKPEKDSDEAVTYSLGKFGQRALDFYSIHVTKESTHPVKPLAQIAGNRYASGPVGKALSDACMGTIASFLSKYQDIIIEHQKVVKGNQKRLESLRELAGKENLEYPSVTLPPQPHTKEGLDAYNEVIARVRMWVNLNLWQKLKLSRDDAKPLLRLKGFPSFPLVERQANEVDWWDMVCNVKKLINEKKEDGKVFWQNLAGYKRQEALRPYLSSEEDRKKGKKFARYQLGDLLLHLEKKHGEDWGKVYDEAWERIDKKVEGLSKHIKLEEERRSEDAQSKAALTDWLRAKASFVIEGLKEADKDEFCRCELKLQKWYGDLRGKPFAIEAENSILDISGFSKQYNCAFIWQKDGVKKLNLYLIINYFKGGKLRFKKIKPEAFEANRFYTVINKKSGEIVPMEVNFNFDDPNLIILPLAFGKRQGREFIWNDLLSLETGSLKLANGRVIEKTLYNRRTRQDEPALFVALTFERREVLDSSNIKPMNLIGVDRGENIPAVIALTDPEGCPLSRFKDSLGNPTHILRIGESYKEKQRTIQAKKEVEQRRAGGYSRKYASKAKNLADDMVRNTARDLLYYAVTQDAMLIFENLSRGFGRQGKRTFMAERQYTRMEDWLTAKLAYEGLPSQTYLSKTLAQYTSKTCSNCGFTITSADYDRVLEKLKKTATGWMTTINGKELKVEGQITYYNRYKRQNVVKDLSVELDRLSEESVNNDISSWTKGRSGEALSLLKKRFSHRPVQEKFVCLNCGFETHADEQAALNIARSWLFLRSQEYKKYQTNKTTGNTDKRAFVETWQSFYRKKLKEVWKPAV

SEQ ID NO: 43687 - protein, 977 aa, synthetic construct
  REGION 1..977: note = engineered CasX variant
QEIKRINKIRRRLVKDSNTKKAGKTGPMKTLLVRVMTPDLRERLENLRKKPENIPQPISNTSRANLNKLLTDYTEMKKAILHVYWEEFQKDPVGLMSRVAQPASKKIDQNKLKPEMDEKGNLTTAGFACSQCGQPLFVYKLEQVSEKGKAYTNYFGRCNVAEHEKLILLAQLKPEKDSDEAVTYSLGKFGQRALDFYSIHVTKESTHPVKPLAQIAGNRYASPVGKALSDACMGTIASFLSKYQDIIIEHQKVVKGNQKRLESLRELAGKENLEYPSVTLPPQPHTKEGLDAYNEVIARVRMWVNLNLWQKLKLSRDDAKPLLRLKGFPSFPLVERQANEVDWWDMVCNVKKLINEKKEDGKVFWQNLAGYKRQEALRPYLSSEEDRKKGKKFARYQLGDLLLHLEKKHGEDWGKVYDEAWERIDKKVEGLSKHIKLEEERRSEDAQSKAALTDWLRAKASFVIEGLKEADKDEFCRCELKLQKWYGDLRGKPFAIEAENSILDISGFSKQYNCAFIWQKDGVKKLNLYLIINYFKGGKLRFKKIKPEAFEANRFYTVINKKSGEIVPMEVNFNFDDPNLIILPLAFGKRQGREFIWNDLLSLETGSLKLANGRVIEKTLYNRRTRQDEPALFVALTFERREVLDSSNIKPMNLIGVDRGENIPAVIALTDPEGCPLSRFKDSLGNPTHILRIGESYKEKQRTIQAKKEVEQRRAGGYSRKYASKAKNLADDMVRNTARDLLYYAVTQDAMLIFENLSRGFGRQGKRTFMAERQYTRMEDWLTAKLAYEGLPSQTYLSKTLAQYTSKTCSNCGFTITSADYDRVLEKLKKTATGWMTTINGKELKVEGQITYYNRYKRQNVVKDLSVELDRLSEESVNNDISSWTKGRSGEALSLLKKRFSHRPVQEKFVCLNCGFETHADEQAALNIARSWLFLRSQEYKKYQTNKTTGNTDKRAFVETWQSFYRKKLKEVWKPAV

SEQ ID NO: 43688 - protein, 978 aa, synthetic construct
  REGION 1..978: note = engineered CasX variant
QEIKRINKIRRRLVKDSNTKKAGKTGPMKTLLVRVMTPDLRERLENLRKKPENIPQPISNTSRANLNKLLTDYTEMKKAILHVYWEEFQKDPVGLMSRVAQPASKKIDQNKLKPEMDEKGNLTTAGFACSQCGQPLFVYKLEQVSEKGKAYTNYFGRCNVAEHEKLILLAQLKPEKDSDEAVTYSLGKFGQRALDFYSIHVTKESTHPVKPLAQIAGNRYASYPVGKALSDACMGTIASFLSKYQDIIIEHQKVVKGNQKRLESLRELAGKENLEYPSVTLPPQPHTKEGLDAYNEVIARVRMWVNLNLWQKLKLSRDDAKPLLRLKGFPSFPLVERQANEVDWWDMVCNVKKLINEKKEDGKVFWQNLAGYKRQEALRPYLSSEEDRKKGKKFARYQLGDLLLHLEKKHGEDWGKVYDEAWERIDKKVEGLSKHIKLEEERRSEDAQSKAALTDWLRAKASFVIEGLKEADKDEFCRCELKLQKWYGDLRGKPFAIEAENSILDISGFSKQYNCAFIWQKDGVKKLNLYLIINYFKGGKLRFKKIKPEAFEANRFYTVINKKSGEIVPMEVNFNFDDPNLIILPLAFGKRQGREFIWNDLLSLETGSLKLANGRVIEKTLYNRRTRQDEPALFVALTFERREVLDSSNIKPMNLIGVDRGENIPAVIALTDPEGCPLSRFKDSLGNPTHILRIGESYKEKQRTIQAKKEVEQRRAGGYSRKYASKAKNLADDMVRNTARDLLYYAVTQDAMLIFENLSRGFGRQGKRTFMAERQYTRMEDWLTAKLAYNGLPSKTYLSKTLAQYTSKTCSNCGFTITSADYDRVLEKLKKTATGWMTTINGKELKVEGQITYYNRYKRQNVVKDLSVELDRLSEESVNNDISSWTKGRSGEALSLLKKRFSHRPVQEKFVCLNCGFETHADEQAALNIARSWLFLRSQEYKKYQTNKTTGNTDKRAFVETWQSFYRKKLKEVWKPAV

SEQ ID NO: 43689 - protein, 978 aa, synthetic construct
  REGION 1..978: note = engineered CasX variant
QEIKRINKIRRRLVKDSNTKKAGKTGPMKTLLVRVMTPDLRERLENLRKKPENIPQPISNTSRANLNKLLTDYTEMKKAILHVYWEEFQKDPVGLMSRVAQPASKKIDQNKLKPEMDEKGNLTTAGFACSQCGQPLFVYKLEQVSEKGKAYTNYFGRCNVAEHEKLILLAQLKPEKDSDEAVTYSLGKFGQRALDFYSIHVTKESTHPVKPLAQIAGNRYASHPVGKALSDACMGTIASFLSKYQDIIIEHQKVVKGNQKRLESLRELAGKENLEYPSVTLPPQPHTKEGLDAYNEVIARVRMWVNLNLWQKLKLSRDDAKPLLRLKGFPSFPLVERQANEVDWWDMVCNVKKLINEKKEDGKVFWQNLAGYKRQEALRPYLSSEEDRKKGKKFARYQLGDLLLHLEKKHGEDWGKVYDEAWERIDKKVEGLSKHIKLEEERRSEDAQSKAALTDWLRAKASFVIEGLKEADKDEFCRCELKLQKWYGDLRGKPFAIEAENSILDISGFSKQYNCAFIWQKDGVKKLNLYLIINYFKGGKLRFKKIKPEAFEANRFYTVINKKSGEIVPMEVNFNFDDPNLIILPLAFGKRQGREFIWNDLLSLETGSLKLANGRVIEKTLYNRRTRQDEPALFVALTFERREVLDSSNIKPMNLIGVDRGENIPAVIALTDPEGCPLSRFKDSLGNPTHILRIGESYKEKQRTIQAKKEVEQRRAGGYSRKYASKAKNLADDMVRNTARDLLYYAVTQDAMLIFENLSRGFGRQGKRTFMAERQYTRMEDWLTAKLAYNGLPSKTYLSKTLAQYTSKTCSNCGFTITSADYDRVLEKLKKTATGWMTTINGKELKVEGQITYYNRYKRQNVVKDLSVELDRLSEESVNNDISSWTKGRSGEALSLLKKRFSHRPVQEKFVCLNCGFETHADEQAALNIARSWLFLRSQEYKKYQTNKTTGNTDKRAFVETWQSFYRKKLKEVWKPAV

SEQ ID NO: 43690 - protein, 978 aa, synthetic construct
  REGION 1..978: note = engineered CasX variant
QEIKRINKIRRRLVKDSNTKKAGKTGPMKTLLVRVMTPDLRERLENLRKKPENIPQPISNTSRANLNKLLTDYTEMKKAILHVYWEEFQKDPVGLMSRVAQPASKKIDQNKLKPEMDEKGNLTTAGFACSQCGQPLFVYKLEQVSEKGKAYTNYFGRCNVAEHEKLILLAQLKPEKDSDEAVTYSLGKFGQRALDFYSIHVTKESTHPVKPLAQIAGNRYASSPVGKALSDACMGTIASFLSKYQDIIIEHQKVVKGNQKRLESLRELAGKENLEYPSVTLPPQPHTKEGLDAYNEVIARVRMWVNLNLWQKLKLSRDDAKPLLRLKGFPSFPLVERQANEVDWWDMVCNVKKLINEKKEDGKVFWQNLAGYKRQEALRPYLSSEEDRKKGKKFARYQLGDLLLHLEKKHGEDWGKVYDEAWERIDKKVEGLSKHIKLEEERRSEDAQSKAALTDWLRAKASFVIEGLKEADKDEFCRCELKLQKWYGDLRGKPFAIEAENSILDISGFSKQYNCAFIWQKDGVKKLNLYLIINYFKGGKLRFKKIKPEAFEANRFYTVINKKSGEIVPMEVNFNFDDPNLIILPLAFGKRQGREFIWNDLLSLETGSLKLANGRVIEKTLYNRRTRQDEPALFVALTFERREVLDSSNIKPMNLIGVDRGENIPAVIALTDPEGCPLSRFKDSLGNPTHILRIGESYKEKQRTIQAKKEVEQRRAGGYSRKYASKAKNLADDMVRNTARDLLYYAVTQDAMLIFENLSRGFGRQGKRTFMAERQYTRMEDWLTAKLAYNGLPSKTYLSKTLAQYTSKTCSNCGFTITSADYDRVLEKLKKTATGWMTTINGKELKVEGQITYYNRYKRQNVVKDLSVELDRLSEESVNNDISSWTKGRSGEALSLLKKRFSHRPVQEKFVCLNCGFETHADEQAALNIARSWLFLRSQEYKKYQTNKTTGNTDKRAFVETWQSFYRKKLKEVWKPAV

SEQ ID NO: 43691 - protein, 978 aa, synthetic construct
  REGION 1..978: note = engineered CasX variant
QEIKRINKIRRRLVKDSNTKKAGKTGPMKTLLVRVMTPDLRERLENLRKKPENIPQPISNTSRANLNKLLTDYTEMKKAILHVYWEEFQKDPVGLMSRVAQPASKKIDQNKLKPEMDEKGNLTTAGFACSQCGQPLFVYKLEQVSEKGKAYTNYFGRCNVAEHEKLILLAQLKPEKDSDEAVTYSLGKFGQRALDFYSIHVTKESTHPVKPLAQIAGNRYASTPVGKALSDACMGTIASFLSKYQDIIIEHQKVVKGNQKRLESLRELAGKENLEYPSVTLPPQPHTKEGLDAYNEVIARVRMWVNLNLWQKLKLSRDDAKPLLRLKGFPSFPLVERQANEVDWWDMVCNVKKLINEKKEDGKVFWQNLAGYKRQEALRPYLSSEEDRKKGKKFARYQLGDLLLHLEKKHGEDWGKVYDEAWERIDKKVEGLSKHIKLEEERRSEDAQSKAALTDWLRAKASFVIEGLKEADKDEFCRCELKLQKWYGDLRGKPFAIEAENSILDISGFSKQYNCAFIWQKDGVKKLNLYLIINYFKGGKLRFKKIKPEAFEANRFYTVINKKSGEIVPMEVNFNFDDPNLIILPLAFGKRQGREFIWNDLLSLETGSLKLANGRVIEKTLYNRRTRQDEPALFVALTFERREVLDSSNIKPMNLIGVDRGENIPAVIALTDPEGCPLSRFKDSLGNPTHILRIGESYKEKQRTIQAKKEVEQRRAGGYSRKYASKAKNLADDMVRNTARDLLYYAVTQDAMLIFENLSRGFGRQGKRTFMAERQYTRMEDWLTAKLAYNGLPSKTYLSKTLAQYTSKTCSNCGFTITSADYDRVLEKLKKTATGWMTTINGKELKVEGQITYYNRYKRQNVVKDLSVELDRLSEESVNNDISSWTKGRSGEALSLLKKRFSHRPVQEKFVCLNCGFETHADEQAALNIARSWLFLRSQEYKKYQTNKTTGNTDKRAFVETWQSFYRKKLKEVWKPAV

SEQ ID NO: 43692 - protein, 978 aa, synthetic construct
  REGION 1..978: note = engineered CasX variant
QEIKRINKIRRRLVKDSNTKKAGKTGPMKTLLVRVMTPDLRERLENLRKKPENIPQPISNTSRANLNKLLTDYTEMKKAILHVYWEEFQKDPVGLMSRVAQPASKKIDQNKLKPEMDEKGNLTTAGFACSQCGQPLFVYKLEQVSEKGKAYTNYFGRCNVAEHEKLILLAQLKPEKDSDEAVTYSLGKFGQRALDFYSIHVTKESTHPVKPLAQIAGNRYASAPVGKALSDACMGTIASFLSKYQDIIIEHQKVVKGNQKRLESLRELAGKENLEYPSVTLPPQPHTKEGLDAYNEVIARVRMWVNLNLWQKLKLSRDDAKPLLRLKGFPSFPLVERQANEVDWWDMVCNVKKLINEKKEDGKVFWQNLAGYKRQEALRPYLSSEEDRKKGKKFARYQLGDLLLHLEKKHGEDWGKVYDEAWERIDKKVEGLSKHIKLEEERRSEDAQSKAALTDWLRAKASFVIEGLKEADKDEFCRCELKLQKWYGDLRGKPFAIEAENSILDISGFSKQYNCAFIWQKDGVKKLNLYLIINYFKGGKLRFKKIKPEAFEANRFYTVINKKSGEIVPMEVNFNFDDPNLIILPLAFGKRQGREFIWNDLLSLETGSLKLANGRVIEKTLYNRRTRQDEPALFVALTFERREVLDSSNIKPMNLIGVDRGENIPAVIALTDPEGCPLSRFKDSLGNPTHILRIGESYKEKQRTIQAKKEVEQRRAGGYSRKYASKAKNLADDMVRNTARDLLYYAVTQDAMLIFENLSRGFGRQGKRTFMAERQYTRMEDWLTAKLAYNGLPSKTYLSKTLAQYTSKTCSNCGFTITSADYDRVLEKLKKTATGWMTTINGKELKVEGQITYYNRYKRQNVVKDLSVELDRLSEESVNNDISSWTKGRSGEALSLLKKRFSHRPVQEKFVCLNCGFETHADEQAALNIARSWLFLRSQEYKKYQTNKTTGNTDKRAFVETWQSFYRKKLKEVWKPAV

SEQ ID NO: 43693 - protein, 978 aa, synthetic construct
  REGION 1..978: note = engineered CasX variant
QEIKRINKIRRRLVKDSNTKKAGKTGPMKTLLVRVMTPDLRERLENLRKKPENIPQPISNTSRANLNKLLTDYTEMKKAILHVYWEEFQKDPVGLMSRVAQPASKKIDQNKLKPEMDEKGNLTTAGFACSQCGQPLFVYKLEQVSEKGKAYTNYFGRCNVAEHEKLILLAQLKPEKDSDEAVTYSLGKFGQRALDFYSIHVTKESTHPVKPLAQIAGNRYASVPVGKALSDACMGTIASFLSKYQDIIIEHQKVVKGNQKRLESLRELAGKENLEYPSVTLPPQPHTKEGLDAYNEVIARVRMWVNLNLWQKLKLSRDDAKPLLRLKGFPSFPLVERQANEVDWWDMVCNVKKLINEKKEDGKVFWQNLAGYKRQEALRPYLSSEEDRKKGKKFARYQLGDLLLHLEKKHGEDWGKVYDEAWERIDKKVEGLSKHIKLEEERRSEDAQSKAALTDWLRAKASFVIEGLKEADKDEFCRCELKLQKWYGDLRGKPFAIEAENSILDISGFSKQYNCAFIWQKDGVKKLNLYLIINYFKGGKLRFKKIKPEAFEANRFYTVINKKSGEIVPMEVNFNFDDPNLIILPLAFGKRQGREFIWNDLLSLETGSLKLANGRVIEKTLYNRRTRQDEPALFVALTFERREVLDSSNIKPMNLIGVDRGENIPAVIALTDPEGCPLSRFKDSLGNPTHILRIGESYKEKQRTIQAKKEVEQRRAGGYSRKYASKAKNLADDMVRNTARDLLYYAVTQDAMLIFENLSRGFGRQGKRTFMAERQYTRMEDWLTAKLAYNGLPSKTYLSKTLAQYTSKTCSNCGFTITSADYDRVLEKLKKTATGWMTTINGKELKVEGQITYYNRYKRQNVVKDLSVELDRLSEESVNNDISSWTKGRSGEALSLLKKRFSHRPVQEKFVCLNCGFETHADEQAALNIARSWLFLRSQEYKKYQTNKTTGNTDKRAFVETWQSFYRKKLKEVWKPAV

SEQ ID NO: 43694 - protein, 978 aa, synthetic construct
  REGION 1..978: note = engineered CasX variant
QEIKRINKIRRRLVKDSNTKKAGKTGPMKTLLVRVMTPDLRERLENLRKKPENIPQPISNTSRANLNKLLTDYTEMKKAILHVYWEEFQKDPVGLMSRVAQPASKKIDQNKLKPEMDEKGNLTTAGFACSQCGQPLFVYKLEQVSEKGKAYTNYFGRCNVAEHEKLIKLAQLKPEKDSDEAVTYSLGKFGQRALDFYSIHVTKESTHPVKPLAQIAGNRYASGPVGKALSDACMGTIASFLSKYQDIIIEHQKVVKGNQKRLESLRELAGKENLEYPSVTLPPQPHTKEGLDAYNEVIARVRMWVNLNLWQKLKLSRDDAKPLLRLKGFPSFPLVERQANEVDWWDMVCNVKKLINEKKEDGKVFWQNLAGYKRQEALRPYLSSEEDRKKGKKFARYQLGDLLLHLEKKHGEDWGKVYDEAWERIDKKVEGLSKHIKLEEERRSEDAQSKAALTDWLRAKASFVIEGLKEADKDEFCRCELKLQKWYGDLRGKPFAIEAENSILDISGFSKQYNCAFIWQKDGVKKLNLYLIINYFKGGKLRFKKIKPEAFEANRFYTVINKKSGEIVPMEVNFNFDDPNLIILPLAFGKRQGREFIWNDLLSLETGSLKLANGRVIEKTLYNRRTRQDEPALFVALTFERREVLDSSNIKPMNLIGVDRGENIPAVIALTDPEGCPLSRFKDSLGNPTHILRIGESYKEKQRTIQAKKEVEQRRAGGYSRKYASKAKNLADDMVRNTARDLLYYAVTQDAMLIFENLSRGFGRQGKRTFMAERQYTRMEDWLTAKLAYNGLPSKTYLSKTLAQYTSKTCSNCGFTITSADYDRVLEKLKKTATGWMTTINGKELKVEGQITYYNRYKRQNVVKDLSVELDRLSEESVNNDISSWTKGRSGEALSLLKKRFSHRPVQEKFVCLNCGFETHADEQAALNIARSWLFLRSQEYKKYQTNKTTGNTDKRAFVETWQSFYRKKLKEVWKPAV

SEQ ID NO: 43695 - protein, 977 aa, synthetic construct
  REGION 1..977: note = engineered CasX variant
QEIKRINKIRRRLVKDSNTKKAGKTGPMKTLLVRVMTPDLRERLENLRKKPENIPQPISNTSRANLNKLLTDYTEMKKAILHVYWEEFQKDPVGLMSRVAQPASKKIDQNKLKPEMDEKGNLTTAGFACSQCGQPLFVYKLEQVSEKGKAYTNYFGRCNVAEHEKLILLAQLKPEKDSDEAVTYSLGKFGQRALDFYSIHVTKESTHPVKPLAQIAGNRYASPVGKALSDACMGTIASFLSKYQDIIIEHQKVVKGNQKRLESLRELAGKENLEYPSVTLPPQPHTKEGLDAYNEVIARVRMWVNLNLWQKLKLSRDDAKPLLRLKGFPSFPLVERQANEVDWWDMVCNVKKLINEKKEDGKVFWQNLAGYKRQEALRPYLSSEEDRKKGKKFARYQLGDLLLHLEKKHGEDWGKVYDEAWERIDKKVEGLSKHIKLEEERRSEDAQSKAALTDWLRAKASFVIEGLKEADKDEFCRCELKLQKWYGDLRGKPFAIEAENSILDISGFSKQYNCAFIWQKDGVKKLNLYLIINYFKGGKLRFKKIKPEAFEANRFYTVINKKSGEIVPMEVNFNFDDPNLIILPLAFGKRQGREFIWNDLLSLETGSLKLANGRVIEKTLYNRRTRQDEPALFVALTFERREVLDSSNIKPMNLIGVDRGENIPAVIALTDPEGCPLSRFKDSLGNPTHILRIGESYKEKQRTIQAKKEVEQRRAGGYSRKYASKAKNLADDMVRNTARDLLYYAVTQDAMLIFENLSRGFGRQGKRTFMAERQYTRMEDWLTAKLAYNGLPSKTYLSKTLAQYTSKTCSNCGFTITSADYDRVLEKLKKTATGWMTTINGKELKVEGQITYYNRYKRQNVVKDLSVELDRLSEESVNNDISSWTKGRSGEALSLLKKRFSHRPVQEKFVCLNCGFETHADEQAALNIARSWLFLRSQEYKKYQTNKTTGNTDKRAFVETWQSFYRKKLKEVWKPAV

SEQ ID NO: 43696 - protein, 978 aa, synthetic construct
  REGION 1..978: note = engineered CasX variant
QEIKRINKIRRRLVKDSNTKKAGKTGPMKTLLVRVMTPDLRERLENLRKKPENIPQPISNTSRANLNKLLTDYTEMKKAILHVYWEEFQKDPVGLMSRVAQPASKKIDQNKLKPEMDEKGNLTTAGFACSQCGQPLFVYKLEQVSEKGKAYTNYFGRCNVAEHEKLIQLAQLKPEKDSDEAVTYSLGKFGQRALDFYSIHVTKESTHPVKPLAQIAGNRYASYPVGKALSDACMGTIASFLSKYQDIIIEHQKVVKGNQKRLESLRELAGKENLEYPSVTLPPQPHTKEGLDAYNEVIARVRMWVNLNLWQKLKLSRDDAKPLLRLKGFPSFPLVERQANEVDWWDMVCNVKKLINEKKEDGKVFWQNLAGYKRQEALRPYLSSEEDRKKGKKFARYQLGDLLLHLEKKHGEDWGKVYDEAWERIDKKVEGLSKHIKLEEERRSEDAQSKAALTDWLRAKASFVIEGLKEADKDEFCRCELKLQKWYGDLRGKPFAIEAENSILDISGFSKQYNCAFIWQKDGVKKLNLYLIINYFKGGKLRFKKIKPEAFEANRFYTVINKKSGEIVPMEVNFNFDDPNLIILPLAFGKRQGREFIWNDLLSLETGSLKLANGRVIEKTLYNRRTRQDEPALFVALTFERREVLDSSNIKPMNLIGVDRGENIPAVIALTDPEGCPLSRFKDSLGNPTHILRIGESYKEKQRTIQAKKEVEQRRAGGYSRKYASKAKNLADDMVRNTARDLLYYAVTQDAMLIFENLSRGFGRQGKRTFMAERQYTRMEDWLTAKLAYEGLPSKTYLSKTLAQYTSKTCSNCGFTITSADYDRVLEKLKKTATGWMTTINGKELKVEGQITYYNRYKRQNVVKDLSVELDRLSEESVNNDISSWTKGRSGEALSLLKKRFSHRPVQEKFVCLNCGFETHADEQAALNIARSWLFLRSQEYKKYQTNKTTGNTDKRAFVETWQSFYRKKLKEVWKPAV

SEQ ID NO: 43697 - protein, 978 aa, synthetic construct
  REGION 1..978: note = engineered CasX variant
QEIKRINKIRRRLVKDSNTKKAGKTGPMKTLLVRVMTPDLRERLENLRKKPENIPQPISNTSRANLNKLLTDYTEMKKAILHVYWEEFQKDPVGLMSRVAQPASKKIDQNKLKPEMDEKGNLTTAGFACSQCGQPLFVYKLEQVSEKGKAYTNYFGRCNVAEHEKLIQLAQLKPEKDSDEAVTYSLGKFGQRALDFYSIHVTKESTHPVKPLAQIAGNRYASHPVGKALSDACMGTIASFLSKYQDIIIEHQKVVKGNQKRLESLRELAGKENLEYPSVTLPPQPHTKEGLDAYNEVIARVRMWVNLNLWQKLKLSRDDAKPLLRLKGFPSFPLVERQANEVDWWDMVCNVKKLINEKKEDGKVFWQNLAGYKRQEALRPYLSSEEDRKKGKKFARYQLGDLLLHLEKKHGEDWGKVYDEAWERIDKKVEGLSKHIKLEEERRSEDAQSKAALTDWLRAKASFVIEGLKEADKDEFCRCELKLQKWYGDLRGKPFAIEAENSILDISGFSKQYNCAFIWQKDGVKKLNLYLIINYFKGGKLRFKKIKPEAFEANRFYTVINKKSGEIVPMEVNFNFDDPNLIILPLAFGKRQGREFIWNDLLSLETGSLKLANGRVIEKTLYNRRTRQDEPALFVALTFERREVLDSSNIKPMNLIGVDRGENIPAVIALTDPEGCPLSRFKDSLGNPTHILRIGESYKEKQRTIQAKKEVEQRRAGGYSRKYASKAKNLADDMVRNTARDLLYYAVTQDAMLIFENLSRGFGRQGKRTFMAERQYTRMEDWLTAKLAYEGLPSKTYLSKTLAQYTSKTCSNCGFTITSADYDRVLEKLKKTATGWMTTINGKELKVEGQITYYNRYKRQNVVKDLSVELDRLSEESVNNDISSWTKGRSGEALSLLKKRFSHRPVQEKFVCLNCGFETHADEQAALNIARSWLFLRSQEYKKYQTNKTTGNTDKRAFVETWQSFYRKKLKEVWKPAV

SEQ ID NO: 43698 - protein, 978 aa, synthetic construct
  REGION 1..978: note = engineered CasX variant
QEIKRINKIRRRLVKDSNTKKAGKTGPMKTLLVRVMTPDLRERLENLRKKPENIPQPISNTSRANLNKLLTDYTEMKKAILHVYWEEFQKDPVGLMSRVAQPASKKIDQNKLKPEMDEKGNLTTAGFACSQCGQPLFVYKLEQVSEKGKAYTNYFGRCNVAEHEKLIQLAQLKPEKDSDEAVTYSLGKFGQRALDFYSIHVTKESTHPVKPLAQIAGNRYASSPVGKALSDACMGTIASFLSKYQDIIIEHQKVVKGNQKRLESLRELAGKENLEYPSVTLPPQPHTKEGLDAYNEVIARVRMWVNLNLWQKLKLSRDDAKPLLRLKGFPSFPLVERQANEVDWWDMVCNVKKLINEKKEDGKVFWQNLAGYKRQEALRPYLSSEEDRKKGKKFARYQLGDLLLHLEKKHGEDWGKVYDEAWERIDKKVEGLSKHIKLEEERRSEDAQSKAALTDWLRAKASFVIEGLKEADKDEFCRCELKLQKWYGDLRGKPFAIEAENSILDISGFSKQYNCAFIWQKDGVKKLNLYLIINYFKGGKLRFKKIKPEAFEANRFYTVINKKSGEIVPMEVNFNFDDPNLIILPLAFGKRQGREFIWNDLLSLETGSLKLANGRVIEKTLYNRRTRQDEPALFVALTFERREVLDSSNIKPMNLIGVDRGENIPAVIALTDPEGCPLSRFKDSLGNPTHILRIGESYKEKQRTIQAKKEVEQRRAGGYSRKYASKAKNLADDMVRNTARDLLYYAVTQDAMLIFENLSRGFGRQGKRTFMAERQYTRMEDWLTAKLAYEGLPSKTYLSKTLAQYTSKTCSNCGFTITSADYDRVLEKLKKTATGWMTTINGKELKVEGQITYYNRYKRQNVVKDLSVELDRLSEESVNNDISSWTKGRSGEALSLLKKRFSHRPVQEKFVCLNCGFETHADEQAALNIARSWLFLRSQEYKKYQTNKTTGNTDKRAFVETWQSFYRKKLKEVWKPAV

SEQ ID NO: 43699 - protein, 978 aa, synthetic construct
  REGION 1..978: note = engineered CasX variant
QEIKRINKIRRRLVKDSNTKKAGKTGPMKTLLVRVMTPDLRERLENLRKKPENIPQPISNTSRANLNKLLTDYTEMKKAILHVYWEEFQKDPVGLMSRVAQPASKKIDQNKLKPEMDEKGNLTTAGFACSQCGQPLFVYKLEQVSEKGKAYTNYFGRCNVAEHEKLIQLAQLKPEKDSDEAVTYSLGKFGQRALDFYSIHVTKESTHPVKPLAQIAGNRYASTPVGKALSDACMGTIASFLSKYQDIIIEHQKVVKGNQKRLESLRELAGKENLEYPSVTLPPQPHTKEGLDAYNEVIARVRMWVNLNLWQKLKLSRDDAKPLLRLKGFPSFPLVERQANEVDWWDMVCNVKKLINEKKEDGKVFWQNLAGYKRQEALRPYLSSEEDRKKGKKFARYQLGDLLLHLEKKHGEDWGKVYDEAWERIDKKVEGLSKHIKLEEERRSEDAQSKAALTDWLRAKASFVIEGLKEADKDEFCRCELKLQKWYGDLRGKPFAIEAENSILDISGFSKQYNCAFIWQKDGVKKLNLYLIINYFKGGKLRFKKIKPEAFEANRFYTVINKKSGEIVPMEVNFNFDDPNLIILPLAFGKRQGREFIWNDLLSLETGSLKLANGRVIEKTLYNRRTRQDEPALFVALTFERREVLDSSNIKPMNLIGVDRGENIPAVIALTDPEGCPLSRFKDSLGNPTHILRIGESYKEKQRTIQAKKEVEQRRAGGYSRKYASKAKNLADDMVRNTARDLLYYAVTQDAMLIFENLSRGFGRQGKRTFMAERQYTRMEDWLTAKLAYEGLPSKTYLSKTLAQYTSKTCSNCGFTITSADYDRVLEKLKKTATGWMTTINGKELKVEGQITYYNRYKRQNVVKDLSVELDRLSEESVNNDISSWTKGRSGEALSLLKKRFSHRPVQEKFVCLNCGFETHADEQAALNIARSWLFLRSQEYKKYQTNKTTGNTDKRAFVETWQSFYRKKLKEVWKPAV

SEQ ID NO: 43700 - protein, 978 aa, synthetic construct
  REGION 1..978: note = engineered CasX variant
QEIKRINKIRRRLVKDSNTKKAGKTGPMKTLLVRVMTPDLRERLENLRKKPENIPQPISNTSRANLNKLLTDYTEMKKAILHVYWEEFQKDPVGLMSRVAQPASKKIDQNKLKPEMDEKGNLTTAGFACSQCGQPLFVYKLEQVSEKGKAYTNYFGRCNVAEHEKLIQLAQLKPEKDSDEAVTYSLGKFGQRALDFYSIHVTKESTHPVKPLAQIAGNRYASAPVGKALSDACMGTIASFLSKYQDIIIEHQKVVKGNQKRLESLRELAGKENLEYPSVTLPPQPHTKEGLDAYNEVIARVRMWVNLNLWQKLKLSRDDAKPLLRLKGFPSFPLVERQANEVDWWDMVCNVKKLINEKKEDGKVFWQNLAGYKRQEALRPYLSSEEDRKKGKKFARYQLGDLLLHLEKKHGEDWGKVYDEAWERIDKKVEGLSKHIKLEEERRSEDAQSKAALTDWLRAKASFVIEGLKEADKDEFCRCELKLQKWYGDLRGKPFAIEAENSILDISGFSKQYNCAFIWQKDGVKKLNLYLIINYFKGGKLRFKKIKPEAFEANRFYTVINKKSGEIVPMEVNFNFDDPNLIILPLAFGKRQGREFIWNDLLSLETGSLKLANGRVIEKTLYNRRTRQDEPALFVALTFERREVLDSSNIKPMNLIGVDRGENIPAVIALTDPEGCPLSRFKDSLGNPTHILRIGESYKEKQRTIQAKKEVEQRRAGGYSRKYASKAKNLADDMVRNTARDLLYYAVTQDAMLIFENLSRGFGRQGKRTFMAERQYTRMEDWLTAKLAYEGLPSKTYLSKTLAQYTSKTCSNCGFTITSADYDRVLEKLKKTATGWMTTINGKELKVEGQITYYNRYKRQNVVKDLSVELDRLSEESVNNDISSWTKGRSGEALSLLKKRFSHRPVQEKFVCLNCGFETHADEQAALNIARSWLFLRSQEYKKYQTNKTTGNTDKRAFVETWQSFYRKKLKEVWKPAV

SEQ ID NO: 43701 - protein, 978 aa, synthetic construct
  REGION 1..978: note = engineered CasX variant
QEIKRINKIRRRLVKDSNTKKAGKTGPMKTLLVRVMTPDLRERLENLRKKPENIPQPISNTSRANLNKLLTDYTEMKKAILHVYWEEFQKDPVGLMSRVAQPASKKIDQNKLKPEMDEKGNLTTAGFACSQCGQPLFVYKLEQVSEKGKAYTNYFGRCNVAEHEKLIQLAQLKPEKDSDEAVTYSLGKFGQRALDFYSIHVTKESTHPVKPLAQIAGNRYASVPVGKALSDACMGTIASFLSKYQDIIIEHQKVVKGNQKRLESLRELAGKENLEYPSVTLPPQPHTKEGLDAYNEVIARVRMWVNLNLWQKLKLSRDDAKPLLRLKGFPSFPLVERQANEVDWWDMVCNVKKLINEKKEDGKVFWQNLAGYKRQEALRPYLSSEEDRKKGKKFARYQLGDLLLHLEKKHGEDWGKVYDEAWERIDKKVEGLSKHIKLEEERRSEDAQSKAALTDWLRAKASFVIEGLKEADKDEFCRCELKLQKWYGDLRGKPFAIEAENSILDISGFSKQYNCAFIWQKDGVKKLNLYLIINYFKGGKLRFKKIKPEAFEANRFYTVINKKSGEIVPMEVNFNFDDPNLIILPLAFGKRQGREFIWNDLLSLETGSLKLANGRVIEKTLYNRRTRQDEPALFVALTFERREVLDSSNIKPMNLIGVDRGENIPAVIALTDPEGCPLSRFKDSLGNPTHILRIGESYKEKQRTIQAKKEVEQRRAGGYSRKYASKAKNLADDMVRNTARDLLYYAVTQDAMLIFENLSRGFGRQGKRTFMAERQYTRMEDWLTAKLAYEGLPSKTYLSKTLAQYTSKTCSNCGFTITSADYDRVLEKLKKTATGWMTTINGKELKVEGQITYYNRYKRQNVVKDLSVELDRLSEESVNNDISSWTKGRSGEALSLLKKRFSHRPVQEKFVCLNCGFETHADEQAALNIARSWLFLRSQEYKKYQTNKTTGNTDKRAFVETWQSFYRKKLKEVWKPAV

SEQ ID NO: 43702 - protein, 979 aa, synthetic construct
  REGION 1..979: note = engineered CasX variant
QEIKRINKIRRRLVKDSNTKKAGKTGPMKTLLVRVMTPDLRERLENLRKKPENIPQPISNTSRANLNKLLTDYTEMKKAILHVYWEEFQKDPVGLMSRVAQPASKKIDQNKLKPEMDEKGNLTTAGFACSQCGQPLFVYKLEQVSEKGKAYTNYFGRCNVAEHEKLIQKLAQLKPEKDSDEAVTYSLGKFGQRALDFYSIHVTKESTHPVKPLAQIAGNRYASGPVGKALSDACMGTIASFLSKYQDIIIEHQKVVKGNQKRLESLRELAGKENLEYPSVTLPPQPHTKEGLDAYNEVIARVRMWVNLNLWQKLKLSRDDAKPLLRLKGFPSFPLVERQANEVDWWDMVCNVKKLINEKKEDGKVFWQNLAGYKRQEALRPYLSSEEDRKKGKKFARYQLGDLLLHLEKKHGEDWGKVYDEAWERIDKKVEGLSKHIKLEEERRSEDAQSKAALTDWLRAKASFVIEGLKEADKDEFCRCELKLQKWYGDLRGKPFAIEAENSILDISGFSKQYNCAFIWQKDGVKKLNLYLIINYFKGGKLRFKKIKPEAFEANRFYTVINKKSGEIVPMEVNFNFDDPNLIILPLAFGKRQGREFIWNDLLSLETGSLKLANGRVIEKTLYNRRTRQDEPALFVALTFERREVLDSSNIKPMNLIGVDRGENIPAVIALTDPEGCPLSRFKDSLGNPTHILRIGESYKEKQRTIQAKKEVEQRRAGGYSRKYASKAKNLADDMVRNTARDLLYYAVTQDAMLIFENLSRGFGRQGKRTFMAERQYTRMEDWLTAKLAYEGLPSKTYLSKTLAQYTSKTCSNCGFTITSADYDRVLEKLKKTATGWMTTINGKELKVEGQITYYNRYKRQNVVKDLSVELDRLSEESVNNDISSWTKGRSGEALSLLKKRFSHRPVQEKFVCLNCGFETHADEQAALNIARSWLFLRSQEYKKYQTNKTTGNTDKRAFVETWQSFYRKKLKEVWKPAV

SEQ ID NO: 43703 - protein, 977 aa, synthetic construct
  REGION 1..977: note = engineered CasX variant
QEIKRINKIRRRLVKDSNTKKAGKTGPMKTLLVRVMTPDLRERLENLRKKPENIPQPISNTSRANLNKLLTDYTEMKKAILHVYWEEFQKDPVGLMSRVAQPASKKIDQNKLKPEMDEKGNLTTAGFACSQCGQPLFVYKLEQVSEKGKAYTNYFGRCNVAEHEKLIQLAQLKPEKDSDEAVTYSLGKFGQRALDFYSIHVTKESTHPVKPLAQIAGNRYASPVGKALSDACMGTIASFLSKYQDIIIEHQKVVKGNQKRLESLRELAGKENLEYPSVTLPPQPHTKEGLDAYNEVIARVRMWVNLNLWQKLKLSRDDAKPLLRLKGFPSFPLVERQANEVDWWDMVCNVKKLINEKKEDGKVFWQNLAGYKRQEALRPYLSSEEDRKKGKKFARYQLGDLLLHLEKKHGEDWGKVYDEAWERIDKKVEGLSKHIKLEEERRSEDAQSKAALTDWLRAKASFVIEGLKEADKDEFCRCELKLQKWYGDLRGKPFAIEAENSILDISGFSKQYNCAFIWQKDGVKKLNLYLIINYFKGGKLRFKKIKPEAFEANRFYTVINKKSGEIVPMEVNFNFDDPNLIILPLAFGKRQGREFIWNDLLSLETGSLKLANGRVIEKTLYNRRTRQDEPALFVALTFERREVLDSSNIKPMNLIGVDRGENIPAVIALTDPEGCPLSRFKDSLGNPTHILRIGESYKEKQRTIQAKKEVEQRRAGGYSRKYASKAKNLADDMVRNTARDLLYYAVTQDAMLIFENLSRGFGRQGKRTFMAERQYTRMEDWLTAKLAYEGLPSKTYLSKTLAQYTSKTCSNCGFTITSADYDRVLEKLKKTATGWMTTINGKELKVEGQITYYNRYKRQNVVKDLSVELDRLSEESVNNDISSWTKGRSGEALSLLKKRFSHRPVQEKFVCLNCGFETHADEQAALNIARSWLFLRSQEYKKYQTNKTTGNTDKRAFVETWQSFYRKKLKEVWKPAV

SEQ ID NO: 43704 - protein, 978 aa, synthetic construct
  REGION 1..978: note = engineered CasX variant
QEIKRINKIRRRLVKDSNTKKAGKTGPMKTLLVRVMTPDLRERLENLRKKPENIPQPISNTSRANLNKLLTDYTEMKKAILHVYWEEFQKDPVGLMSRVAQPASKKIDQNKLKPEMDEKGNLTTAGFACSQCGQPLFVYKLEQVSEKGKAYTNYFGRCNVAEHEKLILLAQLKPEKDSDEAVTYSLGKFGQRALDFYSIHVTKESTHPVKPLAQIAGNRYASYPVGKALSDACMGTIASFLSKYQDIIIEHQKVVKGNQKRLESLRELAGKENLEYPSVTLPPQPHTKEGLDAYNEVIARVRMWVNLNLWQKLKLSRDDAKPLLRLKGFPSFPLVERQANEVDWWDMVCNVKKLINEKKEDGKVFWQNLAIYKRQEALRPYLSSEEDRKKGKKFARYQLGDLLLHLEKKHGEDWGKVYDEAWERIDKKVEGLSKHIKLEEERRSEDAQSKAALTDWLRAKASFVIEGLKEADKDEFCRCELKLQKWYGDLRGKPFAIEAENSILDISGFSKQYNCAFIWQKDGVKKLNLYLIINYFKGGKLRFKKIKPEAFEANRFYTVINKKSGEIVPMEVNFNFDDPNLIILPLAFGKRQGREFIWNDLLSLETGSLKLANGRVIEKTLYNRRTRQDEPALFVALTFERREVLDSSNIKPMNLIGVDRGENIPAVIALTDPEGCPLSRFKDSLGNPTHILRIGESYKEKQRTIQAKKEVEQRRAGGYSRKYASKAKNLADDMVRNTARDLLYYAVTQDAMLIFENLSRGFGRQGKRTFMAERQYTRMEDWLTAKLAYEGLPSKTYLSKTLAQYTSKTCSNCGFTITSADYDRVLEKLKKTATGWMTTINGKELKVEGQITYYNRYKRQNVVKDLSVELDRLSEESVNNDISSWTKGRSGEALSLLKKRFSHRPVQEKFVCLNCGFETHADEQAALNIARSWLFLRSQEYKKYQTNKTTGNTDKRAFVETWQSFYRKKLKEVWKPAV

SEQ ID NO: 43705 - protein, 978 aa, synthetic construct
  REGION 1..978: note = engineered CasX variant
QEIKRINKIRRRLVKDSNTKKAGKTGPMKTLLVRVMTPDLRERLENLRKKPENIPQPISNTSRANLNKLLTDYTEMKKAILHVYWEEFQKDPVGLMSRVAQPASKKIDQNKLKPEMDEKGNLTTAGFACSQCGQPLFVYKLEQVSEKGKAYTNYFGRCNVAEHEKLILLAQLKPEKDSDEAVTYSLGKFGQRALDFYSIHVTKESTHPVKPLAQIAGNRYASHPVGKALSDACMGTIASFLSKYQDIIIEHQKVVKGNQKRLESLRELAGKENLEYPSVTLPPQPHTKEGLDAYNEVIARVRMWVNLNLWQKLKLSRDDAKPLLRLKGFPSFPLVERQANEVDWWDMVCNVKKLINEKKEDGKVFWQNLAIYKRQEALRPYLSSEEDRKKGKKFARYQLGDLLLHLEKKHGEDWGKVYDEAWERIDKKVEGLSKHIKLEEERRSEDAQSKAALTDWLRAKASFVIEGLKEADKDEFCRCELKLQKWYGDLRGKPFAIEAENSILDISGFSKQYNCAFIWQKDGVKKLNLYLIINYFKGGKLRFKKIKPEAFEANRFYTVINKKSGEIVPMEVNFNFDDPNLIILPLAFGKRQGREFIWNDLLSLETGSLKLANGRVIEKTLYNRRTRQDEPALFVALTFERREVLDSSNIKPMNLIGVDRGENIPAVIALTDPEGCPLSRFKDSLGNPTHILRIGESYKEKQRTIQAKKEVEQRRAGGYSRKYASKAKNLADDMVRNTARDLLYYAVTQDAMLIFENLSRGFGRQGKRTFMAERQYTRMEDWLTAKLAYEGLPSKTYLSKTLAQYTSKTCSNCGFTITSADYDRVLEKLKKTATGWMTTINGKELKVEGQITYYNRYKRQNVVKDLSVELDRLSEESVNNDISSWTKGRSGEALSLLKKRFSHRPVQEKFVCLNCGFETHADEQAALNIARSWLFLRSQEYKKYQTNKTTGNTDKRAFVETWQSFYRKKLKEVWKPAV

SEQ ID NO: 43706 - protein, 978 aa, synthetic construct
  REGION 1..978: note = engineered CasX variant
QEIKRINKIRRRLVKDSNTKKAGKTGPMKTLLVRVMTPDLRERLENLRKKPENIPQPISNTSRANLNKLLTDYTEMKKAILHVYWEEFQKDPVGLMSRVAQPASKKIDQNKLKPEMDEKGNLTTAGFACSQCGQPLFVYKLEQVSEKGKAYTNYFGRCNVAEHEKLILLAQLKPEKDSDEAVTYSLGKFGQRALDFYSIHVTKESTHPVKPLAQIAGNRYASSPVGKALSDACMGTIASFLSKYQDIIIEHQKVVKGNQKRLESLRELAGKENLEYPSVTLPPQPHTKEGLDAYNEVIARVRMWVNLNLWQKLKLSRDDAKPLLRLKGFPSFPLVERQANEVDWWDMVCNVKKLINEKKEDGKVFWQNLAIYKRQEALRPYLSSEEDRKKGKKFARYQLGDLLLHLEKKHGEDWGKVYDEAWERIDKKVEGLSKHIKLEEERRSEDAQSKAALTDWLRAKASFVIEGLKEADKDEFCRCELKLQKWYGDLRGKPFAIEAENSILDISGFSKQYNCAFIWQKDGVKKLNLYLIINYFKGGKLRFKKIKPEAFEANRFYTVINKKSGEIVPMEVNFNFDDPNLIILPLAFGKRQGREFIWNDLLSLETGSLKLANGRVIEKTLYNRRTRQDEPALFVALTFERREVLDSSNIKPMNLIGVDRGENIPAVIALTDPEGCPLSRFKDSLGNPTHILRIGESYKEKQRTIQAKKEVEQRRAGGYSRKYASKAKNLADDMVRNTARDLLYYAVTQDAMLIFENLSRGFGRQGKRTFMAERQYTRMEDWLTAKLAYEGLPSKTYLSKTLAQYTSKTCSNCGFTITSADYDRVLEKLKKTATGWMTTINGKELKVEGQITYYNRYKRQNVVKDLSVELDRLSEESVNNDISSWTKGRSGEALSLLKKRFSHRPVQEKFVCLNCGFETHADEQAALNIARSWLFLRSQEYKKYQTNKTTGNTDKRAFVETWQSFYRKKLKEVWKPAV

SEQ ID NO: 43707 - protein, 978 aa, synthetic construct
  REGION 1..978: note = engineered CasX variant
QEIKRINKIRRRLVKDSNTKKAGKTGPMKTLLVRVMTPDLRERLENLRKKPENIPQPISNTSRANLNKLLTDYTEMKKAILHVYWEEFQKDPVGLMSRVAQPASKKIDQNKLKPEMDEKGNLTTAGFACSQCGQPLFVYKLEQVSEKGKAYTNYFGRCNVAEHEKLILLAQLKPEKDSDEAVTYSLGKFGQRALDFYSIHVTKESTHPVKPLAQIAGNRYASTPVGKALSDACMGTIASFLSKYQDIIIEHQKVVKGNQKRLESLRELAGKENLEYPSVTLPPQPHTKEGLDAYNEVIARVRMWVNLNLWQKLKLSRDDAKPLLRLKGFPSFPLVERQANEVDWWDMVCNVKKLINEKKEDGKVFWQNLAIYKRQEALRPYLSSEEDRKKGKKFARYQLGDLLLHLEKKHGEDWGKVYDEAWERIDKKVEGLSKHIKLEEERRSEDAQSKAALTDWLRAKASFVIEGLKEADKDEFCRCELKLQKWYGDLRGKPFAIEAENSILDISGFSKQYNCAFIWQKDGVKKLNLYLIINYFKGGKLRFKKIKPEAFEANRFYTVINKKSGEIVPMEVNFNFDDPNLIILPLAFGKRQGREFIWNDLLSLETGSLKLANGRVIEKTLYNRRTRQDEPALFVALTFERREVLDSSNIKPMNLIGVDRGENIPAVIALTDPEGCPLSRFKDSLGNPTHILRIGESYKEKQRTIQAKKEVEQRRAGGYSRKYASKAKNLADDMVRNTARDLLYYAVTQDAMLIFENLSRGFGRQGKRTFMAERQYTRMEDWLTAKLAYEGLPSKTYLSKTLAQYTSKTCSNCGFTITSADYDRVLEKLKKTATGWMTTINGKELKVEGQITYYNRYKRQNVVKDLSVELDRLSEESVNNDISSWTKGRSGEALSLLKKRFSHRPVQEKFVCLNCGFETHADEQAALNIARSWLFLRSQEYKKYQTNKTTGNTDKRAFVETWQSFYRKKLKEVWKPAV

SEQ ID NO: 43708 - protein, 978 aa, synthetic construct
  REGION 1..978: note = engineered CasX variant
QEIKRINKIRRRLVKDSNTKKAGKTGPMKTLLVRVMTPDLRERLENLRKKPENIPQPISNTSRANLNKLLTDYTEMKKAILHVYWEEFQKDPVGLMSRVAQPASKKIDQNKLKPEMDEKGNLTTAGFACSQCGQPLFVYKLEQVSEKGKAYTNYFGRCNVAEHEKLILLAQLKPEKDSDEAVTYSLGKFGQRALDFYSIHVTKESTHPVKPLAQIAGNRYASAPVGKALSDACMGTIASFLSKYQDIIIEHQKVVKGNQKRLESLRELAGKENLEYPSVTLPPQPHTKEGLDAYNEVIARVRMWVNLNLWQKLKLSRDDAKPLLRLKGFPSFPLVERQANEVDWWDMVCNVKKLINEKKEDGKVFWQNLAIYKRQEALRPYLSSEEDRKKGKKFARYQLGDLLLHLEKKHGEDWGKVYDEAWERIDKKVEGLSKHIKLEEERRSEDAQSKAALTDWLRAKASFVIEGLKEADKDEFCRCELKLQKWYGDLRGKPFAIEAENSILDISGFSKQYNCAFIWQKDGVKKLNLYLIINYFKGGKLRFKKIKPEAFEANRFYTVINKKSGEIVPMEVNFNFDDPNLIILPLAFGKRQGREFIWNDLLSLETGSLKLANGRVIEKTLYNRRTRQDEPALFVALTFERREVLDSSNIKPMNLIGVDRGENIPAVIALTDPEGCPLSRFKDSLGNPTHILRIGESYKEKQRTIQAKKEVEQRRAGGYSRKYASKAKNLADDMVRNTARDLLYYAVTQDAMLIFENLSRGFGRQGKRTFMAERQYTRMEDWLTAKLAYEGLPSKTYLSKTLAQYTSKTCSNCGFTITSADYDRVLEKLKKTATGWMTTINGKELKVEGQITYYNRYKRQNVVKDLSVELDRLSEESVNNDISSWTKGRSGEALSLLKKRFSHRPVQEKFVCLNCGFETHADEQAALNIARSWLFLRSQEYKKYQTNKTTGNTDKRAFVETWQSFYRKKLKEVWKPAV

SEQ ID NO: 43709 - protein, 978 aa, synthetic construct
  REGION 1..978: note = engineered CasX variant
QEIKRINKIRRRLVKDSNTKKAGKTGPMKTLLVRVMTPDLRERLENLRKKPENIPQPISNTSRANLNKLLTDYTEMKKAILHVYWEEFQKDPVGLMSRVAQPASKKIDQNKLKPEMDEKGNLTTAGFACSQCGQPLFVYKLEQVSEKGKAYTNYFGRCNVAEHEKLILLAQLKPEKDSDEAVTYSLGKFGQRALDFYSIHVTKESTHPVKPLAQIAGNRYASVPVGKALSDACMGTIASFLSKYQDIIIEHQKVVKGNQKRLESLRELAGKENLEYPSVTLPPQPHTKEGLDAYNEVIARVRMWVNLNLWQKLKLSRDDAKPLLRLKGFPSFPLVERQANEVDWWDMVCNVKKLINEKKEDGKVFWQNLAIYKRQEALRPYLSSEEDRKKGKKFARYQLGDLLLHLEKKHGEDWGKVYDEAWERIDKKVEGLSKHIKLEEERRSEDAQSKAALTDWLRAKASFVIEGLKEADKDEFCRCELKLQKWYGDLRGKPFAIEAENSILDISGFSKQYNCAFIWQKDGVKKLNLYLIINYFKGGKLRFKKIKPEAFEANRFYTVINKKSGEIVPMEVNFNFDDPNLIILPLAFGKRQGREFIWNDLLSLETGSLKLANGRVIEKTLYNRRTRQDEPALFVALTFERREVLDSSNIKPMNLIGVDRGENIPAVIALTDPEGCPLSRFKDSLGNPTHILRIGESYKEKQRTIQAKKEVEQRRAGGYSRKYASKAKNLADDMVRNTARDLLYYAVTQDAMLIFENLSRGFGRQGKRTFMAERQYTRMEDWLTAKLAYEGLPSKTYLSKTLAQYTSKTCSNCGFTITSADYDRVLEKLKKTATGWMTTINGKELKVEGQITYYNRYKRQNVVKDLSVELDRLSEESVNNDISSWTKGRSGEALSLLKKRFSHRPVQEKFVCLNCGFETHADEQAALNIARSWLFLRSQEYKKYQTNKTTGNTDKRAFVETWQSFYRKKLKEVWKPAV

SEQ ID NO: 43710 - protein, 978 aa, synthetic construct
  REGION 1..978: note = engineered CasX variant
QEIKRINKIRRRLVKDSNTKKAGKTGPMKTLLVRVMTPDLRERLENLRKKPENIPQPISNTSRANLNKLLTDYTEMKKAILHVYWEEFQKDPVGLMSRVAQPASKKIDQNKLKPEMDEKGNLTTAGFACSQCGQPLFVYKLEQVSEKGKAYTNYFGRCNVAEHEKLIKLAQLKPEKDSDEAVTYSLGKFGQRALDFYSIHVTKESTHPVKPLAQIAGNRYASGPVGKALSDACMGTIASFLSKYQDIIIEHQKVVKGNQKRLESLRELAGKENLEYPSVTLPPQPHTKEGLDAYNEVIARVRMWVNLNLWQKLKLSRDDAKPLLRLKGFPSFPLVERQANEVDWWDMVCNVKKLINEKKEDGKVFWQNLAIYKRQEALRPYLSSEEDRKKGKKFARYQLGDLLLHLEKKHGEDWGKVYDEAWERIDKKVEGLSKHIKLEEERRSEDAQSKAALTDWLRAKASFVIEGLKEADKDEFCRCELKLQKWYGDLRGKPFAIEAENSILDISGFSKQYNCAFIWQKDGVKKLNLYLIINYFKGGKLRFKKIKPEAFEANRFYTVINKKSGEIVPMEVNFNFDDPNLIILPLAFGKRQGREFIWNDLLSLETGSLKLANGRVIEKTLYNRRTRQDEPALFVALTFERREVLDSSNIKPMNLIGVDRGENIPAVIALTDPEGCPLSRFKDSLGNPTHILRIGESYKEKQRTIQAKKEVEQRRAGGYSRKYASKAKNLADDMVRNTARDLLYYAVTQDAMLIFENLSRGFGRQGKRTFMAERQYTRMEDWLTAKLAYEGLPSKTYLSKTLAQYTSKTCSNCGFTITSADYDRVLEKLKKTATGWMTTINGKELKVEGQITYYNRYKRQNVVKDLSVELDRLSEESVNNDISSWTKGRSGEALSLLKKRFSHRPVQEKFVCLNCGFETHADEQAALNIARSWLFLRSQEYKKYQTNKTTGNTDKRAFVETWQSFYRKKLKEVWKPAV

SEQ ID NO: 43711 - protein, 977 aa, synthetic construct
  REGION 1..977: note = engineered CasX variant
QEIKRINKIRRRLVKDSNTKKAGKTGPMKTLLVRVMTPDLRERLENLRKKPENIPQPISNTSRANLNKLLTDYTEMKKAILHVYWEEFQKDPVGLMSRVAQPASKKIDQNKLKPEMDEKGNLTTAGFACSQCGQPLFVYKLEQVSEKGKAYTNYFGRCNVAEHEKLILLAQLKPEKDSDEAVTYSLGKFGQRALDFYSIHVTKESTHPVKPLAQIAGNRYASPVGKALSDACMGTIASFLSKYQDIIIEHQKVVKGNQKRLESLRELAGKENLEYPSVTLPPQPHTKEGLDAYNEVIARVRMWVNLNLWQKLKLSRDDAKPLLRLKGFPSFPLVERQANEVDWWDMVCNVKKLINEKKEDGKVFWQNLAIYKRQEALRPYLSSEEDRKKGKKFARYQLGDLLLHLEKKHGEDWGKVYDEAWERIDKKVEGLSKHIKLEEERRSEDAQSKAALTDWLRAKASFVIEGLKEADKDEFCRCELKLQKWYGDLRGKPFAIEAENSILDISGFSKQYNCAFIWQKDGVKKLNLYLIINYFKGGKLRFKKIKPEAFEANRFYTVINKKSGEIVPMEVNFNFDDPNLIILPLAFGKRQGREFIWNDLLSLETGSLKLANGRVIEKTLYNRRTRQDEPALFVALTFERREVLDSSNIKPMNLIGVDRGENIPAVIALTDPEGCPLSRFKDSLGNPTHILRIGESYKEKQRTIQAKKEVEQRRAGGYSRKYASKAKNLADDMVRNTARDLLYYAVTQDAMLIFENLSRGFGRQGKRTFMAERQYTRMEDWLTAKLAYEGLPSKTYLSKTLAQYTSKTCSNCGFTITSADYDRVLEKLKKTATGWMTTINGKELKVEGQITYYNRYKRQNVVKDLSVELDRLSEESVNNDISSWTKGRSGEALSLLKKRFSHRPVQEKFVCLNCGFETHADEQAALNIARSWLFLRSQEYKKYQTNKTTGNTDKRAFVETWQSFYRKKLKEVWKPAV

SEQ ID NO: 43712 - protein, 978 aa, synthetic construct
  REGION 1..978: note = engineered CasX variant
QEIKRINKIRRRLVKDSNTKKAGKTGPMKTLLVRVMTPDLRERLENLRKKPENIPQPISNTSRANLNKLLTDYTEMKKAILHVYWEEFQKDPVGLMSRVAQPASKKIDQNKLKPEMDEKGNLTTAGFACSQCGQPLFVYKLEQVSEKGKAYTNYFGRCNVAEHEKLILLAQLKPEKDSDEAVTYSLGKFGQRALDFYSIHVTKESTHPVKPLAQIAGNRYASYPVGKALSDACMGTIASFLSKYQDIIIEHQKVVKGNQKRLESLRELAGKENLEYPSVTLPPQPHTKEGLDAYNEVIARVRMWVNLNLWQKLKLSRDDAKPLLRLKGFPSFPLVERQANEVDWWDMVCNVKKLINEKKEDGKVFWQNLAGYKRQEALRPYLSSEEDREKGKKFARYQLGDLLLHLEKKHGEDWGKVYDEAWERIDKKVEGLSKHIKLEEERRSEDAQSKAALTDWLRAKASFVIEGLKEADKDEFCRCELKLQKWYGDLRGKPFAIEAENSILDISGFSKQYNCAFIWQKDGVKKLNLYLIINYFKGGKLRFKKIKPEAFEANRFYTVINKKSGEIVPMEVNFNFDDPNLIILPLAFGKRQGREFIWNDLLSLETGSLKLANGRVIEKTLYNRRTRQDEPALFVALTFERREVLDSSNIKPMNLIGVDRGENIPAVIALTDPEGCPLSRFKDSLGNPTHILRIGESYKEKQRTIQAKKEVEQRRAGGYSRKYASKAKNLADDMVRNTARDLLYYAVTQDAMLIFENLSRGFGRQGKRTFMAERQYTRMEDWLTAKLAYEGLPSKTYLSKTLAQYTSKTCSNCGFTITSADYDRVLEKLKKTATGWMTTINGKELKVEGQITYYNRYKRQNVVKDLSVELDRLSEESVNNDISSWTKGRSGEALSLLKKRFSHRPVQEKFVCLNCGFETHADEQAALNIARSWLFLRSQEYKKYQTNKTTGNTDKRAFVETWQSFYRKKLKEVWKPAV

SEQ ID NO: 43713 - protein, 978 aa, synthetic construct
  REGION 1..978: note = engineered CasX variant
QEIKRINKIRRRLVKDSNTKKAGKTGPMKTLLVRVMTPDLRERLENLRKKPENIPQPISNTSRANLNKLLTDYTEMKKAILHVYWEEFQKDPVGLMSRVAQPASKKIDQNKLKPEMDEKGNLTTAGFACSQCGQPLFVYKLEQVSEKGKAYTNYFGRCNVAEHEKLILLAQLKPEKDSDEAVTYSLGKFGQRALDFYSIHVTKESTHPVKPLAQIAGNRYASHPVGKALSDACMGTIASFLSKYQDIIIEHQKVVKGNQKRLESLRELAGKENLEYPSVTLPPQPHTKEGLDAYNEVIARVRMWVNLNLWQKLKLSRDDAKPLLRLKGFPSFPLVERQANEVDWWDMVCNVKKLINEKKEDGKVFWQNLAGYKRQEALRPYLSSEEDREKGKKFARYQLGDLLLHLEKKHGEDWGKVYDEAWERIDKKVEGLSKHIKLEEERRSEDAQSKAALTDWLRAKASFVIEGLKEADKDEFCRCELKLQKWYGDLRGKPFAIEAENSILDISGFSKQYNCAFIWQKDGVKKLNLYLIINYFKGGKLRFKKIKPEAFEANRFYTVINKKSGEIVPMEVNFNFDDPNLIILPLAFGKRQGREFIWNDLLSLETGSLKLANGRVIEKTLYNRRTRQDEPALFVALTFERREVLDSSNIKPMNLIGVDRGENIPAVIALTDPEGCPLSRFKDSLGNPTHILRIGESYKEKQRTIQAKKEVEQRRAGGYSRKYASKAKNLADDMVRNTARDLLYYAVTQDAMLIFENLSRGFGRQGKRTFMAERQYTRMEDWLTAKLAYEGLPSKTYLSKTLAQYTSKTCSNCGFTITSADYDRVLEKLKKTATGWMTTINGKELKVEGQITYYNRYKRQNVVKDLSVELDRLSEESVNNDISSWTKGRSGEALSLLKKRFSHRPVQEKFVCLNCGFETHADEQAALNIARSWLFLRSQEYKKYQTNKTTGNTDKRAFVETWQSFYRKKLKEVWKPAV

SEQ ID NO: 43714 - protein, 978 aa, synthetic construct
  REGION 1..978: note = engineered CasX variant
QEIKRINKIRRRLVKDSNTKKAGKTGPMKTLLVRVMTPDLRERLENLRKKPENIPQPISNTSRANLNKLLTDYTEMKKAILHVYWEEFQKDPVGLMSRVAQPASKKIDQNKLKPEMDEKGNLTTAGFACSQCGQPLFVYKLEQVSEKGKAYTNYFGRCNVAEHEKLILLAQLKPEKDSDEAVTYSLGKFGQRALDFYSIHVTKESTHPVKPLAQIAGNRYASSPVGKALSDACMGTIASFLSKYQDIIIEHQKVVKGNQKRLESLRELAGKENLEYPSVTLPPQPHTKEGLDAYNEVIARVRMWVNLNLWQKLKLSRDDAKPLLRLKGFPSFPLVERQANEVDWWDMVCNVKKLINEKKEDGKVFWQNLAGYKRQEALRPYLSSEEDREKGKKFARYQLGDLLLHLEKKHGEDWGKVYDEAWERIDKKVEGLSKHIKLEEERRSEDAQSKAALTDWLRAKASFVIEGLKEADKDEFCRCELKLQKWYGDLRGKPFAIEAENSILDISGFSKQYNCAFIWQKDGVKKLNLYLIINYFKGGKLRFKKIKPEAFEANRFYTVINKKSGEIVPMEVNFNFDDPNLIILPLAFGKRQGREFIWNDLLSLETGSLKLANGRVIEKTLYNRRTRQDEPALFVALTFERREVLDSSNIKPMNLIGVDRGENIPAVIALTDPEGCPLSRFKDSLGNPTHILRIGESYKEKQRTIQAKKEVEQRRAGGYSRKYASKAKNLADDMVRNTARDLLYYAVTQDAMLIFENLSRGFGRQGKRTFMAERQYTRMEDWLTAKLAYEGLPSKTYLSKTLAQYTSKTCSNCGFTITSADYDRVLEKLKKTATGWMTTINGKELKVEGQITYYNRYKRQNVVKDLSVELDRLSEESVNNDISSWTKGRSGEALSLLKKRFSHRPVQEKFVCLNCGFETHADEQAALNIARSWLFLRSQEYKKYQTNKTTGNTDKRAFVETWQSFYRKKLKEVWKPAV

SEQ ID NO: 43715 - protein, 978 aa, synthetic construct
  REGION 1..978: note = engineered CasX variant
QEIKRINKIRRRLVKDSNTKKAGKTGPMKTLLVRVMTPDLRERLENLRKKPENIPQPISNTSRANLNKLLTDYTEMKKAILHVYWEEFQKDPVGLMSRVAQPASKKIDQNKLKPEMDEKGNLTTAGFACSQCGQPLFVYKLEQVSEKGKAYTNYFGRCNVAEHEKLILLAQLKPEKDSDEAVTYSLGKFGQRALDFYSIHVTKESTHPVKPLAQIAGNRYASTPVGKALSDACMGTIASFLSKYQDIIIEHQKVVKGNQKRLESLRELAGKENLEYPSVTLPPQPHTKEGLDAYNEVIARVRMWVNLNLWQKLKLSRDDAKPLLRLKGFPSFPLVERQANEVDWWDMVCNVKKLINEKKEDGKVFWQNLAGYKRQEALRPYLSSEEDREKGKKFARYQLGDLLLHLEKKHGEDWGKVYDEAWERIDKKVEGLSKHIKLEEERRSEDAQSKAALTDWLRAKASFVIEGLKEADKDEFCRCELKLQKWYGDLRGKPFAIEAENSILDISGFSKQYNCAFIWQKDGVKKLNLYLIINYFKGGKLRFKKIKPEAFEANRFYTVINKKSGEIVPMEVNFNFDDPNLIILPLAFGKRQGREFIWNDLLSLETGSLKLANGRVIEKTLYNRRTRQDEPALFVALTFERREVLDSSNIKPMNLIGVDRGENIPAVIALTDPEGCPLSRFKDSLGNPTHILRIGESYKEKQRTIQAKKEVEQRRAGGYSRKYASKAKNLADDMVRNTARDLLYYAVTQDAMLIFENLSRGFGRQGKRTFMAERQYTRMEDWLTAKLAYEGLPSKTYLSKTLAQYTSKTCSNCGFTITSADYDRVLEKLKKTATGWMTTINGKELKVEGQITYYNRYKRQNVVKDLSVELDRLSEESVNNDISSWTKGRSGEALSLLKKRFSHRPVQEKFVCLNCGFETHADEQAALNIARSWLFLRSQEYKKYQTNKTTGNTDKRAFVETWQSFYRKKLKEVWKPAV

SEQ ID NO: 43716 - protein, 978 aa, synthetic construct
  REGION 1..978: note = engineered CasX variant
QEIKRINKIRRRLVKDSNTKKAGKTGPMKTLLVRVMTPDLRERLENLRKKPENIPQPISNTSRANLNKLLTDYTEMKKAILHVYWEEFQKDPVGLMSRVAQPASKKIDQNKLKPEMDEKGNLTTAGFACSQCGQPLFVYKLEQVSEKGKAYTNYFGRCNVAEHEKLILLAQLKPEKDSDEAVTYSLGKFGQRALDFYSIHVTKESTHPVKPLAQIAGNRYASAPVGKALSDACMGTIASFLSKYQDIIIEHQKVVKGNQKRLESLRELAGKENLEYPSVTLPPQPHTKEGLDAYNEVIARVRMWVNLNLWQKLKLSRDDAKPLLRLKGFPSFPLVERQANEVDWWDMVCNVKKLINEKKEDGKVFWQNLAGYKRQEALRPYLSSEEDREKGKKFARYQLGDLLLHLEKKHGEDWGKVYDEAWERIDKKVEGLSKHIKLEEERRSEDAQSKAALTDWLRAKASFVIEGLKEADKDEFCRCELKLQKWYGDLRGKPFAIEAENSILDISGFSKQYNCAFIWQKDGVKKLNLYLIINYFKGGKLRFKKIKPEAFEANRFYTVINKKSGEIVPMEVNFNFDDPNLIILPLAFGKRQGREFIWNDLLSLETGSLKLANGRVIEKTLYNRRTRQDEPALFVALTFERREVLDSSNIKPMNLIGVDRGENIPAVIALTDPEGCPLSRFKDSLGNPTHILRIGESYKEKQRTIQAKKEVEQRRAGGYSRKYASKAKNLADDMVRNTARDLLYYAVTQDAMLIFENLSRGFGRQGKRTFMAERQYTRMEDWLTAKLAYEGLPSKTYLSKTLAQYTSKTCSNCGFTITSADYDRVLEKLKKTATGWMTTINGKELKVEGQITYYNRYKRQNVVKDLSVELDRLSEESVNNDISSWTKGRSGEALSLLKKRFSHRPVQEKFVCLNCGFETHADEQAALNIARSWLFLRSQEYKKYQTNKTTGNTDKRAFVETWQSFYRKKLKEVWKPAV

SEQ ID NO: 43717 - protein, 978 aa, synthetic construct
  REGION 1..978: note = engineered CasX variant
QEIKRINKIRRRLVKDSNTKKAGKTGPMKTLLVRVMTPDLRERLENLRKKPENIPQPISNTSRANLNKLLTDYTEMKKAILHVYWEEFQKDPVGLMSRVAQPASKKIDQNKLKPEMDEKGNLTTAGFACSQCGQPLFVYKLEQVSEKGKAYTNYFGRCNVAEHEKLILLAQLKPEKDSDEAVTYSLGKFGQRALDFYSIHVTKESTHPVKPLAQIAGNRYASVPVGKALSDACMGTIASFLSKYQDIIIEHQKVVKGNQKRLESLRELAGKENLEYPSVTLPPQPHTKEGLDAYNEVIARVRMWVNLNLWQKLKLSRDDAKPLLRLKGFPSFPLVERQANEVDWWDMVCNVKKLINEKKEDGKVFWQNLAGYKRQEALRPYLSSEEDREKGKKFARYQLGDLLLHLEKKHGEDWGKVYDEAWERIDKKVEGLSKHIKLEEERRSEDAQSKAALTDWLRAKASFVIEGLKEADKDEFCRCELKLQKWYGDLRGKPFAIEAENSILDISGFSKQYNCAFIWQKDGVKKLNLYLIINYFKGGKLRFKKIKPEAFEANRFYTVINKKSGEIVPMEVNFNFDDPNLIILPLAFGKRQGREFIWNDLLSLETGSLKLANGRVIEKTLYNRRTRQDEPALFVALTFERREVLDSSNIKPMNLIGVDRGENIPAVIALTDPEGCPLSRFKDSLGNPTHILRIGESYKEKQRTIQAKKEVEQRRAGGYSRKYASKAKNLADDMVRNTARDLLYYAVTQDAMLIFENLSRGFGRQGKRTFMAERQYTRMEDWLTAKLAYEGLPSKTYLSKTLAQYTSKTCSNCGFTITSADYDRVLEKLKKTATGWMTTINGKELKVEGQITYYNRYKRQNVVKDLSVELDRLSEESVNNDISSWTKGRSGEALSLLKKRFSHRPVQEKFVCLNCGFETHADEQAALNIARSWLFLRSQEYKKYQTNKTTGNTDKRAFVETWQSFYRKKLKEVWKPAV

SEQ ID NO: 43718 - protein, 978 aa, synthetic construct
  REGION 1..978: note = engineered CasX variant
QEIKRINKIRRRLVKDSNTKKAGKTGPMKTLLVRVMTPDLRERLENLRKKPENIPQPISNTSRANLNKLLTDYTEMKKAILHVYWEEFQKDPVGLMSRVAQPASKKIDQNKLKPEMDEKGNLTTAGFACSQCGQPLFVYKLEQVSEKGKAYTNYFGRCNVAEHEKLIKLAQLKPEKDSDEAVTYSLGKFGQRALDFYSIHVTKESTHPVKPLAQIAGNRYASGPVGKALSDACMGTIASFLSKYQDIIIEHQKVVKGNQKRLESLRELAGKENLEYPSVTLPPQPHTKEGLDAYNEVIARVRMWVNLNLWQKLKLSRDDAKPLLRLKGFPSFPLVERQANEVDWWDMVCNVKKLINEKKEDGKVFWQNLAGYKRQEALRPYLSSEEDREKGKKFARYQLGDLLLHLEKKHGEDWGKVYDEAWERIDKKVEGLSKHIKLEEERRSEDAQSKAALTDWLRAKASFVIEGLKEADKDEFCRCELKLQKWYGDLRGKPFAIEAENSILDISGFSKQYNCAFIWQKDGVKKLNLYLIINYFKGGKLRFKKIKPEAFEANRFYTVINKKSGEIVPMEVNFNFDDPNLIILPLAFGKRQGREFIWNDLLSLETGSLKLANGRVIEKTLYNRRTRQDEPALFVALTFERREVLDSSNIKPMNLIGVDRGENIPAVIALTDPEGCPLSRFKDSLGNPTHILRIGESYKEKQRTIQAKKEVEQRRAGGYSRKYASKAKNLADDMVRNTARDLLYYAVTQDAMLIFENLSRGFGRQGKRTFMAERQYTRMEDWLTAKLAYEGLPSKTYLSKTLAQYTSKTCSNCGFTITSADYDRVLEKLKKTATGWMTTINGKELKVEGQITYYNRYKRQNVVKDLSVELDRLSEESVNNDISSWTKGRSGEALSLLKKRFSHRPVQEKFVCLNCGFETHADEQAALNIARSWLFLRSQEYKKYQTNKTTGNTDKRAFVETWQSFYRKKLKEVWKPAV

SEQ ID NO: 43719 - protein, 977 aa, synthetic construct
  REGION 1..977: note = engineered CasX variant
QEIKRINKIRRRLVKDSNTKKAGKTGPMKTLLVRVMTPDLRERLENLRKKPENIPQPISNTSRANLNKLLTDYTEMKKAILHVYWEEFQKDPVGLMSRVAQPASKKIDQNKLKPEMDEKGNLTTAGFACSQCGQPLFVYKLEQVSEKGKAYTNYFGRCNVAEHEKLILLAQLKPEKDSDEAVTYSLGKFGQRALDFYSIHVTKESTHPVKPLAQIAGNRYASPVGKALSDACMGTIASFLSKYQDIIIEHQKVVKGNQKRLESLRELAGKENLEYPSVTLPPQPHTKEGLDAYNEVIARVRMWVNLNLWQKLKLSRDDAKPLLRLKGFPSFPLVERQANEVDWWDMVCNVKKLINEKKEDGKVFWQNLAGYKRQEALRPYLSSEEDREKGKKFARYQLGDLLLHLEKKHGEDWGKVYDEAWERIDKKVEGLSKHIKLEEERRSEDAQSKAALTDWLRAKASFVIEGLKEADKDEFCRCELKLQKWYGDLRGKPFAIEAENSILDISGFSKQYNCAFIWQKDGVKKLNLYLIINYFKGGKLRFKKIKPEAFEANRFYTVINKKSGEIVPMEVNFNFDDPNLIILPLAFGKRQGREFIWNDLLSLETGSLKLANGRVIEKTLYNRRTRQDEPALFVALTFERREVLDSSNIKPMNLIGVDRGENIPAVIALTDPEGCPLSRFKDSLGNPTHILRIGESYKEKQRTIQAKKEVEQRRAGGYSRKYASKAKNLADDMVRNTARDLLYYAVTQDAMLIFENLSRGFGRQGKRTFMAERQYTRMEDWLTAKLAYEGLPSKTYLSKTLAQYTSKTCSNCGFTITSADYDRVLEKLKKTATGWMTTINGKELKVEGQITYYNRYKRQNVVKDLSVELDRLSEESVNNDISSWTKGRSGEALSLLKKRFSHRPVQEKFVCLNCGFETHADEQAALNIARSWLFLRSQEYKKYQTNKTTGNTDKRAFVETWQSFYRKKLKEVWKPAV

SEQ ID NO: 43720 - protein, 978 aa, synthetic construct
  REGION 1..978: note = engineered CasX variant
QEIKRINKIRRRLVKDSNTKKAGKTGPMKTLLVRVMTPDLRERLENLRKKPENIPQPISNTSRANLNKLLTDYTEMKKAILHVYWEEFQKDPVGLMSRVAQPASKKIDQNKLKPEMDEKGNLTTAGFACSQCGQPLFVYKLEQVSEKGKAYTNYFGRCNVAEHEKLILLAQLKPEKDSDEAVTYSLGKFGQRALDFYSIHVTKESTHPVKPLAQIAGNRYASYPVGKALSDACMGTIASFLSKYQDIIIEHQKVVKGNQKRLESLRELAGKENLEYPSVTLPPQPHTKEGLDAYNEVIARVRMWVNLNLWQKLKLSRDDAKPLLRLKGFPSFPLVERQANEVDWWDMVCNVKKLINEKKEDGKVFWQNLAGYKRQEALRPYLSSEEDRKKGKKFARYQLGDLLLHLEKKHGEDWGKVYDEAWERIDKKVEGLSKHIKLEEERRSEDAQSKAALTDWLRAKASFVIEGLKEADKDEFCRCELKLQKWYGDLRGKPFAIEAENSILDISGFSKQYNCAFIWQKDGVKKLNLYLIINYFKGGKLRFKKIKPEAFEANRFYTVINKKSGEIVIMEVNFNFDDPNLIILPLAFGKRQGREFIWNDLLSLETGSLKLANGRVIEKTLYNRRTRQDEPALFVALTFERREVLDSSNIKPMNLIGVDRGENIPAVIALTDPEGCPLSRFKDSLGNPTHILRIGESYKEKQRTIQAKKEVEQRRAGGYSRKYASKAKNLADDMVRNTARDLLYYAVTQDAMLIFENLSRGFGRQGKRTFMAERQYTRMEDWLTAKLAYEGLPSKTYLSKTLAQYTSKTCSNCGFTITSADYDRVLEKLKKTATGWMTTINGKELKVEGQITYYNRYKRQNVVKDLSVELDRLSEESVNNDISSWTKGRSGEALSLLKKRFSHRPVQEKFVCLNCGFETHADEQAALNIARSWLFLRSQEYKKYQTNKTTGNTDKRAFVETWQSFYRKKLKEVWKPAV

SEQ ID NO: 43721 - protein, 978 aa, synthetic construct
  REGION 1..978: note = engineered CasX variant
QEIKRINKIRRRLVKDSNTKKAGKTGPMKTLLVRVMTPDLRERLENLRKKPENIPQPISNTSRANLNKLLTDYTEMKKAILHVYWEEFQKDPVGLMSRVAQPASKKIDQNKLKPEMDEKGNLTTAGFACSQCGQPLFVYKLEQVSEKGKAYTNYFGRCNVAEHEKLILLAQLKPEKDSDEAVTYSLGKFGQRALDFYSIHVTKESTHPVKPLAQIAGNRYASHPVGKALSDACMGTIASFLSKYQDIIIEHQKVVKGNQKRLESLRELAGKENLEYPSVTLPPQPHTKEGLDAYNEVIARVRMWVNLNLWQKLKLSRDDAKPLLRLKGFPSFPLVERQANEVDWWDMVCNVKKLINEKKEDGKVFWQNLAGYKRQEALRPYLSSEEDRKKGKKFARYQLGDLLLHLEKKHGEDWGKVYDEAWERIDKKVEGLSKHIKLEEERRSEDAQSKAALTDWLRAKASFVIEGLKEADKDEFCRCELKLQKWYGDLRGKPFAIEAENSILDISGFSKQYNCAFIWQKDGVKKLNLYLIINYFKGGKLRFKKIKPEAFEANRFYTVINKKSGEIVIMEVNFNFDDPNLIILPLAFGKRQGREFIWNDLLSLETGSLKLANGRVIEKTLYNRRTRQDEPALFVALTFERREVLDSSNIKPMNLIGVDRGENIPAVIALTDPEGCPLSRFKDSLGNPTHILRIGESYKEKQRTIQAKKEVEQRRAGGYSRKYASKAKNLADDMVRNTARDLLYYAVTQDAMLIFENLSRGFGRQGKRTFMAERQYTRMEDWLTAKLAYEGLPSKTYLSKTLAQYTSKTCSNCGFTITSADYDRVLEKLKKTATGWMTTINGKELKVEGQITYYNRYKRQNVVKDLSVELDRLSEESVNNDISSWTKGRSGEALSLLKKRFSHRPVQEKFVCLNCGFETHADEQAALNIARSWLFLRSQEYKKYQTNKTTGNTDKRAFVETWQSFYRKKLKEVWKPAV

SEQ ID NO: 43722 - protein, 978 aa, synthetic construct
  REGION 1..978: note = engineered CasX variant
QEIKRINKIRRRLVKDSNTKKAGKTGPMKTLLVRVMTPDLRERLENLRKKPENIPQPISNTSRANLNKLLTDYTEMKKAILHVYWEEFQKDPVGLMSRVAQPASKKIDQNKLKPEMDEKGNLTTAGFACSQCGQPLFVYKLEQVSEKGKAYTNYFGRCNVAEHEKLILLAQLKPEKDSDEAVTYSLGKFGQRALDFYSIHVTKESTHPVKPLAQIAGNRYASSPVGKALSDACMGTIASFLSKYQDIIIEHQKVVKGNQKRLESLRELAGKENLEYPSVTLPPQPHTKEGLDAYNEVIARVRMWVNLNLWQKLKLSRDDAKPLLRLKGFPSFPLVERQANEVDWWDMVCNVKKLINEKKEDGKVFWQNLAGYKRQEALRPYLSSEEDRKKGKKFARYQLGDLLLHLEKKHGEDWGKVYDEAWERIDKKVEGLSKHIKLEEERRSEDAQSKAALTDWLRAKASFVIEGLKEADKDEFCRCELKLQKWYGDLRGKPFAIEAENSILDISGFSKQYNCAFIWQKDGVKKLNLYLIINYFKGGKLRFKKIKPEAFEANRFYTVINKKSGEIVIMEVNFNFDDPNLIILPLAFGKRQGREFIWNDLLSLETGSLKLANGRVIEKTLYNRRTRQDEPALFVALTFERREVLDSSNIKPMNLIGVDRGENIPAVIALTDPEGCPLSRFKDSLGNPTHILRIGESYKEKQRTIQAKKEVEQRRAGGYSRKYASKAKNLADDMVRNTARDLLYYAVTQDAMLIFENLSRGFGRQGKRTFMAERQYTRMEDWLTAKLAYEGLPSKTYLSKTLAQYTSKTCSNCGFTITSADYDRVLEKLKKTATGWMTTINGKELKVEGQITYYNRYKRQNVVKDLSVELDRLSEESVNNDISSWTKGRSGEALSLLKKRFSHRPVQEKFVCLNCGFETHADEQAALNIARSWLFLRSQEYKKYQTNKTTGNTDKRAFVETWQSFYRKKLKEVWKPAV

SEQ ID NO: 43723 - protein, 978 aa, synthetic construct
  REGION 1..978: note = engineered CasX variant
QEIKRINKIRRRLVKDSNTKKAGKTGPMKTLLVRVMTPDLRERLENLRKKPENIPQPISNTSRANLNKLLTDYTEMKKAILHVYWEEFQKDPVGLMSRVAQPASKKIDQNKLKPEMDEKGNLTTAGFACSQCGQPLFVYKLEQVSEKGKAYTNYFGRCNVAEHEKLILLAQLKPEKDSDEAVTYSLGKFGQRALDFYSIHVTKESTHPVKPLAQIAGNRYASTPVGKALSDACMGTIASFLSKYQDIIIEHQKVVKGNQKRLESLRELAGKENLEYPSVTLPPQPHTKEGLDAYNEVIARVRMWVNLNLWQKLKLSRDDAKPLLRLKGFPSFPLVERQANEVDWWDMVCNVKKLINEKKEDGKVFWQNLAGYKRQEALRPYLSSEEDRKKGKKFARYQLGDLLLHLEKKHGEDWGKVYDEAWERIDKKVEGLSKHIKLEEERRSEDAQSKAALTDWLRAKASFVIEGLKEADKDEFCRCELKLQKWYGDLRGKPFAIEAENSILDISGFSKQYNCAFIWQKDGVKKLNLYLIINYFKGGKLRFKKIKPEAFEANRFYTVINKKSGEIVIMEVNFNFDDPNLIILPLAFGKRQGREFIWNDLLSLETGSLKLANGRVIEKTLYNRRTRQDEPALFVALTFERREVLDSSNIKPMNLIGVDRGENIPAVIALTDPEGCPLSRFKDSLGNPTHILRIGESYKEKQRTIQAKKEVEQRRAGGYSRKYASKAKNLADDMVRNTARDLLYYAVTQDAMLIFENLSRGFGRQGKRTFMAERQYTRMEDWLTAKLAYEGLPSKTYLSKTLAQYTSKTCSNCGFTITSADYDRVLEKLKKTATGWMTTINGKELKVEGQITYYNRYKRQNVVKDLSVELDRLSEESVNNDISSWTKGRSGEALSLLKKRFSHRPVQEKFVCLNCGFETHADEQAALNIARSWLFLRSQEYKKYQTNKTTGNTDKRAFVETWQSFYRKKLKEVWKPAV

SEQ ID NO: 43724 - protein, 978 aa, synthetic construct
  REGION 1..978: note = engineered CasX variant
QEIKRINKIRRRLVKDSNTKKAGKTGPMKTLLVRVMTPDLRERLENLRKKPENIPQPISNTSRANLNKLLTDYTEMKKAILHVYWEEFQKDPVGLMSRVAQPASKKIDQNKLKPEMDEKGNLTTAGFACSQCGQPLFVYKLEQVSEKGKAYTNYFGRCNVAEHEKLILLAQLKPEKDSDEAVTYSLGKFGQRALDFYSIHVTKESTHPVKPLAQIAGNRYASAPVGKALSDACMGTIASFLSKYQDIIIEHQKVVKGNQKRLESLRELAGKENLEYPSVTLPPQPHTKEGLDAYNEVIARVRMWVNLNLWQKLKLSRDDAKPLLRLKGFPSFPLVERQANEVDWWDMVCNVKKLINEKKEDGKVFWQNLAGYKRQEALRPYLSSEEDRKKGKKFARYQLGDLLLHLEKKHGEDWGKVYDEAWERIDKKVEGLSKHIKLEEERRSEDAQSKAALTDWLRAKASFVIEGLKEADKDEFCRCELKLQKWYGDLRGKPFAIEAENSILDISGFSKQYNCAFIWQKDGVKKLNLYLIINYFKGGKLRFKKIKPEAFEANRFYTVINKKSGEIVIMEVNFNFDDPNLIILPLAFGKRQGREFIWNDLLSLETGSLKLANGRVIEKTLYNRRTRQDEPALFVALTFERREVLDSSNIKPMNLIGVDRGENIPAVIALTDPEGCPLSRFKDSLGNPTHILRIGESYKEKQRTIQAKKEVEQRRAGGYSRKYASKAKNLADDMVRNTARDLLYYAVTQDAMLIFENLSRGFGRQGKRTFMAERQYTRMEDWLTAKLAYEGLPSKTYLSKTLAQYTSKTCSNCGFTITSADYDRVLEKLKKTATGWMTTINGKELKVEGQITYYNRYKRQNVVKDLSVELDRLSEESVNNDISSWTKGRSGEALSLLKKRFSHRPVQEKFVCLNCGFETHADEQAALNIARSWLFLRSQEYKKYQTNKTTGNTDKRAFVETWQSFYRKKLKEVWKPAV

SEQ ID NO: 43725 - protein, 978 aa, synthetic construct
  REGION 1..978: note = engineered CasX variant
QEIKRINKIRRRLVKDSNTKKAGKTGPMKTLLVRVMTPDLRERLENLRKKPENIPQPISNTSRANLNKLLTDYTEMKKAILHVYWEEFQKDPVGLMSRVAQPASKKIDQNKLKPEMDEKGNLTTAGFACSQCGQPLFVYKLEQVSEKGKAYTNYFGRCNVAEHEKLILLAQLKPEKDSDEAVTYSLGKFGQRALDFYSIHVTKESTHPVKPLAQIAGNRYASVPVGKALSDACMGTIASFLSKYQDIIIEHQKVVKGNQKRLESLRELAGKENLEYPSVTLPPQPHTKEGLDAYNEVIARVRMWVNLNLWQKLKLSRDDAKPLLRLKGFPSFPLVERQANEVDWWDMVCNVKKLINEKKEDGKVFWQNLAGYKRQEALRPYLSSEEDRKKGKKFARYQLGDLLLHLEKKHGEDWGKVYDEAWERIDKKVEGLSKHIKLEEERRSEDAQSKAALTDWLRAKASFVIEGLKEADKDEFCRCELKLQKWYGDLRGKPFAIEAENSILDISGFSKQYNCAFIWQKDGVKKLNLYLIINYFKGGKLRFKKIKPEAFEANRFYTVINKKSGEIVIMEVNFNFDDPNLIILPLAFGKRQGREFIWNDLLSLETGSLKLANGRVIEKTLYNRRTRQDEPALFVALTFERREVLDSSNIKPMNLIGVDRGENIPAVIALTDPEGCPLSRFKDSLGNPTHILRIGESYKEKQRTIQAKKEVEQRRAGGYSRKYASKAKNLADDMVRNTARDLLYYAVTQDAMLIFENLSRGFGRQGKRTFMAERQYTRMEDWLTAKLAYEGLPSKTYLSKTLAQYTSKTCSNCGFTITSADYDRVLEKLKKTATGWMTTINGKELKVEGQITYYNRYKRQNVVKDLSVELDRLSEESVNNDISSWTKGRSGEALSLLKKRFSHRPVQEKFVCLNCGFETHADEQAALNIARSWLFLRSQEYKKYQTNKTTGNTDKRAFVETWQSFYRKKLKEVWKPAV

SEQ ID NO: 43726 - protein, 978 aa, synthetic construct
  REGION 1..978: note = engineered CasX variant
QEIKRINKIRRRLVKDSNTKKAGKTGPMKTLLVRVMTPDLRERLENLRKKPENIPQPISNTSRANLNKLLTDYTEMKKAILHVYWEEFQKDPVGLMSRVAQPASKKIDQNKLKPEMDEKGNLTTAGFACSQCGQPLFVYKLEQVSEKGKAYTNYFGRCNVAEHEKLIKLAQLKPEKDSDEAVTYSLGKFGQRALDFYSIHVTKESTHPVKPLAQIAGNRYASGPVGKALSDACMGTIASFLSKYQDIIIEHQKVVKGNQKRLESLRELAGKENLEYPSVTLPPQPHTKEGLDAYNEVIARVRMWVNLNLWQKLKLSRDDAKPLLRLKGFPSFPLVERQANEVDWWDMVCNVKKLINEKKEDGKVFWQNLAGYKRQEALRPYLSSEEDRKKGKKFARYQLGDLLLHLEKKHGEDWGKVYDEAWERIDKKVEGLSKHIKLEEERRSEDAQSKAALTDWLRAKASFVIEGLKEADKDEFCRCELKLQKWYGDLRGKPFAIEAENSILDISGFSKQYNCAFIWQKDGVKKLNLYLIINYFKGGKLRFKKIKPEAFEANRFYTVINKKSGEIVIMEVNFNFDDPNLIILPLAFGKRQGREFIWNDLLSLETGSLKLANGRVIEKTLYNRRTRQDEPALFVALTFERREVLDSSNIKPMNLIGVDRGENIPAVIALTDPEGCPLSRFKDSLGNPTHILRIGESYKEKQRTIQAKKEVEQRRAGGYSRKYASKAKNLADDMVRNTARDLLYYAVTQDAMLIFENLSRGFGRQGKRTFMAERQYTRMEDWLTAKLAYEGLPSKTYLSKTLAQYTSKTCSNCGFTITSADYDRVLEKLKKTATGWMTTINGKELKVEGQITYYNRYKRQNVVKDLSVELDRLSEESVNNDISSWTKGRSGEALSLLKKRFSHRPVQEKFVCLNCGFETHADEQAALNIARSWLFLRSQEYKKYQTNKTTGNTDKRAFVETWQSFYRKKLKEVWKPAV

SEQ ID NO: 43727 - protein, 977 aa, synthetic construct
  REGION 1..977: note = engineered CasX variant
QEIKRINKIRRRLVKDSNTKKAGKTGPMKTLLVRVMTPDLRERLENLRKKPENIPQPISNTSRANLNKLLTDYTEMKKAILHVYWEEFQKDPVGLMSRVAQPASKKIDQNKLKPEMDEKGNLTTAGFACSQCGQPLFVYKLEQVSEKGKAYTNYFGRCNVAEHEKLILLAQLKPEKDSDEAVTYSLGKFGQRALDFYSIHVTKESTHPVKPLAQIAGNRYASPVGKALSDACMGTIASFLSKYQDIIIEHQKVVKGNQKRLESLRELAGKENLEYPSVTLPPQPHTKEGLDAYNEVIARVRMWVNLNLWQKLKLSRDDAKPLLRLKGFPSFPLVERQANEVDWWDMVCNVKKLINEKKEDGKVFWQNLAGYKRQEALRPYLSSEEDRKKGKKFARYQLGDLLLHLEKKHGEDWGKVYDEAWERIDKKVEGLSKHIKLEEERRSEDAQSKAALTDWLRAKASFVIEGLKEADKDEFCRCELKLQKWYGDLRGKPFAIEAENSILDISGFSKQYNCAFIWQKDGVKKLNLYLIINYFKGGKLRFKKIKPEAFEANRFYTVINKKSGEIVIMEVNFNFDDPNLIILPLAFGKRQGREFIWNDLLSLETGSLKLANGRVIEKTLYNRRTRQDEPALFVALTFERREVLDSSNIKPMNLIGVDRGENIPAVIALTDPEGCPLSRFKDSLGNPTHILRIGESYKEKQRTIQAKKEVEQRRAGGYSRKYASKAKNLADDMVRNTARDLLYYAVTQDAMLIFENLSRGFGRQGKRTFMAERQYTRMEDWLTAKLAYEGLPSKTYLSKTLAQYTSKTCSNCGFTITSADYDRVLEKLKKTATGWMTTINGKELKVEGQITYYNRYKRQNVVKDLSVELDRLSEESVNNDISSWTKGRSGEALSLLKKRFSHRPVQEKFVCLNCGFETHADEQAALNIARSWLFLRSQEYKKYQTNKTTGNTDKRAFVETWQSFYRKKLKEVWKPAV

SEQ ID NO: 43728 - protein, 978 aa, synthetic construct
  REGION 1..978: note = engineered CasX variant
QEIKRINKIRRRLVKDSNTKKAGKTGPMKTLLVRVMTPDLRERLENLRKKPENIPQPISNTSRANLNKLLTDYTEMKKAILHVYWEEFQKDPVGLMSRVAQPASKKIDQNKLKPEMDEKGNLTTAGFACSQCGQPLFVYKLEQVSEKGKAYTNYFGRCNVAEHEKLILLAQLKPEKDSDEAVTYSLGKFGQRALDFYSIHVTKESTHPVKPLAQIAGNRYASYPVGKALSGACMGTIASFLSKYQDIIIEHQKVVKGNQKRLESLRELAGKENLEYPSVTLPPQPHTKEGVDAYNEVIARVRTWVNLNLWQKLKLSRDDAKPLLRLKGFPSFPLVERQANEVDWWDMVCNVKKLINEKKEDGKVFWQNLAGYKRQEALRPYLSSEEDRKKGKKFARYQLGDLLLHLEKKHGEDWGKVYDEAWERIDKKVEGLSKHIKLEEERRSEDAQSKAALTDWLRAKASFVIEGLKEADKDEFCRCELKLQKWYGDLRGKPFAIEAENSILDISGFSKQYNCAFIWQKDGVKKLNLYLIINYFKGGKLRFKKIKPEAFEANRFYTVINKKSGEIVPMEVNFNFDDPNLIILPLAFGKRQGREFIWNDLLSLETGSLKLANGRVIEKTLYNRRTRQDEPALFVALTFERREVLDSSNIKPMNLIGVDRGENIPAVIALTDPEGCPLSRFKDSLGNPTHILRIGESYKEKQRTIQAKKEVEQRRAGGYSRKYASKAKNLADDMVRNTARDLLYYAVTQDAMLIFENLSRGFGRQGKRTFMAERQYTRMEDWLTAKLAYEGLPSKTYLSKTLAQYTSKTCSNCGFTITSADYDRVLEKLKKTATGWMTTINGKELKVEGQITYYNRYKRQNVVKDLSVELDRLSEESVNNDISSWTKGRSGEALSLLKKRFSHRPVQEKFVCLNCGFETHADEQAALNIARSWLFLRSQEYKKYQTNKTTGNTDKRAFVETWQSFYRKKLKEVWKPAV

SEQ ID NO: 43729 - protein, 978 aa, synthetic construct
  REGION 1..978: note = engineered CasX variant
QEIKRINKIRRRLVKDSNTKKAGKTGPMKTLLVRVMTPDLRERLENLRKKPENIPQPISNTSRANLNKLLTDYTEMKKAILHVYWEEFQKDPVGLMSRVAQPASKKIDQNKLKPEMDEKGNLTTAGFACSQCGQPLFVYKLEQVSEKGKAYTNYFGRCNVAEHEKLILLAQLKPEKDSDEAVTYSLGKFGQRALDFYSIHVTKESTHPVKPLAQIAGNRYASHPVGKALSGACMGTIASFLSKYQDIIIEHQKVVKGNQKRLESLRELAGKENLEYPSVTLPPQPHTKEGVDAYNEVIARVRTWVNLNLWQKLKLSRDDAKPLLRLKGFPSFPLVERQANEVDWWDMVCNVKKLINEKKEDGKVFWQNLAGYKRQEALRPYLSSEEDRKKGKKFARYQLGDLLLHLEKKHGEDWGKVYDEAWERIDKKVEGLSKHIKLEEERRSEDAQSKAALTDWLRAKASFVIEGLKEADKDEFCRCELKLQKWYGDLRGKPFAIEAENSILDISGFSKQYNCAFIWQKDGVKKLNLYLIINYFKGGKLRFKKIKPEAFEANRFYTVINKKSGEIVPMEVNFNFDDPNLIILPLAFGKRQGREFIWNDLLSLETGSLKLANGRVIEKTLYNRRTRQDEPALFVALTFERREVLDSSNIKPMNLIGVDRGENIPAVIALTDPEGCPLSRFKDSLGNPTHILRIGESYKEKQRTIQAKKEVEQRRAGGYSRKYASKAKNLADDMVRNTARDLLYYAVTQDAMLIFENLSRGFGRQGKRTFMAERQYTRMEDWLTAKLAYEGLPSKTYLSKTLAQYTSKTCSNCGFTITSADYDRVLEKLKKTATGWMTTINGKELKVEGQITYYNRYKRQNVVKDLSVELDRLSEESVNNDISSWTKGRSGEALSLLKKRFSHRPVQEKFVCLNCGFETHADEQAALNIARSWLFLRSQEYKKYQTNKTTGNTDKRAFVETWQSFYRKKLKEVWKPAV

SEQ ID NO: 43730 - protein, 978 aa, synthetic construct
  REGION 1..978: note = engineered CasX variant
QEIKRINKIRRRLVKDSNTKKAGKTGPMKTLLVRVMTPDLRERLENLRKKPENIPQPISNTSRANLNKLLTDYTEMKKAILHVYWEEFQKDPVGLMSRVAQPASKKIDQNKLKPEMDEKGNLTTAGFACSQCGQPLFVYKLEQVSEKGKAYTNYFGRCNVAEHEKLILLAQLKPEKDSDEAVTYSLGKFGQRALDFYSIHVTKESTHPVKPLAQIAGNRYASSPVGKALSGACMGTIASFLSKYQDIIIEHQKVVKGNQKRLESLRELAGKENLEYPSVTLPPQPHTKEGVDAYNEVIARVRTWVNLNLWQKLKLSRDDAKPLLRLKGFPSFPLVERQANEVDWWDMVCNVKKLINEKKEDGKVFWQNLAGYKRQEALRPYLSSEEDRKKGKKFARYQLGDLLLHLEKKHGEDWGKVYDEAWERIDKKVEGLSKHIKLEEERRSEDAQSKAALTDWLRAKASFVIEGLKEADKDEFCRCELKLQKWYGDLRGKPFAIEAENSILDISGFSKQYNCAFIWQKDGVKKLNLYLIINYFKGGKLRFKKIKPEAFEANRFYTVINKKSGEIVPMEVNFNFDDPNLIILPLAFGKRQGREFIWNDLLSLETGSLKLANGRVIEKTLYNRRTRQDEPALFVALTFERREVLDSSNIKPMNLIGVDRGENIPAVIALTDPEGCPLSRFKDSLGNPTHILRIGESYKEKQRTIQAKKEVEQRRAGGYSRKYASKAKNLADDMVRNTARDLLYYAVTQDAMLIFENLSRGFGRQGKRTFMAERQYTRMEDWLTAKLAYEGLPSKTYLSKTLAQYTSKTCSNCGFTITSADYDRVLEKLKKTATGWMTTINGKELKVEGQITYYNRYKRQNVVKDLSVELDRLSEESVNNDISSWTKGRSGEALSLLKKRFSHRPVQEKFVCLNCGFETHADEQAALNIARSWLFLRSQEYKKYQTNKTTGNTDKRAFVETWQSFYRKKLKEVWKPAV

SEQ ID NO: 43731 - protein, 978 aa, synthetic construct
  REGION 1..978: note = engineered CasX variant
QEIKRINKIRRRLVKDSNTKKAGKTGPMKTLLVRVMTPDLRERLENLRKKPENIPQPISNTSRANLNKLLTDYTEMKKAILHVYWEEFQKDPVGLMSRVAQPASKKIDQNKLKPEMDEKGNLTTAGFACSQCGQPLFVYKLEQVSEKGKAYTNYFGRCNVAEHEKLILLAQLKPEKDSDEAVTYSLGKFGQRALDFYSIHVTKESTHPVKPLAQIAGNRYASTPVGKALSGACMGTIASFLSKYQDIIIEHQKVVKGNQKRLESLRELAGKENLEYPSVTLPPQPHTKEGVDAYNEVIARVRTWVNLNLWQKLKLSRDDAKPLLRLKGFPSFPLVERQANEVDWWDMVCNVKKLINEKKEDGKVFWQNLAGYKRQEALRPYLSSEEDRKKGKKFARYQLGDLLLHLEKKHGEDWGKVYDEAWERIDKKVEGLSKHIKLEEERRSEDAQSKAALTDWLRAKASFVIEGLKEADKDEFCRCELKLQKWYGDLRGKPFAIEAENSILDISGFSKQYNCAFIWQKDGVKKLNLYLIINYFKGGKLRFKKIKPEAFEANRFYTVINKKSGEIVPMEVNFNFDDPNLIILPLAFGKRQGREFIWNDLLSLETGSLKLANGRVIEKTLYNRRTRQDEPALFVALTFERREVLDSSNIKPMNLIGVDRGENIPAVIALTDPEGCPLSRFKDSLGNPTHILRIGESYKEKQRTIQAKKEVEQRRAGGYSRKYASKAKNLADDMVRNTARDLLYYAVTQDAMLIFENLSRGFGRQGKRTFMAERQYTRMEDWLTAKLAYEGLPSKTYLSKTLAQYTSKTCSNCGFTITSADYDRVLEKLKKTATGWMTTINGKELKVEGQITYYNRYKRQNVVKDLSVELDRLSEESVNNDISSWTKGRSGEALSLLKKRFSHRPVQEKFVCLNCGFETHADEQAALNIARSWLFLRSQEYKKYQTNKTTGNTDKRAFVETWQSFYRKKLKEVWKPAV

SEQ ID NO: 43732 - protein, 978 aa, synthetic construct
  REGION 1..978: note = engineered CasX variant
QEIKRINKIRRRLVKDSNTKKAGKTGPMKTLLVRVMTPDLRERLENLRKKPENIPQPISNTSRANLNKLLTDYTEMKKAILHVYWEEFQKDPVGLMSRVAQPASKKIDQNKLKPEMDEKGNLTTAGFACSQCGQPLFVYKLEQVSEKGKAYTNYFGRCNVAEHEKLILLAQLKPEKDSDEAVTYSLGKFGQRALDFYSIHVTKESTHPVKPLAQIAGNRYASAPVGKALSGACMGTIASFLSKYQDIIIEHQKVVKGNQKRLESLRELAGKENLEYPSVTLPPQPHTKEGVDAYNEVIARVRTWVNLNLWQKLKLSRDDAKPLLRLKGFPSFPLVERQANEVDWWDMVCNVKKLINEKKEDGKVFWQNLAGYKRQEALRPYLSSEEDRKKGKKFARYQLGDLLLHLEKKHGEDWGKVYDEAWERIDKKVEGLSKHIKLEEERRSEDAQSKAALTDWLRAKASFVIEGLKEADKDEFCRCELKLQKWYGDLRGKPFAIEAENSILDISGFSKQYNCAFIWQKDGVKKLNLYLIINYFKGGKLRFKKIKPEAFEANRFYTVINKKSGEIVPMEVNFNFDDPNLIILPLAFGKRQGREFIWNDLLSLETGSLKLANGRVIEKTLYNRRTRQDEPALFVALTFERREVLDSSNIKPMNLIGVDRGENIPAVIALTDPEGCPLSRFKDSLGNPTHILRIGESYKEKQRTIQAKKEVEQRRAGGYSRKYASKAKNLADDMVRNTARDLLYYAVTQDAMLIFENLSRGFGRQGKRTFMAERQYTRMEDWLTAKLAYEGLPSKTYLSKTLAQYTSKTCSNCGFTITSADYDRVLEKLKKTATGWMTTINGKELKVEGQITYYNRYKRQNVVKDLSVELDRLSEESVNNDISSWTKGRSGEALSLLKKRFSHRPVQEKFVCLNCGFETHADEQAALNIARSWLFLRSQEYKKYQTNKTTGNTDKRAFVETWQSFYRKKLKEVWKPAV

SEQ ID NO: 43733 - protein, 978 aa, synthetic construct
  REGION 1..978: note = engineered CasX variant
QEIKRINKIRRRLVKDSNTKKAGKTGPMKTLLVRVMTPDLRERLENLRKKPENIPQPISNTSRANLNKLLTDYTEMKKAILHVYWEEFQKDPVGLMSRVAQPASKKIDQNKLKPEMDEKGNLTTAGFACSQCGQPLFVYKLEQVSEKGKAYTNYFGRCNVAEHEKLILLAQLKPEKDSDEAVTYSLGKFGQRALDFYSIHVTKESTHPVKPLAQIAGNRYASVPVGKALSGACMGTIASFLSKYQDIIIEHQKVVKGNQKRLESLRELAGKENLEYPSVTLPPQPHTKEGVDAYNEVIARVRTWVNLNLWQKLKLSRDDAKPLLRLKGFPSFPLVERQANEVDWWDMVCNVKKLINEKKEDGKVFWQNLAGYKRQEALRPYLSSEEDRKKGKKFARYQLGDLLLHLEKKHGEDWGKVYDEAWERIDKKVEGLSKHIKLEEERRSEDAQSKAALTDWLRAKASFVIEGLKEADKDEFCRCELKLQKWYGDLRGKPFAIEAENSILDISGFSKQYNCAFIWQKDGVKKLNLYLIINYFKGGKLRFKKIKPEAFEANRFYTVINKKSGEIVPMEVNFNFDDPNLIILPLAFGKRQGREFIWNDLLSLETGSLKLANGRVIEKTLYNRRTRQDEPALFVALTFERREVLDSSNIKPMNLIGVDRGENIPAVIALTDPEGCPLSRFKDSLGNPTHILRIGESYKEKQRTIQAKKEVEQRRAGGYSRKYASKAKNLADDMVRNTARDLLYYAVTQDAMLIFENLSRGFGRQGKRTFMAERQYTRMEDWLTAKLAYEGLPSKTYLSKTLAQYTSKTCSNCGFTITSADYDRVLEKLKKTATGWMTTINGKELKVEGQITYYNRYKRQNVVKDLSVELDRLSEESVNNDISSWTKGRSGEALSLLKKRFSHRPVQEKFVCLNCGFETHADEQAALNIARSWLFLRSQEYKKYQTNKTTGNTDKRAFVETWQSFYRKKLKEVWKPAV

SEQ ID NO: 43734 - protein, 978 aa, synthetic construct
  REGION 1..978: note = engineered CasX variant
QEIKRINKIRRRLVKDSNTKKAGKTGPMKTLLVRVMTPDLRERLENLRKKPENIPQPISNTSRANLNKLLTDYTEMKKAILHVYWEEFQKDPVGLMSRVAQPASKKIDQNKLKPEMDEKGNLTTAGFACSQCGQPLFVYKLEQVSEKGKAYTNYFGRCNVAEHEKLIKLAQLKPEKDSDEAVTYSLGKFGQRALDFYSIHVTKESTHPVKPLAQIAGNRYASGPVGKALSGACMGTIASFLSKYQDIIIEHQKVVKGNQKRLESLRELAGKENLEYPSVTLPPQPHTKEGVDAYNEVIARVRTWVNLNLWQKLKLSRDDAKPLLRLKGFPSFPLVERQANEVDWWDMVCNVKKLINEKKEDGKVFWQNLAGYKRQEALRPYLSSEEDRKKGKKFARYQLGDLLLHLEKKHGEDWGKVYDEAWERIDKKVEGLSKHIKLEEERRSEDAQSKAALTDWLRAKASFVIEGLKEADKDEFCRCELKLQKWYGDLRGKPFAIEAENSILDISGFSKQYNCAFIWQKDGVKKLNLYLIINYFKGGKLRFKKIKPEAFEANRFYTVINKKSGEIVPMEVNFNFDDPNLIILPLAFGKRQGREFIWNDLLSLETGSLKLANGRVIEKTLYNRRTRQDEPALFVALTFERREVLDSSNIKPMNLIGVDRGENIPAVIALTDPEGCPLSRFKDSLGNPTHILRIGESYKEKQRTIQAKKEVEQRRAGGYSRKYASKAKNLADDMVRNTARDLLYYAVTQDAMLIFENLSRGFGRQGKRTFMAERQYTRMEDWLTAKLAYEGLPSKTYLSKTLAQYTSKTCSNCGFTITSADYDRVLEKLKKTATGWMTTINGKELKVEGQITYYNRYKRQNVVKDLSVELDRLSEESVNNDISSWTKGRSGEALSLLKKRFSHRPVQEKFVCLNCGFETHADEQAALNIARSWLFLRSQEYKKYQTNKTTGNTDKRAFVETWQSFYRKKLKEVWKPAV

SEQ ID NO: 43735 - protein, 977 aa, synthetic construct
  REGION 1..977: note = engineered CasX variant
QEIKRINKIRRRLVKDSNTKKAGKTGPMKTLLVRVMTPDLRERLENLRKKPENIPQPISNTSRANLNKLLTDYTEMKKAILHVYWEEFQKDPVGLMSRVAQPASKKIDQNKLKPEMDEKGNLTTAGFACSQCGQPLFVYKLEQVSEKGKAYTNYFGRCNVAEHEKLILLAQLKPEKDSDEAVTYSLGKFGQRALDFYSIHVTKESTHPVKPLAQIAGNRYASPVGKALSGACMGTIASFLSKYQDIIIEHQKVVKGNQKRLESLRELAGKENLEYPSVTLPPQPHTKEGVDAYNEVIARVRTWVNLNLWQKLKLSRDDAKPLLRLKGFPSFPLVERQANEVDWWDMVCNVKKLINEKKEDGKVFWQNLAGYKRQEALRPYLSSEEDRKKGKKFARYQLGDLLLHLEKKHGEDWGKVYDEAWERIDKKVEGLSKHIKLEEERRSEDAQSKAALTDWLRAKASFVIEGLKEADKDEFCRCELKLQKWYGDLRGKPFAIEAENSILDISGFSKQYNCAFIWQKDGVKKLNLYLIINYFKGGKLRFKKIKPEAFEANRFYTVINKKSGEIVPMEVNFNFDDPNLIILPLAFGKRQGREFIWNDLLSLETGSLKLANGRVIEKTLYNRRTRQDEPALFVALTFERREVLDSSNIKPMNLIGVDRGENIPAVIALTDPEGCPLSRFKDSLGNPTHILRIGESYKEKQRTIQAKKEVEQRRAGGYSRKYASKAKNLADDMVRNTARDLLYYAVTQDAMLIFENLSRGFGRQGKRTFMAERQYTRMEDWLTAKLAYEGLPSKTYLSKTLAQYTSKTCSNCGFTITSADYDRVLEKLKKTATGWMTTINGKELKVEGQITYYNRYKRQNVVKDLSVELDRLSEESVNNDISSWTKGRSGEALSLLKKRFSHRPVQEKFVCLNCGFETHADEQAALNIARSWLFLRSQEYKKYQTNKTTGNTDKRAFVETWQSFYRKKLKEVWKPAV

SEQ ID NO: 43736 - protein, 978 aa, synthetic construct
  REGION 1..978: note = engineered CasX variant
QEIKRINKIRRRLVKDSNTKKAGKTGPMKTLLVRVMTPDLRERLENLRKKPENIPQPISNTSRANLNKLLTDYTEMKKAILHVYWEEFQKDPVGLMSRVAQPASKKIDQNKLKPEMDEKGNLTTAGFACSQCGQPLFVYKLEQVSEKGKAYTNYFGRCNVAEHEKLILLAQLKPEKDSDEAVTYSLGKFGQRALDFYSIHVTKESTHPVKPLAQIAGNRYASYPVGKALSDACMGTIASFLSKYQDIIIEHQKVVKGNQKRLESLRELAGKENLEYPSVTLPPQPHTKEGVDAYNEVIARVRTWVNLNLWQKLKLSRDDAKPLLRLKNFPSFPLVERQANEVDWWDMVCNVKKLINEKKEDGKVFWQNLAGYKRQEALRPYLSSEEDRKKGKKFARYQLGDLLLHLEKKHGEDWGKVYDEAWERIDKKVEGLSKHIKLEEERRSEDAQSKAALTDWLRAKASFVIEGLKEADKDEFCRCELKLQKWYGDLRGKPFAIEAENSILDISGFSKQYNCAFIWQKDGVKKLNLYLIINYFKGGKLRFKKIKPEAFEANRFYTVINKKSGEIVPMEVNFNFDDPNLIILPLAFGKRQGREFIWNDLLSLETGSLKLANGRVIEKTLYNRRTRQDEPALFVALTFERREVLDSSNIKPMNLIGVDRGENIPAVIALTDPEGCPLSRFKDSLGNPTHILRIGESYKEKQRTIQAKKEVEQRRAGGYSRKYASKAKNLADDMVRNTARDLLYYAVTQDAMLIFENLSRGFGRQGKRTFMAERQYTRMEDWLTAKLAYEGLPSKTYLSKTLAQYTSKTCSNCGFTITSADYDRVLEKLKKTATGWMTTINGKELKVEGQITYYNRYKRQNVVKDLSVELDRLSEESVNNDISSWTKGRSGEALSLLKKRFSHRPVQEKFVCLNCGFETHADEQAALNIARSWLFLRSQEYKKYQTNKTTGNTDKRAFVETWQSFYRKKLKEVWKPAV

SEQ ID NO: 43737 - protein, 978 aa, synthetic construct
  REGION 1..978: note = engineered CasX variant
QEIKRINKIRRRLVKDSNTKKAGKTGPMKTLLVRVMTPDLRERLENLRKKPENIPQPISNTSRANLNKLLTDYTEMKKAILHVYWEEFQKDPVGLMSRVAQPASKKIDQNKLKPEMDEKGNLTTAGFACSQCGQPLFVYKLEQVSEKGKAYTNYFGRCNVAEHEKLILLAQLKPEKDSDEAVTYSLGKFGQRALDFYSIHVTKESTHPVKPLAQIAGNRYASHPVGKALSDACMGTIASFLSKYQDIIIEHQKVVKGNQKRLESLRELAGKENLEYPSVTLPPQPHTKEGVDAYNEVIARVRTWVNLNLWQKLKLSRDDAKPLLRLKNFPSFPLVERQANEVDWWDMVCNVKKLINEKKEDGKVFWQNLAGYKRQEALRPYLSSEEDRKKGKKFARYQLGDLLLHLEKKHGEDWGKVYDEAWERIDKKVEGLSKHIKLEEERRSEDAQSKAALTDWLRAKASFVIEGLKEADKDEFCRCELKLQKWYGDLRGKPFAIEAENSILDISGFSKQYNCAFIWQKDGVKKLNLYLIINYFKGGKLRFKKIKPEAFEANRFYTVINKKSGEIVPMEVNFNFDDPNLIILPLAFGKRQGREFIWNDLLSLETGSLKLANGRVIEKTLYNRRTRQDEPALFVALTFERREVLDSSNIKPMNLIGVDRGENIPAVIALTDPEGCPLSRFKDSLGNPTHILRIGESYKEKQRTIQAKKEVEQRRAGGYSRKYASKAKNLADDMVRNTARDLLYYAVTQDAMLIFENLSRGFGRQGKRTFMAERQYTRMEDWLTAKLAYEGLPSKTYLSKTLAQYTSKTCSNCGFTITSADYDRVLEKLKKTATGWMTTINGKELKVEGQITYYNRYKRQNVVKDLSVELDRLSEESVNNDISSWTKGRSGEALSLLKKRFSHRPVQEKFVCLNCGFETHADEQAALNIARSWLFLRSQEYKKYQTNKTTGNTDKRAFVETWQSFYRKKLKEVWKPAV

SEQ ID NO: 43738 - protein, 978 aa, synthetic construct
  REGION 1..978: note = engineered CasX variant
QEIKRINKIRRRLVKDSNTKKAGKTGPMKTLLVRVMTPDLRERLENLRKKPENIPQPISNTSRANLNKLLTDYTEMKKAILHVYWEEFQKDPVGLMSRVAQPASKKIDQNKLKPEMDEKGNLTTAGFACSQCGQPLFVYKLEQVSEKGKAYTNYFGRCNVAEHEKLILLAQLKPEKDSDEAVTYSLGKFGQRALDFYSIHVTKESTHPVKPLAQIAGNRYASSPVGKALSDACMGTIASFLSKYQDIIIEHQKVVKGNQKRLESLRELAGKENLEYPSVTLPPQPHTKEGVDAYNEVIARVRTWVNLNLWQKLKLSRDDAKPLLRLKNFPSFPLVERQANEVDWWDMVCNVKKLINEKKEDGKVFWQNLAGYKRQEALRPYLSSEEDRKKGKKFARYQLGDLLLHLEKKHGEDWGKVYDEAWERIDKKVEGLSKHIKLEEERRSEDAQSKAALTDWLRAKASFVIEGLKEADKDEFCRCELKLQKWYGDLRGKPFAIEAENSILDISGFSKQYNCAFIWQKDGVKKLNLYLIINYFKGGKLRFKKIKPEAFEANRFYTVINKKSGEIVPMEVNFNFDDPNLIILPLAFGKRQGREFIWNDLLSLETGSLKLANGRVIEKTLYNRRTRQDEPALFVALTFERREVLDSSNIKPMNLIGVDRGENIPAVIALTDPEGCPLSRFKDSLGNPTHILRIGESYKEKQRTIQAKKEVEQRRAGGYSRKYASKAKNLADDMVRNTARDLLYYAVTQDAMLIFENLSRGFGRQGKRTFMAERQYTRMEDWLTAKLAYEGLPSKTYLSKTLAQYTSKTCSNCGFTITSADYDRVLEKLKKTATGWMTTINGKELKVEGQITYYNRYKRQNVVKDLSVELDRLSEESVNNDISSWTKGRSGEALSLLKKRFSHRPVQEKFVCLNCGFETHADEQAALNIARSWLFLRSQEYKKYQTNKTTGNTDKRAFVETWQSFYRKKLKEVWKPAV

SEQ ID NO: 43739 - protein, 978 aa, synthetic construct
  REGION 1..978: note = engineered CasX variant
QEIKRINKIRRRLVKDSNTKKAGKTGPMKTLLVRVMTPDLRERLENLRKKPENIPQPISNTSRANLNKLLTDYTEMKKAILHVYWEEFQKDPVGLMSRVAQPASKKIDQNKLKPEMDEKGNLTTAGFACSQCGQPLFVYKLEQVSEKGKAYTNYFGRCNVAEHEKLILLAQLKPEKDSDEAVTYSLGKFGQRALDFYSIHVTKESTHPVKPLAQIAGNRYASTPVGKALSDACMGTIASFLSKYQDIIIEHQKVVKGNQKRLESLRELAGKENLEYPSVTLPPQPHTKEGVDAYNEVIARVRTWVNLNLWQKLKLSRDDAKPLLRLKNFPSFPLVERQANEVDWWDMVCNVKKLINEKKEDGKVFWQNLAGYKRQEALRPYLSSEEDRKKGKKFARYQLGDLLLHLEKKHGEDWGKVYDEAWERIDKKVEGLSKHIKLEEERRSEDAQSKAALTDWLRAKASFVIEGLKEADKDEFCRCELKLQKWYGDLRGKPFAIEAENSILDISGFSKQYNCAFIWQKDGVKKLNLYLIINYFKGGKLRFKKIKPEAFEANRFYTVINKKSGEIVPMEVNFNFDDPNLIILPLAFGKRQGREFIWNDLLSLETGSLKLANGRVIEKTLYNRRTRQDEPALFVALTFERREVLDSSNIKPMNLIGVDRGENIPAVIALTDPEGCPLSRFKDSLGNPTHILRIGESYKEKQRTIQAKKEVEQRRAGGYSRKYASKAKNLADDMVRNTARDLLYYAVTQDAMLIFENLSRGFGRQGKRTFMAERQYTRMEDWLTAKLAYEGLPSKTYLSKTLAQYTSKTCSNCGFTITSADYDRVLEKLKKTATGWMTTINGKELKVEGQITYYNRYKRQNVVKDLSVELDRLSEESVNNDISSWTKGRSGEALSLLKKRFSHRPVQEKFVCLNCGFETHADEQAALNIARSWLFLRSQEYKKYQTNKTTGNTDKRAFVETWQSFYRKKLKEVWKPAV

SEQ ID NO: 43740 - protein, 978 aa, synthetic construct
  REGION 1..978: note = engineered CasX variant
QEIKRINKIRRRLVKDSNTKKAGKTGPMKTLLVRVMTPDLRERLENLRKKPENIPQPISNTSRANLNKLLTDYTEMKKAILHVYWEEFQKDPVGLMSRVAQPASKKIDQNKLKPEMDEKGNLTTAGFACSQCGQPLFVYKLEQVSEKGKAYTNYFGRCNVAEHEKLILLAQLKPEKDSDEAVTYSLGKFGQRALDFYSIHVTKESTHPVKPLAQIAGNRYASAPVGKALSDACMGTIASFLSKYQDIIIEHQKVVKGNQKRLESLRELAGKENLEYPSVTLPPQPHTKEGVDAYNEVIARVRTWVNLNLWQKLKLSRDDAKPLLRLKNFPSFPLVERQANEVDWWDMVCNVKKLINEKKEDGKVFWQNLAGYKRQEALRPYLSSEEDRKKGKKFARYQLGDLLLHLEKKHGEDWGKVYDEAWERIDKKVEGLSKHIKLEEERRSEDAQSKAALTDWLRAKASFVIEGLKEADKDEFCRCELKLQKWYGDLRGKPFAIEAENSILDISGFSKQYNCAFIWQKDGVKKLNLYLIINYFKGGKLRFKKIKPEAFEANRFYTVINKKSGEIVPMEVNFNFDDPNLIILPLAFGKRQGREFIWNDLLSLETGSLKLANGRVIEKTLYNRRTRQDEPALFVALTFERREVLDSSNIKPMNLIGVDRGENIPAVIALTDPEGCPLSRFKDSLGNPTHILRIGESYKEKQRTIQAKKEVEQRRAGGYSRKYASKAKNLADDMVRNTARDLLYYAVTQDAMLIFENLSRGFGRQGKRTFMAERQYTRMEDWLTAKLAYEGLPSKTYLSKTLAQYTSKTCSNCGFTITSADYDRVLEKLKKTATGWMTTINGKELKVEGQITYYNRYKRQNVVKDLSVELDRLSEESVNNDISSWTKGRSGEALSLLKKRFSHRPVQEKFVCLNCGFETHADEQAALNIARSWLFLRSQEYKKYQTNKTTGNTDKRAFVETWQSFYRKKLKEVWKPAV

SEQ ID NO: 43741 - protein, 978 aa, synthetic construct
  REGION 1..978: note = engineered CasX variant
QEIKRINKIRRRLVKDSNTKKAGKTGPMKTLLVRVMTPDLRERLENLRKKPENIPQPISNTSRANLNKLLTDYTEMKKAILHVYWEEFQKDPVGLMSRVAQPASKKIDQNKLKPEMDEKGNLTTAGFACSQCGQPLFVYKLEQVSEKGKAYTNYFGRCNVAEHEKLILLAQLKPEKDSDEAVTYSLGKFGQRALDFYSIHVTKESTHPVKPLAQIAGNRYASVPVGKALSDACMGTIASFLSKYQDIIIEHQKVVKGNQKRLESLRELAGKENLEYPSVTLPPQPHTKEGVDAYNEVIARVRTWVNLNLWQKLKLSRDDAKPLLRLKNFPSFPLVERQANEVDWWDMVCNVKKLINEKKEDGKVFWQNLAGYKRQEALRPYLSSEEDRKKGKKFARYQLGDLLLHLEKKHGEDWGKVYDEAWERIDKKVEGLSKHIKLEEERRSEDAQSKAALTDWLRAKASFVIEGLKEADKDEFCRCELKLQKWYGDLRGKPFAIEAENSILDISGFSKQYNCAFIWQKDGVKKLNLYLIINYFKGGKLRFKKIKPEAFEANRFYTVINKKSGEIVPMEVNFNFDDPNLIILPLAFGKRQGREFIWNDLLSLETGSLKLANGRVIEKTLYNRRTRQDEPALFVALTFERREVLDSSNIKPMNLIGVDRGENIPAVIALTDPEGCPLSRFKDSLGNPTHILRIGESYKEKQRTIQAKKEVEQRRAGGYSRKYASKAKNLADDMVRNTARDLLYYAVTQDAMLIFENLSRGFGRQGKRTFMAERQYTRMEDWLTAKLAYEGLPSKTYLSKTLAQYTSKTCSNCGFTITSADYDRVLEKLKKTATGWMTTINGKELKVEGQITYYNRYKRQNVVKDLSVELDRLSEESVNNDISSWTKGRSGEALSLLKKRFSHRPVQEKFVCLNCGFETHADEQAALNIARSWLFLRSQEYKKYQTNKTTGNTDKRAFVETWQSFYRKKLKEVWKPAV

SEQ ID NO: 43742 - protein, 978 aa, synthetic construct
  REGION 1..978: note = engineered CasX variant
QEIKRINKIRRRLVKDSNTKKAGKTGPMKTLLVRVMTPDLRERLENLRKKPENIPQPISNTSRANLNKLLTDYTEMKKAILHVYWEEFQKDPVGLMSRVAQPASKKIDQNKLKPEMDEKGNLTTAGFACSQCGQPLFVYKLEQVSEKGKAYTNYFGRCNVAEHEKLIKLAQLKPEKDSDEAVTYSLGKFGQRALDFYSIHVTKESTHPVKPLAQIAGNRYASGPVGKALSDACMGTIASFLSKYQDIIIEHQKVVKGNQKRLESLRELAGKENLEYPSVTLPPQPHTKEGVDAYNEVIARVRTWVNLNLWQKLKLSRDDAKPLLRLKNFPSFPLVERQANEVDWWDMVCNVKKLINEKKEDGKVFWQNLAGYKRQEALRPYLSSEEDRKKGKKFARYQLGDLLLHLEKKHGEDWGKVYDEAWERIDKKVEGLSKHIKLEEERRSEDAQSKAALTDWLRAKASFVIEGLKEADKDEFCRCELKLQKWYGDLRGKPFAIEAENSILDISGFSKQYNCAFIWQKDGVKKLNLYLIINYFKGGKLRFKKIKPEAFEANRFYTVINKKSGEIVPMEVNFNFDDPNLIILPLAFGKRQGREFIWNDLLSLETGSLKLANGRVIEKTLYNRRTRQDEPALFVALTFERREVLDSSNIKPMNLIGVDRGENIPAVIALTDPEGCPLSRFKDSLGNPTHILRIGESYKEKQRTIQAKKEVEQRRAGGYSRKYASKAKNLADDMVRNTARDLLYYAVTQDAMLIFENLSRGFGRQGKRTFMAERQYTRMEDWLTAKLAYEGLPSKTYLSKTLAQYTSKTCSNCGFTITSADYDRVLEKLKKTATGWMTTINGKELKVEGQITYYNRYKRQNVVKDLSVELDRLSEESVNNDISSWTKGRSGEALSLLKKRFSHRPVQEKFVCLNCGFETHADEQAALNIARSWLFLRSQEYKKYQTNKTTGNTDKRAFVETWQSFYRKKLKEVWKPAV

SEQ ID NO: 43743 - protein, 977 aa, synthetic construct
  REGION 1..977: note = engineered CasX variant
QEIKRINKIRRRLVKDSNTKKAGKTGPMKTLLVRVMTPDLRERLENLRKKPENIPQPISNTSRANLNKLLTDYTEMKKAILHVYWEEFQKDPVGLMSRVAQPASKKIDQNKLKPEMDEKGNLTTAGFACSQCGQPLFVYKLEQVSEKGKAYTNYFGRCNVAEHEKLILLAQLKPEKDSDEAVTYSLGKFGQRALDFYSIHVTKESTHPVKPLAQIAGNRYASPVGKALSDACMGTIASFLSKYQDIIIEHQKVVKGNQKRLESLRELAGKENLEYPSVTLPPQPHTKEGVDAYNEVIARVRTWVNLNLWQKLKLSRDDAKPLLRLKNFPSFPLVERQANEVDWWDMVCNVKKLINEKKEDGKVFWQNLAGYKRQEALRPYLSSEEDRKKGKKFARYQLGDLLLHLEKKHGEDWGKVYDEAWERIDKKVEGLSKHIKLEEERRSEDAQSKAALTDWLRAKASFVIEGLKEADKDEFCRCELKLQKWYGDLRGKPFAIEAENSILDISGFSKQYNCAFIWQKDGVKKLNLYLIINYFKGGKLRFKKIKPEAFEANRFYTVINKKSGEIVPMEVNFNFDDPNLIILPLAFGKRQGREFIWNDLLSLETGSLKLANGRVIEKTLYNRRTRQDEPALFVALTFERREVLDSSNIKPMNLIGVDRGENIPAVIALTDPEGCPLSRFKDSLGNPTHILRIGESYKEKQRTIQAKKEVEQRRAGGYSRKYASKAKNLADDMVRNTARDLLYYAVTQDAMLIFENLSRGFGRQGKRTFMAERQYTRMEDWLTAKLAYEGLPSKTYLSKTLAQYTSKTCSNCGFTITSADYDRVLEKLKKTATGWMTTINGKELKVEGQITYYNRYKRQNVVKDLSVELDRLSEESVNNDISSWTKGRSGEALSLLKKRFSHRPVQEKFVCLNCGFETHADEQAALNIARSWLFLRSQEYKKYQTNKTTGNTDKRAFVETWQSFYRKKLKEVWKPAV

SEQ ID NO: 43744 - protein, 978 aa, synthetic construct
  REGION 1..978: note = engineered CasX variant
QEIKRINKIRRRLVKDSNTKKAGKTGPMKTLLVRVMTPDLRERLENLRKKPENIPQPISNTSRANLNKLLTDYTEMKKAILHVYWEEFQKDPVGLMSRVAQPASKKIDQNKLKPEMDEKGNLTTAGFACSQCGQPLFVYKLEQVSEKGKAYTNYFGRCNVAEHEKLILLAQLKPEKDSDEAVTYSLGKFGQRALDFYSIHVTKESTHPVKPLAQIAGNRYASYPVGKALSDACMGTIASFLSKYQDIIIEHQKVVKGNQKRLESLRELAGKENLEYPSVTLPPQPHTKEGVDAYNEVIARVRTWVNLNLWQKLKLSRDDAKPLLRLKGFPSFPLVERQANEVDWWDMVCNVKKLINEKKEDGKVFWQNLAGYKRQEALRPYLSSEEDRKKGKKFARYQLGDLLNHLEKKHGEDWGKVYDEAWERIDKKVEGLSKHIKLEEERRSEDAQSKAALTDWLRAKASFVIEGLKEADKDEFCRCELKLQKWYGDLRGKPFAIEAENSILDISGFSKQYNCAFIWQKDGVKKLNLYLIINYFKGGKLRFKKIKPEAFEANRFYTVINKKSGEIVPMEVNFNFDDPNLIILPLAFGKRQGREFIWNDLLSLETGSLKLANGRVIEKTLYNRRTRQDEPALFVALTFERREVLDSSNIKPMNLIGVDRGENIPAVIALTDPEGCPLSRFKDSLGNPTHILRIGESYKEKQRTIQAKKEVEQRRAGGYSRKYASKAKNLADDMVRNTARDLLYYAVTQDAMLIFENLSRGFGRQGKRTFMAERQYTRMEDWLTAKLAYEGLPSKTYLSKTLAQYTSKTCSNCGFTITSADYDRVLEKLKKTATGWMTTINGKELKVEGQITYYNRYKRQNVVKDLSVELDRLSEESVNNDISSWTKGRSGEALSLLKKRFSHRPVQEKFVCLNCGFETHADEQAALNIARSWLFLRSQEYKKYQTNKTTGNTDKRAFVETWQSFYRKKLKEVWKPAV

SEQ ID NO: 43745 - protein, 978 aa, synthetic construct
  REGION 1..978: note = engineered CasX variant
QEIKRINKIRRRLVKDSNTKKAGKTGPMKTLLVRVMTPDLRERLENLRKKPENIPQPISNTSRANLNKLLTDYTEMKKAILHVYWEEFQKDPVGLMSRVAQPASKKIDQNKLKPEMDEKGNLTTAGFACSQCGQPLFVYKLEQVSEKGKAYTNYFGRCNVAEHEKLILLAQLKPEKDSDEAVTYSLGKFGQRALDFYSIHVTKESTHPVKPLAQIAGNRYASHPVGKALSDACMGTIASFLSKYQDIIIEHQKVVKGNQKRLESLRELAGKENLEYPSVTLPPQPHTKEGVDAYNEVIARVRTWVNLNLWQKLKLSRDDAKPLLRLKGFPSFPLVERQANEVDWWDMVCNVKKLINEKKEDGKVFWQNLAGYKRQEALRPYLSSEEDRKKGKKFARYQLGDLLNHLEKKHGEDWGKVYDEAWERIDKKVEGLSKHIKLEEERRSEDAQSKAALTDWLRAKASFVIEGLKEADKDEFCRCELKLQKWYGDLRGKPFAIEAENSILDISGFSKQYNCAFIWQKDGVKKLNLYLIINYFKGGKLRFKKIKPEAFEANRFYTVINKKSGEIVPMEVNFNFDDPNLIILPLAFGKRQGREFIWNDLLSLETGSLKLANGRVIEKTLYNRRTRQDEPALFVALTFERREVLDSSNIKPMNLIGVDRGENIPAVIALTDPEGCPLSRFKDSLGNPTHILRIGESYKEKQRTIQAKKEVEQRRAGGYSRKYASKAKNLADDMVRNTARDLLYYAVTQDAMLIFENLSRGFGRQGKRTFMAERQYTRMEDWLTAKLAYEGLPSKTYLSKTLAQYTSKTCSNCGFTITSADYDRVLEKLKKTATGWMTTINGKELKVEGQITYYNRYKRQNVVKDLSVELDRLSEESVNNDISSWTKGRSGEALSLLKKRFSHRPVQEKFVCLNCGFETHADEQAALNIARSWLFLRSQEYKKYQTNKTTGNTDKRAFVETWQSFYRKKLKEVWKPAV

SEQ ID NO: 43746 - protein, 978 aa, synthetic construct
  REGION 1..978: note = engineered CasX variant
QEIKRINKIRRRLVKDSNTKKAGKTGPMKTLLVRVMTPDLRERLENLRKKPENIPQPISNTSRANLNKLLTDYTEMKKAILHVYWEEFQKDPVGLMSRVAQPASKKIDQNKLKPEMDEKGNLTTAGFACSQCGQPLFVYKLEQVSEKGKAYTNYFGRCNVAEHEKLILLAQLKPEKDSDEAVTYSLGKFGQRALDFYSIHVTKESTHPVKPLAQIAGNRYASSPVGKALSDACMGTIASFLSKYQDIIIEHQKVVKGNQKRLESLRELAGKENLEYPSVTLPPQPHTKEGVDAYNEVIARVRTWVNLNLWQKLKLSRDDAKPLLRLKGFPSFPLVERQANEVDWWDMVCNVKKLINEKKEDGKVFWQNLAGYKRQEALRPYLSSEEDRKKGKKFARYQLGDLLNHLEKKHGEDWGKVYDEAWERIDKKVEGLSKHIKLEEERRSEDAQSKAALTDWLRAKASFVIEGLKEADKDEFCRCELKLQKWYGDLRGKPFAIEAENSILDISGFSKQYNCAFIWQKDGVKKLNLYLIINYFKGGKLRFKKIKPEAFEANRFYTVINKKSGEIVPMEVNFNFDDPNLIILPLAFGKRQGREFIWNDLLSLETGSLKLANGRVIEKTLYNRRTRQDEPALFVALTFERREVLDSSNIKPMNLIGVDRGENIPAVIALTDPEGCPLSRFKDSLGNPTHILRIGESYKEKQRTIQAKKEVEQRRAGGYSRKYASKAKNLADDMVRNTARDLLYYAVTQDAMLIFENLSRGFGRQGKRTFMAERQYTRMEDWLTAKLAYEGLPSKTYLSKTLAQYTSKTCSNCGFTITSADYDRVLEKLKKTATGWMTTINGKELKVEGQITYYNRYKRQNVVKDLSVELDRLSEESVNNDISSWTKGRSGEALSLLKKRFSHRPVQEKFVCLNCGFETHADEQAALNIARSWLFLRSQEYKKYQTNKTTGNTDKRAFVETWQSFYRKKLKEVWKPAV

SEQ ID NO: 43747 - protein, 978 aa, synthetic construct
  REGION 1..978: note = engineered CasX variant
QEIKRINKIRRRLVKDSNTKKAGKTGPMKTLLVRVMTPDLRERLENLRKKPENIPQPISNTSRANLNKLLTDYTEMKKAILHVYWEEFQKDPVGLMSRVAQPASKKIDQNKLKPEMDEKGNLTTAGFACSQCGQPLFVYKLEQVSEKGKAYTNYFGRCNVAEHEKLILLAQLKPEKDSDEAVTYSLGKFGQRALDFYSIHVTKESTHPVKPLAQIAGNRYASTPVGKALSDACMGTIASFLSKYQDIIIEHQKVVKGNQKRLESLRELAGKENLEYPSVTLPPQPHTKEGVDAYNEVIARVRTWVNLNLWQKLKLSRDDAKPLLRLKGFPSFPLVERQANEVDWWDMVCNVKKLINEKKEDGKVFWQNLAGYKRQEALRPYLSSEEDRKKGKKFARYQLGDLLNHLEKKHGEDWGKVYDEAWERIDKKVEGLSKHIKLEEERRSEDAQSKAALTDWLRAKASFVIEGLKEADKDEFCRCELKLQKWYGDLRGKPFAIEAENSILDISGFSKQYNCAFIWQKDGVKKLNLYLIINYFKGGKLRFKKIKPEAFEANRFYTVINKKSGEIVPMEVNFNFDDPNLIILPLAFGKRQGREFIWNDLLSLETGSLKLANGRVIEKTLYNRRTRQDEPALFVALTFERREVLDSSNIKPMNLIGVDRGENIPAVIALTDPEGCPLSRFKDSLGNPTHILRIGESYKEKQRTIQAKKEVEQRRAGGYSRKYASKAKNLADDMVRNTARDLLYYAVTQDAMLIFENLSRGFGRQGKRTFMAERQYTRMEDWLTAKLAYEGLPSKTYLSKTLAQYTSKTCSNCGFTITSADYDRVLEKLKKTATGWMTTINGKELKVEGQITYYNRYKRQNVVKDLSVELDRLSEESVNNDISSWTKGRSGEALSLLKKRFSHRPVQEKFVCLNCGFETHADEQAALNIARSWLFLRSQEYKKYQTNKTTGNTDKRAFVETWQSFYRKKLKEVWKPAV

SEQ ID NO: 43748 - protein, 978 aa, synthetic construct
  REGION 1..978: note = engineered CasX variant
QEIKRINKIRRRLVKDSNTKKAGKTGPMKTLLVRVMTPDLRERLENLRKKPENIPQPISNTSRANLNKLLTDYTEMKKAILHVYWEEFQKDPVGLMSRVAQPASKKIDQNKLKPEMDEKGNLTTAGFACSQCGQPLFVYKLEQVSEKGKAYTNYFGRCNVAEHEKLILLAQLKPEKDSDEAVTYSLGKFGQRALDFYSIHVTKESTHPVKPLAQIAGNRYASAPVGKALSDACMGTIASFLSKYQDIIIEHQKVVKGNQKRLESLRELAGKENLEYPSVTLPPQPHTKEGVDAYNEVIARVRTWVNLNLWQKLKLSRDDAKPLLRLKGFPSFPLVERQANEVDWWDMVCNVKKLINEKKEDGKVFWQNLAGYKRQEALRPYLSSEEDRKKGKKFARYQLGDLLNHLEKKHGEDWGKVYDEAWERIDKKVEGLSKHIKLEEERRSEDAQSKAALTDWLRAKASFVIEGLKEADKDEFCRCELKLQKWYGDLRGKPFAIEAENSILDISGFSKQYNCAFIWQKDGVKKLNLYLIINYFKGGKLRFKKIKPEAFEANRFYTVINKKSGEIVPMEVNFNFDDPNLIILPLAFGKRQGREFIWNDLLSLETGSLKLANGRVIEKTLYNRRTRQDEPALFVALTFERREVLDSSNIKPMNLIGVDRGENIPAVIALTDPEGCPLSRFKDSLGNPTHILRIGESYKEKQRTIQAKKEVEQRRAGGYSRKYASKAKNLADDMVRNTARDLLYYAVTQDAMLIFENLSRGFGRQGKRTFMAERQYTRMEDWLTAKLAYEGLPSKTYLSKTLAQYTSKTCSNCGFTITSADYDRVLEKLKKTATGWMTTINGKELKVEGQITYYNRYKRQNVVKDLSVELDRLSEESVNNDISSWTKGRSGEALSLLKKRFSHRPVQEKFVCLNCGFETHADEQAALNIARSWLFLRSQEYKKYQTNKTTGNTDKRAFVETWQSFYRKKLKEVWKPAV

SEQ ID NO: 43749 - protein, 978 aa, synthetic construct
  REGION 1..978: note = engineered CasX variant
QEIKRINKIRRRLVKDSNTKKAGKTGPMKTLLVRVMTPDLRERLENLRKKPENIPQPISNTSRANLNKLLTDYTEMKKAILHVYWEEFQKDPVGLMSRVAQPASKKIDQNKLKPEMDEKGNLTTAGFACSQCGQPLFVYKLEQVSEKGKAYTNYFGRCNVAEHEKLILLAQLKPEKDSDEAVTYSLGKFGQRALDFYSIHVTKESTHPVKPLAQIAGNRYASVPVGKALSDACMGTIASFLSKYQDIIIEHQKVVKGNQKRLESLRELAGKENLEYPSVTLPPQPHTKEGVDAYNEVIARVRTWVNLNLWQKLKLSRDDAKPLLRLKGFPSFPLVERQANEVDWWDMVCNVKKLINEKKEDGKVFWQNLAGYKRQEALRPYLSSEEDRKKGKKFARYQLGDLLNHLEKKHGEDWGKVYDEAWERIDKKVEGLSKHIKLEEERRSEDAQSKAALTDWLRAKASFVIEGLKEADKDEFCRCELKLQKWYGDLRGKPFAIEAENSILDISGFSKQYNCAFIWQKDGVKKLNLYLIINYFKGGKLRFKKIKPEAFEANRFYTVINKKSGEIVPMEVNFNFDDPNLIILPLAFGKRQGREFIWNDLLSLETGSLKLANGRVIEKTLYNRRTRQDEPALFVALTFERREVLDSSNIKPMNLIGVDRGENIPAVIALTDPEGCPLSRFKDSLGNPTHILRIGESYKEKQRTIQAKKEVEQRRAGGYSRKYASKAKNLADDMVRNTARDLLYYAVTQDAMLIFENLSRGFGRQGKRTFMAERQYTRMEDWLTAKLAYEGLPSKTYLSKTLAQYTSKTCSNCGFTITSADYDRVLEKLKKTATGWMTTINGKELKVEGQITYYNRYKRQNVVKDLSVELDRLSEESVNNDISSWTKGRSGEALSLLKKRFSHRPVQEKFVCLNCGFETHADEQAALNIARSWLFLRSQEYKKYQTNKTTGNTDKRAFVETWQSFYRKKLKEVWKPAV

SEQ ID NO: 43750 - protein, 978 aa, synthetic construct
  REGION 1..978: note = engineered CasX variant
QEIKRINKIRRRLVKDSNTKKAGKTGPMKTLLVRVMTPDLRERLENLRKKPENIPQPISNTSRANLNKLLTDYTEMKKAILHVYWEEFQKDPVGLMSRVAQPASKKIDQNKLKPEMDEKGNLTTAGFACSQCGQPLFVYKLEQVSEKGKAYTNYFGRCNVAEHEKLIKLAQLKPEKDSDEAVTYSLGKFGQRALDFYSIHVTKESTHPVKPLAQIAGNRYASGPVGKALSDACMGTIASFLSKYQDIIIEHQKVVKGNQKRLESLRELAGKENLEYPSVTLPPQPHTKEGVDAYNEVIARVRTWVNLNLWQKLKLSRDDAKPLLRLKGFPSFPLVERQANEVDWWDMVCNVKKLINEKKEDGKVFWQNLAGYKRQEALRPYLSSEEDRKKGKKFARYQLGDLLNHLEKKHGEDWGKVYDEAWERIDKKVEGLSKHIKLEEERRSEDAQSKAALTDWLRAKASFVIEGLKEADKDEFCRCELKLQKWYGDLRGKPFAIEAENSILDISGFSKQYNCAFIWQKDGVKKLNLYLIINYFKGGKLRFKKIKPEAFEANRFYTVINKKSGEIVPMEVNFNFDDPNLIILPLAFGKRQGREFIWNDLLSLETGSLKLANGRVIEKTLYNRRTRQDEPALFVALTFERREVLDSSNIKPMNLIGVDRGENIPAVIALTDPEGCPLSRFKDSLGNPTHILRIGESYKEKQRTIQAKKEVEQRRAGGYSRKYASKAKNLADDMVRNTARDLLYYAVTQDAMLIFENLSRGFGRQGKRTFMAERQYTRMEDWLTAKLAYEGLPSKTYLSKTLAQYTSKTCSNCGFTITSADYDRVLEKLKKTATGWMTTINGKELKVEGQITYYNRYKRQNVVKDLSVELDRLSEESVNNDISSWTKGRSGEALSLLKKRFSHRPVQEKFVCLNCGFETHADEQAALNIARSWLFLRSQEYKKYQTNKTTGNTDKRAFVETWQSFYRKKLKEVWKPAV

SEQ ID NO: 43751 - protein, 977 aa, synthetic construct
  REGION 1..977: note = engineered CasX variant
QEIKRINKIRRRLVKDSNTKKAGKTGPMKTLLVRVMTPDLRERLENLRKKPENIPQPISNTSRANLNKLLTDYTEMKKAILHVYWEEFQKDPVGLMSRVAQPASKKIDQNKLKPEMDEKGNLTTAGFACSQCGQPLFVYKLEQVSEKGKAYTNYFGRCNVAEHEKLILLAQLKPEKDSDEAVTYSLGKFGQRALDFYSIHVTKESTHPVKPLAQIAGNRYASPVGKALSDACMGTIASFLSKYQDIIIEHQKVVKGNQKRLESLRELAGKENLEYPSVTLPPQPHTKEGVDAYNEVIARVRTWVNLNLWQKLKLSRDDAKPLLRLKGFPSFPLVERQANEVDWWDMVCNVKKLINEKKEDGKVFWQNLAGYKRQEALRPYLSSEEDRKKGKKFARYQLGDLLNHLEKKHGEDWGKVYDEAWERIDKKVEGLSKHIKLEEERRSEDAQSKAALTDWLRAKASFVIEGLKEADKDEFCRCELKLQKWYGDLRGKPFAIEAENSILDISGFSKQYNCAFIWQKDGVKKLNLYLIINYFKGGKLRFKKIKPEAFEANRFYTVINKKSGEIVPMEVNFNFDDPNLIILPLAFGKRQGREFIWNDLLSLETGSLKLANGRVIEKTLYNRRTRQDEPALFVALTFERREVLDSSNIKPMNLIGVDRGENIPAVIALTDPEGCPLSRFKDSLGNPTHILRIGESYKEKQRTIQAKKEVEQRRAGGYSRKYASKAKNLADDMVRNTARDLLYYAVTQDAMLIFENLSRGFGRQGKRTFMAERQYTRMEDWLTAKLAYEGLPSKTYLSKTLAQYTSKTCSNCGFTITSADYDRVLEKLKKTATGWMTTINGKELKVEGQITYYNRYKRQNVVKDLSVELDRLSEESVNNDISSWTKGRSGEALSLLKKRFSHRPVQEKFVCLNCGFETHADEQAALNIARSWLFLRSQEYKKYQTNKTTGNTDKRAFVETWQSFYRKKLKEVWKPAV

SEQ ID NO: 43752 - protein, 978 aa, synthetic construct
  REGION 1..978: note = engineered CasX variant
QEIKRINKIRRRLVKDSNTKKAGKTGPMKTLLVRVMTPDLRERLENLRKKPENIPQPISNTSRANLNKLLTDYTEMKKAILHVYWEEFQKDPVGLMSRVAQPASKKIDQNKLKPEMDEKGNLTTAGFACSQCGQPLFVYKLEQVSEKGKAYTNYFGRCNVAEHEKLILLAQLKPEKDSDEAVTYSLGKFGQRALDFYSIHVTKESTHPVKPLAQIAGNRYASYPVGKALSDACMGTIASFLSKYQDIIIEHQKVVKGNQKRLESLRELAGKENLEYPSVTLPPQPHTKEGVDAYNEVIARVRTWVNLNLWQKLKLSRDDAKPLLRLKGFPSFPLVERQANEVDWWDMVCNVKKLINEKKEDGKVFWQNLAGYKRQEALRPYLSSEEDRKKGKKFARYQLGDLLWHLEKKHGEDWGKVYDEAWERIDKKVEGLSKHIKLEEERRSEDAQSKAALTDWLRAKASFVIEGLKEADKDEFCRCELKLQKWYGDLRGKPFAIEAENSILDISGFSKQYNCAFIWQKDGVKKLNLYLIINYFKGGKLRFKKIKPEAFEANRFYTVINKKSGEIVPMEVNFNFDDPNLIILPLAFGKRQGREFIWNDLLSLETGSLKLANGRVIEKTLYNRRTRQDEPALFVALTFERREVLDSSNIKPMNLIGVDRGENIPAVIALTDPEGCPLSRFKDSLGNPTHILRIGESYKEKQRTIQAKKEVEQRRAGGYSRKYASKAKNLADDMVRNTARDLLYYAVTQDAMLIFENLSRGFGRQGKRTFMAERQYTRMEDWLTAKLAYEGLPSKTYLSKTLAQYTSKTCSNCGFTITSADYDRVLEKLKKTATGWMTTINGKELKVEGQITYYNRYKRQNVVKDLSVELDRLSEESVNNDISSWTKGRSGEALSLLKKRFSHRPVQEKFVCLNCGFETHADEQAALNIARSWLFLRSQEYKKYQTNKTTGNTDKRAFVETWQSFYRKKLKEVWKPAV

SEQ ID NO: 43753 - protein, 978 aa, synthetic construct
  REGION 1..978: note = engineered CasX variant
QEIKRINKIRRRLVKDSNTKKAGKTGPMKTLLVRVMTPDLRERLENLRKKPENIPQPISNTSRANLNKLLTDYTEMKKAILHVYWEEFQKDPVGLMSRVAQPASKKIDQNKLKPEMDEKGNLTTAGFACSQCGQPLFVYKLEQVSEKGKAYTNYFGRCNVAEHEKLILLAQLKPEKDSDEAVTYSLGKFGQRALDFYSIHVTKESTHPVKPLAQIAGNRYASHPVGKALSDACMGTIASFLSKYQDIIIEHQKVVKGNQKRLESLRELAGKENLEYPSVTLPPQPHTKEGVDAYNEVIARVRTWVNLNLWQKLKLSRDDAKPLLRLKGFPSFPLVERQANEVDWWDMVCNVKKLINEKKEDGKVFWQNLAGYKRQEALRPYLSSEEDRKKGKKFARYQLGDLLWHLEKKHGEDWGKVYDEAWERIDKKVEGLSKHIKLEEERRSEDAQSKAALTDWLRAKASFVIEGLKEADKDEFCRCELKLQKWYGDLRGKPFAIEAENSILDISGFSKQYNCAFIWQKDGVKKLNLYLIINYFKGGKLRFKKIKPEAFEANRFYTVINKKSGEIVPMEVNFNFDDPNLIILPLAFGKRQGREFIWNDLLSLETGSLKLANGRVIEKTLYNRRTRQDEPALFVALTFERREVLDSSNIKPMNLIGVDRGENIPAVIALTDPEGCPLSRFKDSLGNPTHILRIGESYKEKQRTIQAKKEVEQRRAGGYSRKYASKAKNLADDMVRNTARDLLYYAVTQDAMLIFENLSRGFGRQGKRTFMAERQYTRMEDWLTAKLAYEGLPSKTYLSKTLAQYTSKTCSNCGFTITSADYDRVLEKLKKTATGWMTTINGKELKVEGQITYYNRYKRQNVVKDLSVELDRLSEESVNNDISSWTKGRSGEALSLLKKRFSHRPVQEKFVCLNCGFETHADEQAALNIARSWLFLRSQEYKKYQTNKTTGNTDKRAFVETWQSFYRKKLKEVWKPAV

SEQ ID NO: 43754 - protein, 978 aa, synthetic construct
  REGION 1..978: note = engineered CasX variant
QEIKRINKIRRRLVKDSNTKKAGKTGPMKTLLVRVMTPDLRERLENLRKKPENIPQPISNTSRANLNKLLTDYTEMKKAILHVYWEEFQKDPVGLMSRVAQPASKKIDQNKLKPEMDEKGNLTTAGFACSQCGQPLFVYKLEQVSEKGKAYTNYFGRCNVAEHEKLILLAQLKPEKDSDEAVTYSLGKFGQRALDFYSIHVTKESTHPVKPLAQIAGNRYASSPVGKALSDACMGTIASFLSKYQDIIIEHQKVVKGNQKRLESLRELAGKENLEYPSVTLPPQPHTKEGVDAYNEVIARVRTWVNLNLWQKLKLSRDDAKPLLRLKGFPSFPLVERQANEVDWWDMVCNVKKLINEKKEDGKVFWQNLAGYKRQEALRPYLSSEEDRKKGKKFARYQLGDLLWHLEKKHGEDWGKVYDEAWERIDKKVEGLSKHIKLEEERRSEDAQSKAALTDWLRAKASFVIEGLKEADKDEFCRCELKLQKWYGDLRGKPFAIEAENSILDISGFSKQYNCAFIWQKDGVKKLNLYLIINYFKGGKLRFKKIKPEAFEANRFYTVINKKSGEIVPMEVNFNFDDPNLIILPLAFGKRQGREFIWNDLLSLETGSLKLANGRVIEKTLYNRRTRQDEPALFVALTFERREVLDSSNIKPMNLIGVDRGENIPAVIALTDPEGCPLSRFKDSLGNPTHILRIGESYKEKQRTIQAKKEVEQRRAGGYSRKYASKAKNLADDMVRNTARDLLYYAVTQDAMLIFENLSRGFGRQGKRTFMAERQYTRMEDWLTAKLAYEGLPSKTYLSKTLAQYTSKTCSNCGFTITSADYDRVLEKLKKTATGWMTTINGKELKVEGQITYYNRYKRQNVVKDLSVELDRLSEESVNNDISSWTKGRSGEALSLLKKRFSHRPVQEKFVCLNCGFETHADEQAALNIARSWLFLRSQEYKKYQTNKTTGNTDKRAFVETWQSFYRKKLKEVWKPAV

SEQ ID NO: 43755 - protein, 978 aa, synthetic construct
  REGION 1..978: note = engineered CasX variant
QEIKRINKIRRRLVKDSNTKKAGKTGPMKTLLVRVMTPDLRERLENLRKKPENIPQPISNTSRANLNKLLTDYTEMKKAILHVYWEEFQKDPVGLMSRVAQPASKKIDQNKLKPEMDEKGNLTTAGFACSQCGQPLFVYKLEQVSEKGKAYTNYFGRCNVAEHEKLILLAQLKPEKDSDEAVTYSLGKFGQRALDFYSIHVTKESTHPVKPLAQIAGNRYASTPVGKALSDACMGTIASFLSKYQDIIIEHQKVVKGNQKRLESLRELAGKENLEYPSVTLPPQPHTKEGVDAYNEVIARVRTWVNLNLWQKLKLSRDDAKPLLRLKGFPSFPLVERQANEVDWWDMVCNVKKLINEKKEDGKVFWQNLAGYKRQEALRPYLSSEEDRKKGKKFARYQLGDLLWHLEKKHGEDWGKVYDEAWERIDKKVEGLSKHIKLEEERRSEDAQSKAALTDWLRAKASFVIEGLKEADKDEFCRCELKLQKWYGDLRGKPFAIEAENSILDISGFSKQYNCAFIWQKDGVKKLNLYLIINYFKGGKLRFKKIKPEAFEANRFYTVINKKSGEIVPMEVNFNFDDPNLIILPLAFGKRQGREFIWNDLLSLETGSLKLANGRVIEKTLYNRRTRQDEPALFVALTFERREVLDSSNIKPMNLIGVDRGENIPAVIALTDPEGCPLSRFKDSLGNPTHILRIGESYKEKQRTIQAKKEVEQRRAGGYSRKYASKAKNLADDMVRNTARDLLYYAVTQDAMLIFENLSRGFGRQGKRTFMAERQYTRMEDWLTAKLAYEGLPSKTYLSKTLAQYTSKTCSNCGFTITSADYDRVLEKLKKTATGWMTTINGKELKVEGQITYYNRYKRQNVVKDLSVELDRLSEESVNNDISSWTKGRSGEALSLLKKRFSHRPVQEKFVCLNCGFETHADEQAALNIARSWLFLRSQEYKKYQTNKTTGNTDKRAFVETWQSFYRKKLKEVWKPAV

SEQ ID NO: 43756 - protein, 978 aa, synthetic construct
  REGION 1..978: note = engineered CasX variant
QEIKRINKIRRRLVKDSNTKKAGKTGPMKTLLVRVMTPDLRERLENLRKKPENIPQPISNTSRANLNKLLTDYTEMKKAILHVYWEEFQKDPVGLMSRVAQPASKKIDQNKLKPEMDEKGNLTTAGFACSQCGQPLFVYKLEQVSEKGKAYTNYFGRCNVAEHEKLILLAQLKPEKDSDEAVTYSLGKFGQRALDFYSIHVTKESTHPVKPLAQIAGNRYASAPVGKALSDACMGTIASFLSKYQDIIIEHQKVVKGNQKRLESLRELAGKENLEYPSVTLPPQPHTKEGVDAYNEVIARVRTWVNLNLWQKLKLSRDDAKPLLRLKGFPSFPLVERQANEVDWWDMVCNVKKLINEKKEDGKVFWQNLAGYKRQEALRPYLSSEEDRKKGKKFARYQLGDLLWHLEKKHGEDWGKVYDEAWERIDKKVEGLSKHIKLEEERRSEDAQSKAALTDWLRAKASFVIEGLKEADKDEFCRCELKLQKWYGDLRGKPFAIEAENSILDISGFSKQYNCAFIWQKDGVKKLNLYLIINYFKGGKLRFKKIKPEAFEANRFYTVINKKSGEIVPMEVNFNFDDPNLIILPLAFGKRQGREFIWNDLLSLETGSLKLANGRVIEKTLYNRRTRQDEPALFVALTFERREVLDSSNIKPMNLIGVDRGENIPAVIALTDPEGCPLSRFKDSLGNPTHILRIGESYKEKQRTIQAKKEVEQRRAGGYSRKYASKAKNLADDMVRNTARDLLYYAVTQDAMLIFENLSRGFGRQGKRTFMAERQYTRMEDWLTAKLAYEGLPSKTYLSKTLAQYTSKTCSNCGFTITSADYDRVLEKLKKTATGWMTTINGKELKVEGQITYYNRYKRQNVVKDLSVELDRLSEESVNNDISSWTKGRSGEALSLLKKRFSHRPVQEKFVCLNCGFETHADEQAALNIARSWLFLRSQEYKKYQTNKTTGNTDKRAFVETWQSFYRKKLKEVWKPAV

SEQ ID NO: 43757 - protein, 978 aa, synthetic construct
  REGION 1..978: note = engineered CasX variant
QEIKRINKIRRRLVKDSNTKKAGKTGPMKTLLVRVMTPDLRERLENLRKKPENIPQPISNTSRANLNKLLTDYTEMKKAILHVYWEEFQKDPVGLMSRVAQPASKKIDQNKLKPEMDEKGNLTTAGFACSQCGQPLFVYKLEQVSEKGKAYTNYFGRCNVAEHEKLILLAQLKPEKDSDEAVTYSLGKFGQRALDFYSIHVTKESTHPVKPLAQIAGNRYASVPVGKALSDACMGTIASFLSKYQDIIIEHQKVVKGNQKRLESLRELAGKENLEYPSVTLPPQPHTKEGVDAYNEVIARVRTWVNLNLWQKLKLSRDDAKPLLRLKGFPSFPLVERQANEVDWWDMVCNVKKLINEKKEDGKVFWQNLAGYKRQEALRPYLSSEEDRKKGKKFARYQLGDLLWHLEKKHGEDWGKVYDEAWERIDKKVEGLSKHIKLEEERRSEDAQSKAALTDWLRAKASFVIEGLKEADKDEFCRCELKLQKWYGDLRGKPFAIEAENSILDISGFSKQYNCAFIWQKDGVKKLNLYLIINYFKGGKLRFKKIKPEAFEANRFYTVINKKSGEIVPMEVNFNFDDPNLIILPLAFGKRQGREFIWNDLLSLETGSLKLANGRVIEKTLYNRRTRQDEPALFVALTFERREVLDSSNIKPMNLIGVDRGENIPAVIALTDPEGCPLSRFKDSLGNPTHILRIGESYKEKQRTIQAKKEVEQRRAGGYSRKYASKAKNLADDMVRNTARDLLYYAVTQDAMLIFENLSRGFGRQGKRTFMAERQYTRMEDWLTAKLAYEGLPSKTYLSKTLAQYTSKTCSNCGFTITSADYDRVLEKLKKTATGWMTTINGKELKVEGQITYYNRYKRQNVVKDLSVELDRLSEESVNNDISSWTKGRSGEALSLLKKRFSHRPVQEKFVCLNCGFETHADEQAALNIARSWLFLRSQEYKKYQTNKTTGNTDKRAFVETWQSFYRKKLKEVWKPAV

SEQ ID NO: 43758 - protein, 978 aa, synthetic construct
  REGION 1..978: note = engineered CasX variant
QEIKRINKIRRRLVKDSNTKKAGKTGPMKTLLVRVMTPDLRERLENLRKKPENIPQPISNTSRANLNKLLTDYTEMKKAILHVYWEEFQKDPVGLMSRVAQPASKKIDQNKLKPEMDEKGNLTTAGFACSQCGQPLFVYKLEQVSEKGKAYTNYFGRCNVAEHEKLIKLAQLKPEKDSDEAVTYSLGKFGQRALDFYSIHVTKESTHPVKPLAQIAGNRYASGPVGKALSDACMGTIASFLSKYQDIIIEHQKVVKGNQKRLESLRELAGKENLEYPSVTLPPQPHTKEGVDAYNEVIARVRTWVNLNLWQKLKLSRDDAKPLLRLKGFPSFPLVERQANEVDWWDMVCNVKKLINEKKEDGKVFWQNLAGYKRQEALRPYLSSEEDRKKGKKFARYQLGDLLWHLEKKHGEDWGKVYDEAWERIDKKVEGLSKHIKLEEERRSEDAQSKAALTDWLRAKASFVIEGLKEADKDEFCRCELKLQKWYGDLRGKPFAIEAENSILDISGFSKQYNCAFIWQKDGVKKLNLYLIINYFKGGKLRFKKIKPEAFEANRFYTVINKKSGEIVPMEVNFNFDDPNLIILPLAFGKRQGREFIWNDLLSLETGSLKLANGRVIEKTLYNRRTRQDEPALFVALTFERREVLDSSNIKPMNLIGVDRGENIPAVIALTDPEGCPLSRFKDSLGNPTHILRIGESYKEKQRTIQAKKEVEQRRAGGYSRKYASKAKNLADDMVRNTARDLLYYAVTQDAMLIFENLSRGFGRQGKRTFMAERQYTRMEDWLTAKLAYEGLPSKTYLSKTLAQYTSKTCSNCGFTITSADYDRVLEKLKKTATGWMTTINGKELKVEGQITYYNRYKRQNVVKDLSVELDRLSEESVNNDISSWTKGRSGEALSLLKKRFSHRPVQEKFVCLNCGFETHADEQAALNIARSWLFLRSQEYKKYQTNKTTGNTDKRAFVETWQSFYRKKLKEVWKPAV

SEQ ID NO: 43759 - protein, 977 aa, synthetic construct
  REGION 1..977: note = engineered CasX variant
QEIKRINKIRRRLVKDSNTKKAGKTGPMKTLLVRVMTPDLRERLENLRKKPENIPQPISNTSRANLNKLLTDYTEMKKAILHVYWEEFQKDPVGLMSRVAQPASKKIDQNKLKPEMDEKGNLTTAGFACSQCGQPLFVYKLEQVSEKGKAYTNYFGRCNVAEHEKLILLAQLKPEKDSDEAVTYSLGKFGQRALDFYSIHVTKESTHPVKPLAQIAGNRYASPVGKALSDACMGTIASFLSKYQDIIIEHQKVVKGNQKRLESLRELAGKENLEYPSVTLPPQPHTKEGVDAYNEVIARVRTWVNLNLWQKLKLSRDDAKPLLRLKGFPSFPLVERQANEVDWWDMVCNVKKLINEKKEDGKVFWQNLAGYKRQEALRPYLSSEEDRKKGKKFARYQLGDLLWHLEKKHGEDWGKVYDEAWERIDKKVEGLSKHIKLEEERRSEDAQSKAALTDWLRAKASFVIEGLKEADKDEFCRCELKLQKWYGDLRGKPFAIEAENSILDISGFSKQYNCAFIWQKDGVKKLNLYLIINYFKGGKLRFKKIKPEAFEANRFYTVINKKSGEIVPMEVNFNFDDPNLIILPLAFGKRQGREFIWNDLLSLETGSLKLANGRVIEKTLYNRRTRQDEPALFVALTFERREVLDSSNIKPMNLIGVDRGENIPAVIALTDPEGCPLSRFKDSLGNPTHILRIGESYKEKQRTIQAKKEVEQRRAGGYSRKYASKAKNLADDMVRNTARDLLYYAVTQDAMLIFENLSRGFGRQGKRTFMAERQYTRMEDWLTAKLAYEGLPSKTYLSKTLAQYTSKTCSNCGFTITSADYDRVLEKLKKTATGWMTTINGKELKVEGQITYYNRYKRQNVVKDLSVELDRLSEESVNNDISSWTKGRSGEALSLLKKRFSHRPVQEKFVCLNCGFETHADEQAALNIARSWLFLRSQEYKKYQTNKTTGNTDKRAFVETWQSFYRKKLKEVWKPAV

SEQ ID NO: 43760 - protein, 978 aa, synthetic construct
  REGION 1..978: note = engineered CasX variant
QEIKRINKIRRRLVKDSNTKKAGKTGPMKTLLVRVMTPDLRERLENLRKKPENIPQPISNTSRANLNKLLTDYTEMKKAILHVYWEEFQKDPVGLMSRVAQPASKKIDQNKLKPEMDEKGNLTTAGFACSQCGQPLFVYKLEQVSEKGKAYTNYFGRCNVAEHEKLILLAQLKPEKDSDEAVTYSLGKFGQRALDFYSIHVTKESTHPVKPLAQIAGNRYASYPVGKALSDACMGTIASFLSKYQDIIIEHQKVVKGNQKRLESLRELAGKENLEYPSVTLPPQPHTKEGVDAYNEVIARVRTWVNLNLWQKLKLSRDDAKPLLRLKGFPSFPLVERQANEVDWWDMVCNVKKLINEKKEDGKVFWQNLAGYKRQEALRPYLSSEEDRKKGKKFARYQLGDLLLHLYKKHGEDWGKVYDEAWERIDKKVEGLSKHIKLEEERRSEDAQSKAALTDWLRAKASFVIEGLKEADKDEFCRCELKLQKWYGDLRGKPFAIEAENSILDISGFSKQYNCAFIWQKDGVKKLNLYLIINYFKGGKLRFKKIKPEAFEANRFYTVINKKSGEIVPMEVNFNFDDPNLIILPLAFGKRQGREFIWNDLLSLETGSLKLANGRVIEKTLYNRRTRQDEPALFVALTFERREVLDSSNIKPMNLIGVDRGENIPAVIALTDPEGCPLSRFKDSLGNPTHILRIGESYKEKQRTIQAKKEVEQRRAGGYSRKYASKAKNLADDMVRNTARDLLYYAVTQDAMLIFENLSRGFGRQGKRTFMAERQYTRMEDWLTAKLAYEGLPSKTYLSKTLAQYTSKTCSNCGFTITSADYDRVLEKLKKTATGWMTTINGKELKVEGQITYYNRYKRQNVVKDLSVELDRLSEESVNNDISSWTKGRSGEALSLLKKRFSHRPVQEKFVCLNCGFETHADEQAALNIARSWLFLRSQEYKKYQTNKTTGNTDKRAFVETWQSFYRKKLKEVWKPAV

SEQ ID NO: 43761 - protein, 978 aa, synthetic construct
  REGION 1..978: note = engineered CasX variant
QEIKRINKIRRRLVKDSNTKKAGKTGPMKTLLVRVMTPDLRERLENLRKKPENIPQPISNTSRANLNKLLTDYTEMKKAILHVYWEEFQKDPVGLMSRVAQPASKKIDQNKLKPEMDEKGNLTTAGFACSQCGQPLFVYKLEQVSEKGKAYTNYFGRCNVAEHEKLILLAQLKPEKDSDEAVTYSLGKFGQRALDFYSIHVTKESTHPVKPLAQIAGNRYASHPVGKALSDACMGTIASFLSKYQDIIIEHQKVVKGNQKRLESLRELAGKENLEYPSVTLPPQPHTKEGVDAYNEVIARVRTWVNLNLWQKLKLSRDDAKPLLRLKGFPSFPLVERQANEVDWWDMVCNVKKLINEKKEDGKVFWQNLAGYKRQEALRPYLSSEEDRKKGKKFARYQLGDLLLHLYKKHGEDWGKVYDEAWERIDKKVEGLSKHIKLEEERRSEDAQSKAALTDWLRAKASFVIEGLKEADKDEFCRCELKLQKWYGDLRGKPFAIEAENSILDISGFSKQYNCAFIWQKDGVKKLNLYLIINYFKGGKLRFKKIKPEAFEANRFYTVINKKSGEIVPMEVNFNFDDPNLIILPLAFGKRQGREFIWNDLLSLETGSLKLANGRVIEKTLYNRRTRQDEPALFVALTFERREVLDSSNIKPMNLIGVDRGENIPAVIALTDPEGCPLSRFKDSLGNPTHILRIGESYKEKQRTIQAKKEVEQRRAGGYSRKYASKAKNLADDMVRNTARDLLYYAVTQDAMLIFENLSRGFGRQGKRTFMAERQYTRMEDWLTAKLAYEGLPSKTYLSKTLAQYTSKTCSNCGFTITSADYDRVLEKLKKTATGWMTTINGKELKVEGQITYYNRYKRQNVVKDLSVELDRLSEESVNNDISSWTKGRSGEALSLLKKRFSHRPVQEKFVCLNCGFETHADEQAALNIARSWLFLRSQEYKKYQTNKTTGNTDKRAFVETWQSFYRKKLKEVWKPAV

SEQ ID NO: 43762 - protein, 978 aa, synthetic construct
  REGION 1..978: note = engineered CasX variant
QEIKRINKIRRRLVKDSNTKKAGKTGPMKTLLVRVMTPDLRERLENLRKKPENIPQPISNTSRANLNKLLTDYTEMKKAILHVYWEEFQKDPVGLMSRVAQPASKKIDQNKLKPEMDEKGNLTTAGFACSQCGQPLFVYKLEQVSEKGKAYTNYFGRCNVAEHEKLILLAQLKPEKDSDEAVTYSLGKFGQRALDFYSIHVTKESTHPVKPLAQIAGNRYASSPVGKALSDACMGTIASFLSKYQDIIIEHQKVVKGNQKRLESLRELAGKENLEYPSVTLPPQPHTKEGVDAYNEVIARVRTWVNLNLWQKLKLSRDDAKPLLRLKGFPSFPLVERQANEVDWWDMVCNVKKLINEKKEDGKVFWQNLAGYKRQEALRPYLSSEEDRKKGKKFARYQLGDLLLHLYKKHGEDWGKVYDEAWERIDKKVEGLSKHIKLEEERRSEDAQSKAALTDWLRAKASFVIEGLKEADKDEFCRCELKLQKWYGDLRGKPFAIEAENSILDISGFSKQYNCAFIWQKDGVKKLNLYLIINYFKGGKLRFKKIKPEAFEANRFYTVINKKSGEIVPMEVNFNFDDPNLIILPLAFGKRQGREFIWNDLLSLETGSLKLANGRVIEKTLYNRRTRQDEPALFVALTFERREVLDSSNIKPMNLIGVDRGENIPAVIALTDPEGCPLSRFKDSLGNPTHILRIGESYKEKQRTIQAKKEVEQRRAGGYSRKYASKAKNLADDMVRNTARDLLYYAVTQDAMLIFENLSRGFGRQGKRTFMAERQYTRMEDWLTAKLAYEGLPSKTYLSKTLAQYTSKTCSNCGFTITSADYDRVLEKLKKTATGWMTTINGKELKVEGQITYYNRYKRQNVVKDLSVELDRLSEESVNNDISSWTKGRSGEALSLLKKRFSHRPVQEKFVCLNCGFETHADEQAALNIARSWLFLRSQEYKKYQTNKTTGNTDKRAFVETWQSFYRKKLKEVWKPAV

SEQ ID NO: 43763 - protein, 978 aa, synthetic construct
  REGION 1..978: note = engineered CasX variant
QEIKRINKIRRRLVKDSNTKKAGKTGPMKTLLVRVMTPDLRERLENLRKKPENIPQPISNTSRANLNKLLTDYTEMKKAILHVYWEEFQKDPVGLMSRVAQPASKKIDQNKLKPEMDEKGNLTTAGFACSQCGQPLFVYKLEQVSEKGKAYTNYFGRCNVAEHEKLILLAQLKPEKDSDEAVTYSLGKFGQRALDFYSIHVTKESTHPVKPLAQIAGNRYASTPVGKALSDACMGTIASFLSKYQDIIIEHQKVVKGNQKRLESLRELAGKENLEYPSVTLPPQPHTKEGVDAYNEVIARVRTWVNLNLWQKLKLSRDDAKPLLRLKGFPSFPLVERQANEVDWWDMVCNVKKLINEKKEDGKVFWQNLAGYKRQEALRPYLSSEEDRKKGKKFARYQLGDLLLHLYKKHGEDWGKVYDEAWERIDKKVEGLSKHIKLEEERRSEDAQSKAALTDWLRAKASFVIEGLKEADKDEFCRCELKLQKWYGDLRGKPFAIEAENSILDISGFSKQYNCAFIWQKDGVKKLNLYLIINYFKGGKLRFKKIKPEAFEANRFYTVINKKSGEIVPMEVNFNFDDPNLIILPLAFGKRQGREFIWNDLLSLETGSLKLANGRVIEKTLYNRRTRQDEPALFVALTFERREVLDSSNIKPMNLIGVDRGENIPAVIALTDPEGCPLSRFKDSLGNPTHILRIGESYKEKQRTIQAKKEVEQRRAGGYSRKYASKAKNLADDMVRNTARDLLYYAVTQDAMLIFENLSRGFGRQGKRTFMAERQYTRMEDWLTAKLAYEGLPSKTYLSKTLAQYTSKTCSNCGFTITSADYDRVLEKLKKTATGWMTTINGKELKVEGQITYYNRYKRQNVVKDLSVELDRLSEESVNNDISSWTKGRSGEALSLLKKRFSHRPVQEKFVCLNCGFETHADEQAALNIARSWLFLRSQEYKKYQTNKTTGNTDKRAFVETWQSFYRKKLKEVWKPAV

SEQ ID NO: 43764 - protein, 978 aa, synthetic construct
  REGION 1..978: note = engineered CasX variant
QEIKRINKIRRRLVKDSNTKKAGKTGPMKTLLVRVMTPDLRERLENLRKKPENIPQPISNTSRANLNKLLTDYTEMKKAILHVYWEEFQKDPVGLMSRVAQPASKKIDQNKLKPEMDEKGNLTTAGFACSQCGQPLFVYKLEQVSEKGKAYTNYFGRCNVAEHEKLILLAQLKPEKDSDEAVTYSLGKFGQRALDFYSIHVTKESTHPVKPLAQIAGNRYASAPVGKALSDACMGTIASFLSKYQDIIIEHQKVVKGNQKRLESLRELAGKENLEYPSVTLPPQPHTKEGVDAYNEVIARVRTWVNLNLWQKLKLSRDDAKPLLRLKGFPSFPLVERQANEVDWWDMVCNVKKLINEKKEDGKVFWQNLAGYKRQEALRPYLSSEEDRKKGKKFARYQLGDLLLHLYKKHGEDWGKVYDEAWERIDKKVEGLSKHIKLEEERRSEDAQSKAALTDWLRAKASFVIEGLKEADKDEFCRCELKLQKWYGDLRGKPFAIEAENSILDISGFSKQYNCAFIWQKDGVKKLNLYLIINYFKGGKLRFKKIKPEAFEANRFYTVINKKSGEIVPMEVNFNFDDPNLIILPLAFGKRQGREFIWNDLLSLETGSLKLANGRVIEKTLYNRRTRQDEPALFVALTFERREVLDSSNIKPMNLIGVDRGENIPAVIALTDPEGCPLSRFKDSLGNPTHILRIGESYKEKQRTIQAKKEVEQRRAGGYSRKYASKAKNLADDMVRNTARDLLYYAVTQDAMLIFENLSRGFGRQGKRTFMAERQYTRMEDWLTAKLAYEGLPSKTYLSKTLAQYTSKTCSNCGFTITSADYDRVLEKLKKTATGWMTTINGKELKVEGQITYYNRYKRQNVVKDLSVELDRLSEESVNNDISSWTKGRSGEALSLLKKRFSHRPVQEKFVCLNCGFETHADEQAALNIARSWLFLRSQEYKKYQTNKTTGNTDKRAFVETWQSFYRKKLKEVWKPAV

SEQ ID NO: 43765 - protein, 978 aa, synthetic construct
  REGION 1..978: note = engineered CasX variant
QEIKRINKIRRRLVKDSNTKKAGKTGPMKTLLVRVMTPDLRERLENLRKKPENIPQPISNTSRANLNKLLTDYTEMKKAILHVYWEEFQKDPVGLMSRVAQPASKKIDQNKLKPEMDEKGNLTTAGFACSQCGQPLFVYKLEQVSEKGKAYTNYFGRCNVAEHEKLILLAQLKPEKDSDEAVTYSLGKFGQRALDFYSIHVTKESTHPVKPLAQIAGNRYASVPVGKALSDACMGTIASFLSKYQDIIIEHQKVVKGNQKRLESLRELAGKENLEYPSVTLPPQPHTKEGVDAYNEVIARVRTWVNLNLWQKLKLSRDDAKPLLRLKGFPSFPLVERQANEVDWWDMVCNVKKLINEKKEDGKVFWQNLAGYKRQEALRPYLSSEEDRKKGKKFARYQLGDLLLHLYKKHGEDWGKVYDEAWERIDKKVEGLSKHIKLEEERRSEDAQSKAALTDWLRAKASFVIEGLKEADKDEFCRCELKLQKWYGDLRGKPFAIEAENSILDISGFSKQYNCAFIWQKDGVKKLNLYLIINYFKGGKLRFKKIKPEAFEANRFYTVINKKSGEIVPMEVNFNFDDPNLIILPLAFGKRQGREFIWNDLLSLETGSLKLANGRVIEKTLYNRRTRQDEPALFVALTFERREVLDSSNIKPMNLIGVDRGENIPAVIALTDPEGCPLSRFKDSLGNPTHILRIGESYKEKQRTIQAKKEVEQRRAGGYSRKYASKAKNLADDMVRNTARDLLYYAVTQDAMLIFENLSRGFGRQGKRTFMAERQYTRMEDWLTAKLAYEGLPSKTYLSKTLAQYTSKTCSNCGFTITSADYDRVLEKLKKTATGWMTTINGKELKVEGQITYYNRYKRQNVVKDLSVELDRLSEESVNNDISSWTKGRSGEALSLLKKRFSHRPVQEKFVCLNCGFETHADEQAALNIARSWLFLRSQEYKKYQTNKTTGNTDKRAFVETWQSFYRKKLKEVWKPAV

SEQ ID NO: 43766 - protein, 978 aa, synthetic construct
  REGION 1..978: note = engineered CasX variant
QEIKRINKIRRRLVKDSNTKKAGKTGPMKTLLVRVMTPDLRERLENLRKKPENIPQPISNTSRANLNKLLTDYTEMKKAILHVYWEEFQKDPVGLMSRVAQPASKKIDQNKLKPEMDEKGNLTTAGFACSQCGQPLFVYKLEQVSEKGKAYTNYFGRCNVAEHEKLIKLAQLKPEKDSDEAVTYSLGKFGQRALDFYSIHVTKESTHPVKPLAQIAGNRYASGPVGKALSDACMGTIASFLSKYQDIIIEHQKVVKGNQKRLESLRELAGKENLEYPSVTLPPQPHTKEGVDAYNEVIARVRTWVNLNLWQKLKLSRDDAKPLLRLKGFPSFPLVERQANEVDWWDMVCNVKKLINEKKEDGKVFWQNLAGYKRQEALRPYLSSEEDRKKGKKFARYQLGDLLLHLYKKHGEDWGKVYDEAWERIDKKVEGLSKHIKLEEERRSEDAQSKAALTDWLRAKASFVIEGLKEADKDEFCRCELKLQKWYGDLRGKPFAIEAENSILDISGFSKQYNCAFIWQKDGVKKLNLYLIINYFKGGKLRFKKIKPEAFEANRFYTVINKKSGEIVPMEVNFNFDDPNLIILPLAFGKRQGREFIWNDLLSLETGSLKLANGRVIEKTLYNRRTRQDEPALFVALTFERREVLDSSNIKPMNLIGVDRGENIPAVIALTDPEGCPLSRFKDSLGNPTHILRIGESYKEKQRTIQAKKEVEQRRAGGYSRKYASKAKNLADDMVRNTARDLLYYAVTQDAMLIFENLSRGFGRQGKRTFMAERQYTRMEDWLTAKLAYEGLPSKTYLSKTLAQYTSKTCSNCGFTITSADYDRVLEKLKKTATGWMTTINGKELKVEGQITYYNRYKRQNVVKDLSVELDRLSEESVNNDISSWTKGRSGEALSLLKKRFSHRPVQEKFVCLNCGFETHADEQAALNIARSWLFLRSQEYKKYQTNKTTGNTDKRAFVETWQSFYRKKLKEVWKPAV

SEQ ID NO: 43767 - protein, 977 aa, synthetic construct
  REGION 1..977: note = engineered CasX variant
QEIKRINKIRRRLVKDSNTKKAGKTGPMKTLLVRVMTPDLRERLENLRKKPENIPQPISNTSRANLNKLLTDYTEMKKAILHVYWEEFQKDPVGLMSRVAQPASKKIDQNKLKPEMDEKGNLTTAGFACSQCGQPLFVYKLEQVSEKGKAYTNYFGRCNVAEHEKLILLAQLKPEKDSDEAVTYSLGKFGQRALDFYSIHVTKESTHPVKPLAQIAGNRYASPVGKALSDACMGTIASFLSKYQDIIIEHQKVVKGNQKRLESLRELAGKENLEYPSVTLPPQPHTKEGVDAYNEVIARVRTWVNLNLWQKLKLSRDDAKPLLRLKGFPSFPLVERQANEVDWWDMVCNVKKLINEKKEDGKVFWQNLAGYKRQEALRPYLSSEEDRKKGKKFARYQLGDLLLHLYKKHGEDWGKVYDEAWERIDKKVEGLSKHIKLEEERRSEDAQSKAALTDWLRAKASFVIEGLKEADKDEFCRCELKLQKWYGDLRGKPFAIEAENSILDISGFSKQYNCAFIWQKDGVKKLNLYLIINYFKGGKLRFKKIKPEAFEANRFYTVINKKSGEIVPMEVNFNFDDPNLIILPLAFGKRQGREFIWNDLLSLETGSLKLANGRVIEKTLYNRRTRQDEPALFVALTFERREVLDSSNIKPMNLIGVDRGENIPAVIALTDPEGCPLSRFKDSLGNPTHILRIGESYKEKQRTIQAKKEVEQRRAGGYSRKYASKAKNLADDMVRNTARDLLYYAVTQDAMLIFENLSRGFGRQGKRTFMAERQYTRMEDWLTAKLAYEGLPSKTYLSKTLAQYTSKTCSNCGFTITSADYDRVLEKLKKTATGWMTTINGKELKVEGQITYYNRYKRQNVVKDLSVELDRLSEESVNNDISSWTKGRSGEALSLLKKRFSHRPVQEKFVCLNCGFETHADEQAALNIARSWLFLRSQEYKKYQTNKTTGNTDKRAFVETWQSFYRKKLKEVWKPAV

SEQ ID NO: 43768 - protein, 978 aa, synthetic construct
  REGION 1..978: note = engineered CasX variant
QEIKRINKIRRRLVKDSNTKKAGKTGPMKTLLVRVMTPDLRERLENLRKKPENIPQPISNTSRANLNKLLTDYTEMKKAILHVYWEEFQKDPVGLMSRVAQPASKKIDQNKLKPEMDEKGNLTTAGFACSQCGQPLFVYKLEQVSEKGKAYTNYFGRCNVAEHEKLILLAQLKPEKDSDEAVTYSLGKFGQRALDFYSIHVTKESTHPVKPLAQIAGNRYASYPVGKALSDACMGTIASFLSKYQDIIIEHQKVVKGNQKRLESLRELAGKENLEYPSVTLPPQPHTKEGVDAYNEVIARVRTWVNLNLWQKLKLSRDDAKPLLRLKGFPSFPLVERQANEVDWWDMVCNVKKLINEKKEDGKVFWQNLAGYKRQEALRPYLSSEEDRKKGKKFARYQLGDLLLHLEKKHPEDWGKVYDEAWERIDKKVEGLSKHIKLEEERRSEDAQSKAALTDWLRAKASFVIEGLKEADKDEFCRCELKLQKWYGDLRGKPFAIEAENSILDISGFSKQYNCAFIWQKDGVKKLNLYLIINYFKGGKLRFKKIKPEAFEANRFYTVINKKSGEIVPMEVNFNFDDPNLIILPLAFGKRQGREFIWNDLLSLETGSLKLANGRVIEKTLYNRRTRQDEPALFVALTFERREVLDSSNIKPMNLIGVDRGENIPAVIALTDPEGCPLSRFKDSLGNPTHILRIGESYKEKQRTIQAKKEVEQRRAGGYSRKYASKAKNLADDMVRNTARDLLYYAVTQDAMLIFENLSRGFGRQGKRTFMAERQYTRMEDWLTAKLAYEGLPSKTYLSKTLAQYTSKTCSNCGFTITSADYDRVLEKLKKTATGWMTTINGKELKVEGQITYYNRYKRQNVVKDLSVELDRLSEESVNNDISSWTKGRSGEALSLLKKRFSHRPVQEKFVCLNCGFETHADEQAALNIARSWLFLRSQEYKKYQTNKTTGNTDKRAFVETWQSFYRKKLKEVWKPAV

SEQ ID NO: 43769 - protein, 978 aa, synthetic construct
  REGION 1..978: note = engineered CasX variant
QEIKRINKIRRRLVKDSNTKKAGKTGPMKTLLVRVMTPDLRERLENLRKKPENIPQPISNTSRANLNKLLTDYTEMKKAILHVYWEEFQKDPVGLMSRVAQPASKKIDQNKLKPEMDEKGNLTTAGFACSQCGQPLFVYKLEQVSEKGKAYTNYFGRCNVAEHEKLILLAQLKPEKDSDEAVTYSLGKFGQRALDFYSIHVTKESTHPVKPLAQIAGNRYASHPVGKALSDACMGTIASFLSKYQDIIIEHQKVVKGNQKRLESLRELAGKENLEYPSVTLPPQPHTKEGVDAYNEVIARVRTWVNLNLWQKLKLSRDDAKPLLRLKGFPSFPLVERQANEVDWWDMVCNVKKLINEKKEDGKVFWQNLAGYKRQEALRPYLSSEEDRKKGKKFARYQLGDLLLHLEKKHPEDWGKVYDEAWERIDKKVEGLSKHIKLEEERRSEDAQSKAALTDWLRAKASFVIEGLKEADKDEFCRCELKLQKWYGDLRGKPFAIEAENSILDISGFSKQYNCAFIWQKDGVKKLNLYLIINYFKGGKLRFKKIKPEAFEANRFYTVINKKSGEIVPMEVNFNFDDPNLIILPLAFGKRQGREFIWNDLLSLETGSLKLANGRVIEKTLYNRRTRQDEPALFVALTFERREVLDSSNIKPMNLIGVDRGENIPAVIALTDPEGCPLSRFKDSLGNPTHILRIGESYKEKQRTIQAKKEVEQRRAGGYSRKYASKAKNLADDMVRNTARDLLYYAVTQDAMLIFENLSRGFGRQGKRTFMAERQYTRMEDWLTAKLAYEGLPSKTYLSKTLAQYTSKTCSNCGFTITSADYDRVLEKLKKTATGWMTTINGKELKVEGQITYYNRYKRQNVVKDLSVELDRLSEESVNNDISSWTKGRSGEALSLLKKRFSHRPVQEKFVCLNCGFETHADEQAALNIARSWLFLRSQEYKKYQTNKTTGNTDKRAFVETWQSFYRKKLKEVWKPAV

SEQ ID NO: 43770 - protein, 978 aa, synthetic construct
  REGION 1..978: note = engineered CasX variant
QEIKRINKIRRRLVKDSNTKKAGKTGPMKTLLVRVMTPDLRERLENLRKKPENIPQPISNTSRANLNKLLTDYTEMKKAILHVYWEEFQKDPVGLMSRVAQPASKKIDQNKLKPEMDEKGNLTTAGFACSQCGQPLFVYKLEQVSEKGKAYTNYFGRCNVAEHEKLILLAQLKPEKDSDEAVTYSLGKFGQRALDFYSIHVTKESTHPVKPLAQIAGNRYASSPVGKALSDACMGTIASFLSKYQDIIIEHQKVVKGNQKRLESLRELAGKENLEYPSVTLPPQPHTKEGVDAYNEVIARVRTWVNLNLWQKLKLSRDDAKPLLRLKGFPSFPLVERQANEVDWWDMVCNVKKLINEKKEDGKVFWQNLAGYKRQEALRPYLSSEEDRKKGKKFARYQLGDLLLHLEKKHPEDWGKVYDEAWERIDKKVEGLSKHIKLEEERRSEDAQSKAALTDWLRAKASFVIEGLKEADKDEFCRCELKLQKWYGDLRGKPFAIEAENSILDISGFSKQYNCAFIWQKDGVKKLNLYLIINYFKGGKLRFKKIKPEAFEANRFYTVINKKSGEIVPMEVNFNFDDPNLIILPLAFGKRQGREFIWNDLLSLETGSLKLANGRVIEKTLYNRRTRQDEPALFVALTFERREVLDSSNIKPMNLIGVDRGENIPAVIALTDPEGCPLSRFKDSLGNPTHILRIGESYKEKQRTIQAKKEVEQRRAGGYSRKYASKAKNLADDMVRNTARDLLYYAVTQDAMLIFENLSRGFGRQGKRTFMAERQYTRMEDWLTAKLAYEGLPSKTYLSKTLAQYTSKTCSNCGFTITSADYDRVLEKLKKTATGWMTTINGKELKVEGQITYYNRYKRQNVVKDLSVELDRLSEESVNNDISSWTKGRSGEALSLLKKRFSHRPVQEKFVCLNCGFETHADEQAALNIARSWLFLRSQEYKKYQTNKTTGNTDKRAFVETWQSFYRKKLKEVWKPAV

SEQ ID NO: 43771 - protein, 978 aa, synthetic construct
  REGION 1..978: note = engineered CasX variant
QEIKRINKIRRRLVKDSNTKKAGKTGPMKTLLVRVMTPDLRERLENLRKKPENIPQPISNTSRANLNKLLTDYTEMKKAILHVYWEEFQKDPVGLMSRVAQPASKKIDQNKLKPEMDEKGNLTTAGFACSQCGQPLFVYKLEQVSEKGKAYTNYFGRCNVAEHEKLILLAQLKPEKDSDEAVTYSLGKFGQRALDFYSIHVTKESTHPVKPLAQIAGNRYASTPVGKALSDACMGTIASFLSKYQDIIIEHQKVVKGNQKRLESLRELAGKENLEYPSVTLPPQPHTKEGVDAYNEVIARVRTWVNLNLWQKLKLSRDDAKPLLRLKGFPSFPLVERQANEVDWWDMVCNVKKLINEKKEDGKVFWQNLAGYKRQEALRPYLSSEEDRKKGKKFARYQLGDLLLHLEKKHPEDWGKVYDEAWERIDKKVEGLSKHIKLEEERRSEDAQSKAALTDWLRAKASFVIEGLKEADKDEFCRCELKLQKWYGDLRGKPFAIEAENSILDISGFSKQYNCAFIWQKDGVKKLNLYLIINYFKGGKLRFKKIKPEAFEANRFYTVINKKSGEIVPMEVNFNFDDPNLIILPLAFGKRQGREFIWNDLLSLETGSLKLANGRVIEKTLYNRRTRQDEPALFVALTFERREVLDSSNIKPMNLIGVDRGENIPAVIALTDPEGCPLSRFKDSLGNPTHILRIGESYKEKQRTIQAKKEVEQRRAGGYSRKYASKAKNLADDMVRNTARDLLYYAVTQDAMLIFENLSRGFGRQGKRTFMAERQYTRMEDWLTAKLAYEGLPSKTYLSKTLAQYTSKTCSNCGFTITSADYDRVLEKLKKTATGWMTTINGKELKVEGQITYYNRYKRQNVVKDLSVELDRLSEESVNNDISSWTKGRSGEALSLLKKRFSHRPVQEKFVCLNCGFETHADEQAALNIARSWLFLRSQEYKKYQTNKTTGNTDKRAFVETWQSFYRKKLKEVWKPAV

SEQ ID NO: 43772 - protein, 978 aa, synthetic construct
  REGION 1..978: note = engineered CasX variant
QEIKRINKIRRRLVKDSNTKKAGKTGPMKTLLVRVMTPDLRERLENLRKKPENIPQPISNTSRANLNKLLTDYTEMKKAILHVYWEEFQKDPVGLMSRVAQPASKKIDQNKLKPEMDEKGNLTTAGFACSQCGQPLFVYKLEQVSEKGKAYTNYFGRCNVAEHEKLILLAQLKPEKDSDEAVTYSLGKFGQRALDFYSIHVTKESTHPVKPLAQIAGNRYASAPVGKALSDACMGTIASFLSKYQDIIIEHQKVVKGNQKRLESLRELAGKENLEYPSVTLPPQPHTKEGVDAYNEVIARVRTWVNLNLWQKLKLSRDDAKPLLRLKGFPSFPLVERQANEVDWWDMVCNVKKLINEKKEDGKVFWQNLAGYKRQEALRPYLSSEEDRKKGKKFARYQLGDLLLHLEKKHPEDWGKVYDEAWERIDKKVEGLSKHIKLEEERRSEDAQSKAALTDWLRAKASFVIEGLKEADKDEFCRCELKLQKWYGDLRGKPFAIEAENSILDISGFSKQYNCAFIWQKDGVKKLNLYLIINYFKGGKLRFKKIKPEAFEANRFYTVINKKSGEIVPMEVNFNFDDPNLIILPLAFGKRQGREFIWNDLLSLETGSLKLANGRVIEKTLYNRRTRQDEPALFVALTFERREVLDSSNIKPMNLIGVDRGENIPAVIALTDPEGCPLSRFKDSLGNPTHILRIGESYKEKQRTIQAKKEVEQRRAGGYSRKYASKAKNLADDMVRNTARDLLYYAVTQDAMLIFENLSRGFGRQGKRTFMAERQYTRMEDWLTAKLAYEGLPSKTYLSKTLAQYTSKTCSNCGFTITSADYDRVLEKLKKTATGWMTTINGKELKVEGQITYYNRYKRQNVVKDLSVELDRLSEESVNNDISSWTKGRSGEALSLLKKRFSHRPVQEKFVCLNCGFETHADEQAALNIARSWLFLRSQEYKKYQTNKTTGNTDKRAFVETWQSFYRKKLKEVWKPAV

SEQ ID NO: 43773 - protein, 978 aa, synthetic construct
  REGION 1..978: note = engineered CasX variant
QEIKRINKIRRRLVKDSNTKKAGKTGPMKTLLVRVMTPDLRERLENLRKKPENIPQPISNTSRANLNKLLTDYTEMKKAILHVYWEEFQKDPVGLMSRVAQPASKKIDQNKLKPEMDEKGNLTTAGFACSQCGQPLFVYKLEQVSEKGKAYTNYFGRCNVAEHEKLILLAQLKPEKDSDEAVTYSLGKFGQRALDFYSIHVTKESTHPVKPLAQIAGNRYASVPVGKALSDACMGTIASFLSKYQDIIIEHQKVVKGNQKRLESLRELAGKENLEYPSVTLPPQPHTKEGVDAYNEVIARVRTWVNLNLWQKLKLSRDDAKPLLRLKGFPSFPLVERQANEVDWWDMVCNVKKLINEKKEDGKVFWQNLAGYKRQEALRPYLSSEEDRKKGKKFARYQLGDLLLHLEKKHPEDWGKVYDEAWERIDKKVEGLSKHIKLEEERRSEDAQSKAALTDWLRAKASFVIEGLKEADKDEFCRCELKLQKWYGDLRGKPFAIEAENSILDISGFSKQYNCAFIWQKDGVKKLNLYLIINYFKGGKLRFKKIKPEAFEANRFYTVINKKSGEIVPMEVNFNFDDPNLIILPLAFGKRQGREFIWNDLLSLETGSLKLANGRVIEKTLYNRRTRQDEPALFVALTFERREVLDSSNIKPMNLIGVDRGENIPAVIALTDPEGCPLSRFKDSLGNPTHILRIGESYKEKQRTIQAKKEVEQRRAGGYSRKYASKAKNLADDMVRNTARDLLYYAVTQDAMLIFENLSRGFGRQGKRTFMAERQYTRMEDWLTAKLAYEGLPSKTYLSKTLAQYTSKTCSNCGFTITSADYDRVLEKLKKTATGWMTTINGKELKVEGQITYYNRYKRQNVVKDLSVELDRLSEESVNNDISSWTKGRSGEALSLLKKRFSHRPVQEKFVCLNCGFETHADEQAALNIARSWLFLRSQEYKKYQTNKTTGNTDKRAFVETWQSFYRKKLKEVWKPAV

SEQ ID NO: 43774 - protein, 978 aa, synthetic construct
  REGION 1..978: note = engineered CasX variant
QEIKRINKIRRRLVKDSNTKKAGKTGPMKTLLVRVMTPDLRERLENLRKKPENIPQPISNTSRANLNKLLTDYTEMKKAILHVYWEEFQKDPVGLMSRVAQPASKKIDQNKLKPEMDEKGNLTTAGFACSQCGQPLFVYKLEQVSEKGKAYTNYFGRCNVAEHEKLIKLAQLKPEKDSDEAVTYSLGKFGQRALDFYSIHVTKESTHPVKPLAQIAGNRYASGPVGKALSDACMGTIASFLSKYQDIIIEHQKVVKGNQKRLESLRELAGKENLEYPSVTLPPQPHTKEGVDAYNEVIARVRTWVNLNLWQKLKLSRDDAKPLLRLKGFPSFPLVERQANEVDWWDMVCNVKKLINEKKEDGKVFWQNLAGYKRQEALRPYLSSEEDRKKGKKFARYQLGDLLLHLEKKHPEDWGKVYDEAWERIDKKVEGLSKHIKLEEERRSEDAQSKAALTDWLRAKASFVIEGLKEADKDEFCRCELKLQKWYGDLRGKPFAIEAENSILDISGFSKQYNCAFIWQKDGVKKLNLYLIINYFKGGKLRFKKIKPEAFEANRFYTVINKKSGEIVPMEVNFNFDDPNLIILPLAFGKRQGREFIWNDLLSLETGSLKLANGRVIEKTLYNRRTRQDEPALFVALTFERREVLDSSNIKPMNLIGVDRGENIPAVIALTDPEGCPLSRFKDSLGNPTHILRIGESYKEKQRTIQAKKEVEQRRAGGYSRKYASKAKNLADDMVRNTARDLLYYAVTQDAMLIFENLSRGFGRQGKRTFMAERQYTRMEDWLTAKLAYEGLPSKTYLSKTLAQYTSKTCSNCGFTITSADYDRVLEKLKKTATGWMTTINGKELKVEGQITYYNRYKRQNVVKDLSVELDRLSEESVNNDISSWTKGRSGEALSLLKKRFSHRPVQEKFVCLNCGFETHADEQAALNIARSWLFLRSQEYKKYQTNKTTGNTDKRAFVETWQSFYRKKLKEVWKPAV

SEQ ID NO: 43775 - protein, 977 aa, synthetic construct
  REGION 1..977: note = engineered CasX variant
QEIKRINKIRRRLVKDSNTKKAGKTGPMKTLLVRVMTPDLRERLENLRKKPENIPQPISNTSRANLNKLLTDYTEMKKAILHVYWEEFQKDPVGLMSRVAQPASKKIDQNKLKPEMDEKGNLTTAGFACSQCGQPLFVYKLEQVSEKGKAYTNYFGRCNVAEHEKLILLAQLKPEKDSDEAVTYSLGKFGQRALDFYSIHVTKESTHPVKPLAQIAGNRYASPVGKALSDACMGTIASFLSKYQDIIIEHQKVVKGNQKRLESLRELAGKENLEYPSVTLPPQPHTKEGVDAYNEVIARVRTWVNLNLWQKLKLSRDDAKPLLRLKGFPSFPLVERQANEVDWWDMVCNVKKLINEKKEDGKVFWQNLAGYKRQEALRPYLSSEEDRKKGKKFARYQLGDLLLHLEKKHPEDWGKVYDEAWERIDKKVEGLSKHIKLEEERRSEDAQSKAALTDWLRAKASFVIEGLKEADKDEFCRCELKLQKWYGDLRGKPFAIEAENSILDISGFSKQYNCAFIWQKDGVKKLNLYLIINYFKGGKLRFKKIKPEAFEANRFYTVINKKSGEIVPMEVNFNFDDPNLIILPLAFGKRQGREFIWNDLLSLETGSLKLANGRVIEKTLYNRRTRQDEPALFVALTFERREVLDSSNIKPMNLIGVDRGENIPAVIALTDPEGCPLSRFKDSLGNPTHILRIGESYKEKQRTIQAKKEVEQRRAGGYSRKYASKAKNLADDMVRNTARDLLYYAVTQDAMLIFENLSRGFGRQGKRTFMAERQYTRMEDWLTAKLAYEGLPSKTYLSKTLAQYTSKTCSNCGFTITSADYDRVLEKLKKTATGWMTTINGKELKVEGQITYYNRYKRQNVVKDLSVELDRLSEESVNNDISSWTKGRSGEALSLLKKRFSHRPVQEKFVCLNCGFETHADEQAALNIARSWLFLRSQEYKKYQTNKTTGNTDKRAFVETWQSFYRKKLKEVWKPAV

SEQ ID NO: 43776 - protein, 979 aa, synthetic construct
  REGION 1..979: note = engineered CasX variant
QEIKRINKIRRRLVKDSNTKKAGKTGPMKTLLVRVMTPDLRERLENLRKKPENIPQPISNTSRANLNKLLTDYTEMKKAILHVYWEEFQKDPVGLMSRVAQPASKKIDQNKLKPEMDEKGNLTTAGFACSQCGQPLFVYKLEQVSEKGKAYTNYFGRCNVAEHEKLILLAQLKPEKDSDEAVTYSLGKFGQRALDFYSIHVTKESTHPVKPLAQIAGNRYASYPVGKALSDACMGTIASFLSKYQDIIIEHQKVVKGNQKRLESLRELAGKENLEYPSVTLPPQPHTKEGVDAYNEVIARVRTWVNLNLWQKLKLSRDDAKPLLRLKGFPSFPLVERQANEVDWWDMVCNVKKLINEKKEDGKVFWQNLAGYKRQEALRPYLSSEEDRKKGKKFARYQLGDLLLHLEKKHGERDWGKVYDEAWERIDKKVEGLSKHIKLEEERRSEDAQSKAALTDWLRAKASFVIEGLKEADKDEFCRCELKLQKWYGDLRGKPFAIEAENSILDISGFSKQYNCAFIWQKDGVKKLNLYLIINYFKGGKLRFKKIKPEAFEANRFYTVINKKSGEIVPMEVNFNFDDPNLIILPLAFGKRQGREFIWNDLLSLETGSLKLANGRVIEKTLYNRRTRQDEPALFVALTFERREVLDSSNIKPMNLIGVDRGENIPAVIALTDPEGCPLSRFKDSLGNPTHILRIGESYKEKQRTIQAKKEVEQRRAGGYSRKYASKAKNLADDMVRNTARDLLYYAVTQDAMLIFENLSRGFGRQGKRTFMAERQYTRMEDWLTAKLAYEGLPSKTYLSKTLAQYTSKTCSNCGFTITSADYDRVLEKLKKTATGWMTTINGKELKVEGQITYYNRYKRQNVVKDLSVELDRLSEESVNNDISSWTKGRSGEALSLLKKRFSHRPVQEKFVCLNCGFETHADEQAALNIARSWLFLRSQEYKKYQTNKTTGNTDKRAFVETWQSFYRKKLKEVWKPAV

SEQ ID NO: 43777 - protein, 979 aa, synthetic construct
  REGION 1..979: note = engineered CasX variant
QEIKRINKIRRRLVKDSNTKKAGKTGPMKTLLVRVMTPDLRERLENLRKKPENIPQPISNTSRANLNKLLTDYTEMKKAILHVYWEEFQKDPVGLMSRVAQPASKKIDQNKLKPEMDEKGNLTTAGFACSQCGQPLFVYKLEQVSEKGKAYTNYFGRCNVAEHEKLILLAQLKPEKDSDEAVTYSLGKFGQRALDFYSIHVTKESTHPVKPLAQIAGNRYASHPVGKALSDACMGTIASFLSKYQDIIIEHQKVVKGNQKRLESLRELAGKENLEYPSVTLPPQPHTKEGVDAYNEVIARVRTWVNLNLWQKLKLSRDDAKPLLRLKGFPSFPLVERQANEVDWWDMVCNVKKLINEKKEDGKVFWQNLAGYKRQEALRPYLSSEEDRKKGKKFARYQLGDLLLHLEKKHGERDWGKVYDEAWERIDKKVEGLSKHIKLEEERRSEDAQSKAALTDWLRAKASFVIEGLKEADKDEFCRCELKLQKWYGDLRGKPFAIEAENSILDISGFSKQYNCAFIWQKDGVKKLNLYLIINYFKGGKLRFKKIKPEAFEANRFYTVINKKSGEIVPMEVNFNFDDPNLIILPLAFGKRQGREFIWNDLLSLETGSLKLANGRVIEKTLYNRRTRQDEPALFVALTFERREVLDSSNIKPMNLIGVDRGENIPAVIALTDPEGCPLSRFKDSLGNPTHILRIGESYKEKQRTIQAKKEVEQRRAGGYSRKYASKAKNLADDMVRNTARDLLYYAVTQDAMLIFENLSRGFGRQGKRTFMAERQYTRMEDWLTAKLAYEGLPSKTYLSKTLAQYTSKTCSNCGFTITSADYDRVLEKLKKTATGWMTTINGKELKVEGQITYYNRYKRQNVVKDLSVELDRLSEESVNNDISSWTKGRSGEALSLLKKRFSHRPVQEKFVCLNCGFETHADEQAALNIARSWLFLRSQEYKKYQTNKTTGNTDKRAFVETWQSFYRKKLKEVWKPAV

SEQ ID NO: 43778 - protein, 979 aa, synthetic construct
  REGION 1..979: note = engineered CasX variant
QEIKRINKIRRRLVKDSNTKKAGKTGPMKTLLVRVMTPDLRERLENLRKKPENIPQPISNTSRANLNKLLTDYTEMKKAILHVYWEEFQKDPVGLMSRVAQPASKKIDQNKLKPEMDEKGNLTTAGFACSQCGQPLFVYKLEQVSEKGKAYTNYFGRCNVAEHEKLILLAQLKPEKDSDEAVTYSLGKFGQRALDFYSIHVTKESTHPVKPLAQIAGNRYASSPVGKALSDACMGTIASFLSKYQDIIIEHQKVVKGNQKRLESLRELAGKENLEYPSVTLPPQPHTKEGVDAYNEVIARVRTWVNLNLWQKLKLSRDDAKPLLRLKGFPSFPLVERQANEVDWWDMVCNVKKLINEKKEDGKVFWQNLAGYKRQEALRPYLSSEEDRKKGKKFARYQLGDLLLHLEKKHGERDWGKVYDEAWERIDKKVEGLSKHIKLEEERRSEDAQSKAALTDWLRAKASFVIEGLKEADKDEFCRCELKLQKWYGDLRGKPFAIEAENSILDISGFSKQYNCAFIWQKDGVKKLNLYLIINYFKGGKLRFKKIKPEAFEANRFYTVINKKSGEIVPMEVNFNFDDPNLIILPLAFGKRQGREFIWNDLLSLETGSLKLANGRVIEKTLYNRRTRQDEPALFVALTFERREVLDSSNIKPMNLIGVDRGENIPAVIALTDPEGCPLSRFKDSLGNPTHILRIGESYKEKQRTIQAKKEVEQRRAGGYSRKYASKAKNLADDMVRNTARDLLYYAVTQDAMLIFENLSRGFGRQGKRTFMAERQYTRMEDWLTAKLAYEGLPSKTYLSKTLAQYTSKTCSNCGFTITSADYDRVLEKLKKTATGWMTTINGKELKVEGQITYYNRYKRQNVVKDLSVELDRLSEESVNNDISSWTKGRSGEALSLLKKRFSHRPVQEKFVCLNCGFETHADEQAALNIARSWLFLRSQEYKKYQTNKTTGNTDKRAFVETWQSFYRKKLKEVWKPAV

SEQ ID NO: 43779 - protein, 979 aa, synthetic construct
  REGION 1..979: note = engineered CasX variant
QEIKRINKIRRRLVKDSNTKKAGKTGPMKTLLVRVMTPDLRERLENLRKKPENIPQPISNTSRANLNKLLTDYTEMKKAILHVYWEEFQKDPVGLMSRVAQPASKKIDQNKLKPEMDEKGNLTTAGFACSQCGQPLFVYKLEQVSEKGKAYTNYFGRCNVAEHEKLILLAQLKPEKDSDEAVTYSLGKFGQRALDFYSIHVTKESTHPVKPLAQIAGNRYASTPVGKALSDACMGTIASFLSKYQDIIIEHQKVVKGNQKRLESLRELAGKENLEYPSVTLPPQPHTKEGVDAYNEVIARVRTWVNLNLWQKLKLSRDDAKPLLRLKGFPSFPLVERQANEVDWWDMVCNVKKLINEKKEDGKVFWQNLAGYKRQEALRPYLSSEEDRKKGKKFARYQLGDLLLHLEKKHGERDWGKVYDEAWERIDKKVEGLSKHIKLEEERRSEDAQSKAALTDWLRAKASFVIEGLKEADKDEFCRCELKLQKWYGDLRGKPFAIEAENSILDISGFSKQYNCAFIWQKDGVKKLNLYLIINYFKGGKLRFKKIKPEAFEANRFYTVINKKSGEIVPMEVNFNFDDPNLIILPLAFGKRQGREFIWNDLLSLETGSLKLANGRVIEKTLYNRRTRQDEPALFVALTFERREVLDSSNIKPMNLIGVDRGENIPAVIALTDPEGCPLSRFKDSLGNPTHILRIGESYKEKQRTIQAKKEVEQRRAGGYSRKYASKAKNLADDMVRNTARDLLYYAVTQDAMLIFENLSRGFGRQGKRTFMAERQYTRMEDWLTAKLAYEGLPSKTYLSKTLAQYTSKTCSNCGFTITSADYDRVLEKLKKTATGWMTTINGKELKVEGQITYYNRYKRQNVVKDLSVELDRLSEESVNNDISSWTKGRSGEALSLLKKRFSHRPVQEKFVCLNCGFETHADEQAALNIARSWLFLRSQEYKKYQTNKTTGNTDKRAFVETWQSFYRKKLKEVWKPAV

SEQ ID NO: 43780 - protein, 979 aa, synthetic construct
  REGION 1..979: note = engineered CasX variant
QEIKRINKIRRRLVKDSNTKKAGKTGPMKTLLVRVMTPDLRERLENLRKKPENIPQPISNTSRANLNKLLTDYTEMKKAILHVYWEEFQKDPVGLMSRVAQPASKKIDQNKLKPEMDEKGNLTTAGFACSQCGQPLFVYKLEQVSEKGKAYTNYFGRCNVAEHEKLILLAQLKPEKDSDEAVTYSLGKFGQRALDFYSIHVTKESTHPVKPLAQIAGNRYASAPVGKALSDACMGTIASFLSKYQDIIIEHQKVVKGNQKRLESLRELAGKENLEYPSVTLPPQPHTKEGVDAYNEVIARVRTWVNLNLWQKLKLSRDDAKPLLRLKGFPSFPLVERQANEVDWWDMVCNVKKLINEKKEDGKVFWQNLAGYKRQEALRPYLSSEEDRKKGKKFARYQLGDLLLHLEKKHGERDWGKVYDEAWERIDKKVEGLSKHIKLEEERRSEDAQSKAALTDWLRAKASFVIEGLKEADKDEFCRCELKLQKWYGDLRGKPFAIEAENSILDISGFSKQYNCAFIWQKDGVKKLNLYLIINYFKGGKLRFKKIKPEAFEANRFYTVINKKSGEIVPMEVNFNFDDPNLIILPLAFGKRQGREFIWNDLLSLETGSLKLANGRVIEKTLYNRRTRQDEPALFVALTFERREVLDSSNIKPMNLIGVDRGENIPAVIALTDPEGCPLSRFKDSLGNPTHILRIGESYKEKQRTIQAKKEVEQRRAGGYSRKYASKAKNLADDMVRNTARDLLYYAVTQDAMLIFENLSRGFGRQGKRTFMAERQYTRMEDWLTAKLAYEGLPSKTYLSKTLAQYTSKTCSNCGFTITSADYDRVLEKLKKTATGWMTTINGKELKVEGQITYYNRYKRQNVVKDLSVELDRLSEESVNNDISSWTKGRSGEALSLLKKRFSHRPVQEKFVCLNCGFETHADEQAALNIARSWLFLRSQEYKKYQTNKTTGNTDKRAFVETWQSFYRKKLKEVWKPAV

SEQ ID NO: 43781 - protein, 979 aa, synthetic construct
  REGION 1..979: note = engineered CasX variant
QEIKRINKIRRRLVKDSNTKKAGKTGPMKTLLVRVMTPDLRERLENLRKKPENIPQPISNTSRANLNKLLTDYTEMKKAILHVYWEEFQKDPVGLMSRVAQPASKKIDQNKLKPEMDEKGNLTTAGFACSQCGQPLFVYKLEQVSEKGKAYTNYFGRCNVAEHEKLILLAQLKPEKDSDEAVTYSLGKFGQRALDFYSIHVTKESTHPVKPLAQIAGNRYASVPVGKALSDACMGTIASFLSKYQDIIIEHQKVVKGNQKRLESLRELAGKENLEYPSVTLPPQPHTKEGVDAYNEVIARVRTWVNLNLWQKLKLSRDDAKPLLRLKGFPSFPLVERQANEVDWWDMVCNVKKLINEKKEDGKVFWQNLAGYKRQEALRPYLSSEEDRKKGKKFARYQLGDLLLHLEKKHGERDWGKVYDEAWERIDKKVEGLSKHIKLEEERRSEDAQSKAALTDWLRAKASFVIEGLKEADKDEFCRCELKLQKWYGDLRGKPFAIEAENSILDISGFSKQYNCAFIWQKDGVKKLNLYLIINYFKGGKLRFKKIKPEAFEANRFYTVINKKSGEIVPMEVNFNFDDPNLIILPLAFGKRQGREFIWNDLLSLETGSLKLANGRVIEKTLYNRRTRQDEPALFVALTFERREVLDSSNIKPMNLIGVDRGENIPAVIALTDPEGCPLSRFKDSLGNPTHILRIGESYKEKQRTIQAKKEVEQRRAGGYSRKYASKAKNLADDMVRNTARDLLYYAVTQDAMLIFENLSRGFGRQGKRTFMAERQYTRMEDWLTAKLAYEGLPSKTYLSKTLAQYTSKTCSNCGFTITSADYDRVLEKLKKTATGWMTTINGKELKVEGQITYYNRYKRQNVVKDLSVELDRLSEESVNNDISSWTKGRSGEALSLLKKRFSHRPVQEKFVCLNCGFETHADEQAALNIARSWLFLRSQEYKKYQTNKTTGNTDKRAFVETWQSFYRKKLKEVWKPAV

SEQ ID NO: 43782 - protein, 979 aa, synthetic construct
  REGION 1..979: note = engineered CasX variant
QEIKRINKIRRRLVKDSNTKKAGKTGPMKTLLVRVMTPDLRERLENLRKKPENIPQPISNTSRANLNKLLTDYTEMKKAILHVYWEEFQKDPVGLMSRVAQPASKKIDQNKLKPEMDEKGNLTTAGFACSQCGQPLFVYKLEQVSEKGKAYTNYFGRCNVAEHEKLIKLAQLKPEKDSDEAVTYSLGKFGQRALDFYSIHVTKESTHPVKPLAQIAGNRYASGPVGKALSDACMGTIASFLSKYQDIIIEHQKVVKGNQKRLESLRELAGKENLEYPSVTLPPQPHTKEGVDAYNEVIARVRTWVNLNLWQKLKLSRDDAKPLLRLKGFPSFPLVERQANEVDWWDMVCNVKKLINEKKEDGKVFWQNLAGYKRQEALRPYLSSEEDRKKGKKFARYQLGDLLLHLEKKHGERDWGKVYDEAWERIDKKVEGLSKHIKLEEERRSEDAQSKAALTDWLRAKASFVIEGLKEADKDEFCRCELKLQKWYGDLRGKPFAIEAENSILDISGFSKQYNCAFIWQKDGVKKLNLYLIINYFKGGKLRFKKIKPEAFEANRFYTVINKKSGEIVPMEVNFNFDDPNLIILPLAFGKRQGREFIWNDLLSLETGSLKLANGRVIEKTLYNRRTRQDEPALFVALTFERREVLDSSNIKPMNLIGVDRGENIPAVIALTDPEGCPLSRFKDSLGNPTHILRIGESYKEKQRTIQAKKEVEQRRAGGYSRKYASKAKNLADDMVRNTARDLLYYAVTQDAMLIFENLSRGFGRQGKRTFMAERQYTRMEDWLTAKLAYEGLPSKTYLSKTLAQYTSKTCSNCGFTITSADYDRVLEKLKKTATGWMTTINGKELKVEGQITYYNRYKRQNVVKDLSVELDRLSEESVNNDISSWTKGRSGEALSLLKKRFSHRPVQEKFVCLNCGFETHADEQAALNIARSWLFLRSQEYKKYQTNKTTGNTDKRAFVETWQSFYRKKLKEVWKPAV

SEQ ID NO: 43783 - protein, 978 aa, synthetic construct
  REGION 1..978: note = engineered CasX variant
QEIKRINKIRRRLVKDSNTKKAGKTGPMKTLLVRVMTPDLRERLENLRKKPENIPQPISNTSRANLNKLLTDYTEMKKAILHVYWEEFQKDPVGLMSRVAQPASKKIDQNKLKPEMDEKGNLTTAGFACSQCGQPLFVYKLEQVSEKGKAYTNYFGRCNVAEHEKLILLAQLKPEKDSDEAVTYSLGKFGQRALDFYSIHVTKESTHPVKPLAQIAGNRYASPVGKALSDACMGTIASFLSKYQDIIIEHQKVVKGNQKRLESLRELAGKENLEYPSVTLPPQPHTKEGVDAYNEVIARVRTWVNLNLWQKLKLSRDDAKPLLRLKGFPSFPLVERQANEVDWWDMVCNVKKLINEKKEDGKVFWQNLAGYKRQEALRPYLSSEEDRKKGKKFARYQLGDLLLHLEKKHGERDWGKVYDEAWERIDKKVEGLSKHIKLEEERRSEDAQSKAALTDWLRAKASFVIEGLKEADKDEFCRCELKLQKWYGDLRGKPFAIEAENSILDISGFSKQYNCAFIWQKDGVKKLNLYLIINYFKGGKLRFKKIKPEAFEANRFYTVINKKSGEIVPMEVNFNFDDPNLIILPLAFGKRQGREFIWNDLLSLETGSLKLANGRVIEKTLYNRRTRQDEPALFVALTFERREVLDSSNIKPMNLIGVDRGENIPAVIALTDPEGCPLSRFKDSLGNPTHILRIGESYKEKQRTIQAKKEVEQRRAGGYSRKYASKAKNLADDMVRNTARDLLYYAVTQDAMLIFENLSRGFGRQGKRTFMAERQYTRMEDWLTAKLAYEGLPSKTYLSKTLAQYTSKTCSNCGFTITSADYDRVLEKLKKTATGWMTTINGKELKVEGQITYYNRYKRQNVVKDLSVELDRLSEESVNNDISSWTKGRSGEALSLLKKRFSHRPVQEKFVCLNCGFETHADEQAALNIARSWLFLRSQEYKKYQTNKTTGNTDKRAFVETWQSFYRKKLKEVWKPAV

SEQ ID NO: 43784 - protein, 979 aa, synthetic construct
  REGION 1..979: note = engineered CasX variant
QEIKRINKIRRRLVKDSNTKKAGKTGPMKTLLVRVMTPDLRERLENLRKKPENIPQPISNTSRANLNKLLTDYTEMKKAILHVYWEEFQKDPVGLMSRVAQPASKKIDQNKLKPEMDEKGNLTTAGFACSQCGQPLFVYKLEQVSEKGKAYTNYFGRCNVAEHEKLILLAQLKPEKDSDEAVTYSLGKFGQRALDFYSIHVTKESTHPVKPLAQIAGNRYASYPVGKALSDACMGTIASFLSKYQDIIIEHQKVVKGNQKRLESLRELAGKENLEYPSVTLPPQPHTKEGVDAYNEVIARVRTWVNLNLWQKLKLSRDDAKPLLRLKGFPSFPLVERQANEVDWWDMVCNVKKLINEKKEDGKVFWQNLAGYKRQEALRPYLSSEEDRKKGKKFARYQLGDLLLHLEKKHGEYDWGKVYDEAWERIDKKVEGLSKHIKLEEERRSEDAQSKAALTDWLRAKASFVIEGLKEADKDEFCRCELKLQKWYGDLRGKPFAIEAENSILDISGFSKQYNCAFIWQKDGVKKLNLYLIINYFKGGKLRFKKIKPEAFEANRFYTVINKKSGEIVPMEVNFNFDDPNLIILPLAFGKRQGREFIWNDLLSLETGSLKLANGRVIEKTLYNRRTRQDEPALFVALTFERREVLDSSNIKPMNLIGVDRGENIPAVIALTDPEGCPLSRFKDSLGNPTHILRIGESYKEKQRTIQAKKEVEQRRAGGYSRKYASKAKNLADDMVRNTARDLLYYAVTQDAMLIFENLSRGFGRQGKRTFMAERQYTRMEDWLTAKLAYEGLPSKTYLSKTLAQYTSKTCSNCGFTITSADYDRVLEKLKKTATGWMTTINGKELKVEGQITYYNRYKRQNVVKDLSVELDRLSEESVNNDISSWTKGRSGEALSLLKKRFSHRPVQEKFVCLNCGFETHADEQAALNIARSWLFLRSQEYKKYQTNKTTGNTDKRAFVETWQSFYRKKLKEVWKPAV

SEQ ID NO: 43785 - protein, 979 aa, synthetic construct
  REGION 1..979: note = engineered CasX variant
QEIKRINKIRRRLVKDSNTKKAGKTGPMKTLLVRVMTPDLRERLENLRKKPENIPQPISNTSRANLNKLLTDYTEMKKAILHVYWEEFQKDPVGLMSRVAQPASKKIDQNKLKPEMDEKGNLTTAGFACSQCGQPLFVYKLEQVSEKGKAYTNYFGRCNVAEHEKLILLAQLKPEKDSDEAVTYSLGKFGQRALDFYSIHVTKESTHPVKPLAQIAGNRYASHPVGKALSDACMGTIASFLSKYQDIIIEHQKVVKGNQKRLESLRELAGKENLEYPSVTLPPQPHTKEGVDAYNEVIARVRTWVNLNLWQKLKLSRDDAKPLLRLKGFPSFPLVERQANEVDWWDMVCNVKKLINEKKEDGKVFWQNLAGYKRQEALRPYLSSEEDRKKGKKFARYQLGDLLLHLEKKHGEYDWGKVYDEAWERIDKKVEGLSKHIKLEEERRSEDAQSKAALTDWLRAKASFVIEGLKEADKDEFCRCELKLQKWYGDLRGKPFAIEAENSILDISGFSKQYNCAFIWQKDGVKKLNLYLIINYFKGGKLRFKKIKPEAFEANRFYTVINKKSGEIVPMEVNFNFDDPNLIILPLAFGKRQGREFIWNDLLSLETGSLKLANGRVIEKTLYNRRTRQDEPALFVALTFERREVLDSSNIKPMNLIGVDRGENIPAVIALTDPEGCPLSRFKDSLGNPTHILRIGESYKEKQRTIQAKKEVEQRRAGGYSRKYASKAKNLADDMVRNTARDLLYYAVTQDAMLIFENLSRGFGRQGKRTFMAERQYTRMEDWLTAKLAYEGLPSKTYLSKTLAQYTSKTCSNCGFTITSADYDRVLEKLKKTATGWMTTINGKELKVEGQITYYNRYKRQNVVKDLSVELDRLSEESVNNDISSWTKGRSGEALSLLKKRFSHRPVQEKFVCLNCGFETHADEQAALNIARSWLFLRSQEYKKYQTNKTTGNTDKRAFVETWQSFYRKKLKEVWKPAV

SEQ ID NO: 43786 - protein, 979 aa, synthetic construct
  REGION 1..979: note = engineered CasX variant
QEIKRINKIRRRLVKDSNTKKAGKTGPMKTLLVRVMTPDLRERLENLRKKPENIPQPISNTSRANLNKLLTDYTEMKKAILHVYWEEFQKDPVGLMSRVAQPASKKIDQNKLKPEMDEKGNLTTAGFACSQCGQPLFVYKLEQVSEKGKAYTNYFGRCNVAEHEKLILLAQLKPEKDSDEAVTYSLGKFGQRALDFYSIHVTKESTHPVKPLAQIAGNRYASSPVGKALSDACMGTIASFLSKYQDIIIEHQKVVKGNQKRLESLRELAGKENLEYPSVTLPPQPHTKEGVDAYNEVIARVRTWVNLNLWQKLKLSRDDAKPLLRLKGFPSFPLVERQANEVDWWDMVCNVKKLINEKKEDGKVFWQNLAGYKRQEALRPYLSSEEDRKKGKKFARYQLGDLLLHLEKKHGEYDWGKVYDEAWERIDKKVEGLSKHIKLEEERRSEDAQSKAALTDWLRAKASFVIEGLKEADKDEFCRCELKLQKWYGDLRGKPFAIEAENSILDISGFSKQYNCAFIWQKDGVKKLNLYLIINYFKGGKLRFKKIKPEAFEANRFYTVINKKSGEIVPMEVNFNFDDPNLIILPLAFGKRQGREFIWNDLLSLETGSLKLANGRVIEKTLYNRRTRQDEPALFVALTFERREVLDSSNIKPMNLIGVDRGENIPAVIALTDPEGCPLSRFKDSLGNPTHILRIGESYKEKQRTIQAKKEVEQRRAGGYSRKYASKAKNLADDMVRNTARDLLYYAVTQDAMLIFENLSRGFGRQGKRTFMAERQYTRMEDWLTAKLAYEGLPSKTYLSKTLAQYTSKTCSNCGFTITSADYDRVLEKLKKTATGWMTTINGKELKVEGQITYYNRYKRQNVVKDLSVELDRLSEESVNNDISSWTKGRSGEALSLLKKRFSHRPVQEKFVCLNCGFETHADEQAALNIARSWLFLRSQEYKKYQTNKTTGNTDKRAFVETWQSFYRKKLKEVWKPAV

SEQ ID NO: 43787 - protein, 979 aa, synthetic construct
  REGION 1..979: note = engineered CasX variant
QEIKRINKIRRRLVKDSNTKKAGKTGPMKTLLVRVMTPDLRERLENLRKKPENIPQPISNTSRANLNKLLTDYTEMKKAILHVYWEEFQKDPVGLMSRVAQPASKKIDQNKLKPEMDEKGNLTTAGFACSQCGQPLFVYKLEQVSEKGKAYTNYFGRCNVAEHEKLILLAQLKPEKDSDEAVTYSLGKFGQRALDFYSIHVTKESTHPVKPLAQIAGNRYASTPVGKALSDACMGTIASFLSKYQDIIIEHQKVVKGNQKRLESLRELAGKENLEYPSVTLPPQPHTKEGVDAYNEVIARVRTWVNLNLWQKLKLSRDDAKPLLRLKGFPSFPLVERQANEVDWWDMVCNVKKLINEKKEDGKVFWQNLAGYKRQEALRPYLSSEEDRKKGKKFARYQLGDLLLHLEKKHGEYDWGKVYDEAWERIDKKVEGLSKHIKLEEERRSEDAQSKAALTDWLRAKASFVIEGLKEADKDEFCRCELKLQKWYGDLRGKPFAIEAENSILDISGFSKQYNCAFIWQKDGVKKLNLYLIINYFKGGKLRFKKIKPEAFEANRFYTVINKKSGEIVPMEVNFNFDDPNLIILPLAFGKRQGREFIWNDLLSLETGSLKLANGRVIEKTLYNRRTRQDEPALFVALTFERREVLDSSNIKPMNLIGVDRGENIPAVIALTDPEGCPLSRFKDSLGNPTHILRIGESYKEKQRTIQAKKEVEQRRAGGYSRKYASKAKNLADDMVRNTARDLLYYAVTQDAMLIFENLSRGFGRQGKRTFMAERQYTRMEDWLTAKLAYEGLPSKTYLSKTLAQYTSKTCSNCGFTITSADYDRVLEKLKKTATGWMTTINGKELKVEGQITYYNRYKRQNVVKDLSVELDRLSEESVNNDISSWTKGRSGEALSLLKKRFSHRPVQEKFVCLNCGFETHADEQAALNIARSWLFLRSQEYKKYQTNKTTGNTDKRAFVETWQSFYRKKLKEVWKPAV

SEQ ID NO: 43788 - protein, 979 aa, synthetic construct
  REGION 1..979: note = engineered CasX variant
QEIKRINKIRRRLVKDSNTKKAGKTGPMKTLLVRVMTPDLRERLENLRKKPENIPQPISNTSRANLNKLLTDYTEMKKAILHVYWEEFQKDPVGLMSRVAQPASKKIDQNKLKPEMDEKGNLTTAGFACSQCGQPLFVYKLEQVSEKGKAYTNYFGRCNVAEHEKLILLAQLKPEKDSDEAVTYSLGKFGQRALDFYSIHVTKESTHPVKPLAQIAGNRYASAPVGKALSDACMGTIASFLSKYQDIIIEHQKVVKGNQKRLESLRELAGKENLEYPSVTLPPQPHTKEGVDAYNEVIARVRTWVNLNLWQKLKLSRDDAKPLLRLKGFPSFPLVERQANEVDWWDMVCNVKKLINEKKEDGKVFWQNLAGYKRQEALRPYLSSEEDRKKGKKFARYQLGDLLLHLEKKHGEYDWGKVYDEAWERIDKKVEGLSKHIKLEEERRSEDAQSKAALTDWLRAKASFVIEGLKEADKDEFCRCELKLQKWYGDLRGKPFAIEAENSILDISGFSKQYNCAFIWQKDGVKKLNLYLIINYFKGGKLRFKKIKPEAFEANRFYTVINKKSGEIVPMEVNFNFDDPNLIILPLAFGKRQGREFIWNDLLSLETGSLKLANGRVIEKTLYNRRTRQDEPALFVALTFERREVLDSSNIKPMNLIGVDRGENIPAVIALTDPEGCPLSRFKDSLGNPTHILRIGESYKEKQRTIQAKKEVEQRRAGGYSRKYASKAKNLADDMVRNTARDLLYYAVTQDAMLIFENLSRGFGRQGKRTFMAERQYTRMEDWLTAKLAYEGLPSKTYLSKTLAQYTSKTCSNCGFTITSADYDRVLEKLKKTATGWMTTINGKELKVEGQITYYNRYKRQNVVKDLSVELDRLSEESVNNDISSWTKGRSGEALSLLKKRFSHRPVQEKFVCLNCGFETHADEQAALNIARSWLFLRSQEYKKYQTNKTTGNTDKRAFVETWQSFYRKKLKEVWKPAV

SEQ ID NO: 43789 - protein, 979 aa, synthetic construct
  REGION 1..979: note = engineered CasX variant
QEIKRINKIRRRLVKDSNTKKAGKTGPMKTLLVRVMTPDLRERLENLRKKPENIPQPISNTSRANLNKLLTDYTEMKKAILHVYWEEFQKDPVGLMSRVAQPASKKIDQNKLKPEMDEKGNLTTAGFACSQCGQPLFVYKLEQVSEKGKAYTNYFGRCNVAEHEKLILLAQLKPEKDSDEAVTYSLGKFGQRALDFYSIHVTKESTHPVKPLAQIAGNRYASVPVGKALSDACMGTIASFLSKYQDIIIEHQKVVKGNQKRLESLRELAGKENLEYPSVTLPPQPHTKEGVDAYNEVIARVRTWVNLNLWQKLKLSRDDAKPLLRLKGFPSFPLVERQANEVDWWDMVCNVKKLINEKKEDGKVFWQNLAGYKRQEALRPYLSSEEDRKKGKKFARYQLGDLLLHLEKKHGEYDWGKVYDEAWERIDKKVEGLSKHIKLEEERRSEDAQSKAALTDWLRAKASFVIEGLKEADKDEFCRCELKLQKWYGDLRGKPFAIEAENSILDISGFSKQYNCAFIWQKDGVKKLNLYLIINYFKGGKLRFKKIKPEAFEANRFYTVINKKSGEIVPMEVNFNFDDPNLIILPLAFGKRQGREFIWNDLLSLETGSLKLANGRVIEKTLYNRRTRQDEPALFVALTFERREVLDSSNIKPMNLIGVDRGENIPAVIALTDPEGCPLSRFKDSLGNPTHILRIGESYKEKQRTIQAKKEVEQRRAGGYSRKYASKAKNLADDMVRNTARDLLYYAVTQDAMLIFENLSRGFGRQGKRTFMAERQYTRMEDWLTAKLAYEGLPSKTYLSKTLAQYTSKTCSNCGFTITSADYDRVLEKLKKTATGWMTTINGKELKVEGQITYYNRYKRQNVVKDLSVELDRLSEESVNNDISSWTKGRSGEALSLLKKRFSHRPVQEKFVCLNCGFETHADEQAALNIARSWLFLRSQEYKKYQTNKTTGNTDKRAFVETWQSFYRKKLKEVWKPAV

SEQ ID NO: 43790 - protein, 979 aa, synthetic construct
  REGION 1..979: note = engineered CasX variant
QEIKRINKIRRRLVKDSNTKKAGKTGPMKTLLVRVMTPDLRERLENLRKKPENIPQPISNTSRANLNKLLTDYTEMKKAILHVYWEEFQKDPVGLMSRVAQPASKKIDQNKLKPEMDEKGNLTTAGFACSQCGQPLFVYKLEQVSEKGKAYTNYFGRCNVAEHEKLIKLAQLKPEKDSDEAVTYSLGKFGQRALDFYSIHVTKESTHPVKPLAQIAGNRYASGPVGKALSDACMGTIASFLSKYQDIIIEHQKVVKGNQKRLESLRELAGKENLEYPSVTLPPQPHTKEGVDAYNEVIARVRTWVNLNLWQKLKLSRDDAKPLLRLKGFPSFPLVERQANEVDWWDMVCNVKKLINEKKEDGKVFWQNLAGYKRQEALRPYLSSEEDRKKGKKFARYQLGDLLLHLEKKHGEYDWGKVYDEAWERIDKKVEGLSKHIKLEEERRSEDAQSKAALTDWLRAKASFVIEGLKEADKDEFCRCELKLQKWYGDLRGKPFAIEAENSILDISGFSKQYNCAFIWQKDGVKKLNLYLIINYFKGGKLRFKKIKPEAFEANRFYTVINKKSGEIVPMEVNFNFDDPNLIILPLAFGKRQGREFIWNDLLSLETGSLKLANGRVIEKTLYNRRTRQDEPALFVALTFERREVLDSSNIKPMNLIGVDRGENIPAVIALTDPEGCPLSRFKDSLGNPTHILRIGESYKEKQRTIQAKKEVEQRRAGGYSRKYASKAKNLADDMVRNTARDLLYYAVTQDAMLIFENLSRGFGRQGKRTFMAERQYTRMEDWLTAKLAYEGLPSKTYLSKTLAQYTSKTCSNCGFTITSADYDRVLEKLKKTATGWMTTINGKELKVEGQITYYNRYKRQNVVKDLSVELDRLSEESVNNDISSWTKGRSGEALSLLKKRFSHRPVQEKFVCLNCGFETHADEQAALNIARSWLFLRSQEYKKYQTNKTTGNTDKRAFVETWQSFYRKKLKEVWKPAV

SEQ ID NO: 43791 - protein, 978 aa, synthetic construct
  REGION 1..978: note = engineered CasX variant
QEIKRINKIRRRLVKDSNTKKAGKTGPMKTLLVRVMTPDLRERLENLRKKPENIPQPISNTSRANLNKLLTDYTEMKKAILHVYWEEFQKDPVGLMSRVAQPASKKIDQNKLKPEMDEKGNLTTAGFACSQCGQPLFVYKLEQVSEKGKAYTNYFGRCNVAEHEKLILLAQLKPEKDSDEAVTYSLGKFGQRALDFYSIHVTKESTHPVKPLAQIAGNRYASPVGKALSDACMGTIASFLSKYQDIIIEHQKVVKGNQKRLESLRELAGKENLEYPSVTLPPQPHTKEGVDAYNEVIARVRTWVNLNLWQKLKLSRDDAKPLLRLKGFPSFPLVERQANEVDWWDMVCNVKKLINEKKEDGKVFWQNLAGYKRQEALRPYLSSEEDRKKGKKFARYQLGDLLLHLEKKHGEYDWGKVYDEAWERIDKKVEGLSKHIKLEEERRSEDAQSKAALTDWLRAKASFVIEGLKEADKDEFCRCELKLQKWYGDLRGKPFAIEAENSILDISGFSKQYNCAFIWQKDGVKKLNLYLIINYFKGGKLRFKKIKPEAFEANRFYTVINKKSGEIVPMEVNFNFDDPNLIILPLAFGKRQGREFIWNDLLSLETGSLKLANGRVIEKTLYNRRTRQDEPALFVALTFERREVLDSSNIKPMNLIGVDRGENIPAVIALTDPEGCPLSRFKDSLGNPTHILRIGESYKEKQRTIQAKKEVEQRRAGGYSRKYASKAKNLADDMVRNTARDLLYYAVTQDAMLIFENLSRGFGRQGKRTFMAERQYTRMEDWLTAKLAYEGLPSKTYLSKTLAQYTSKTCSNCGFTITSADYDRVLEKLKKTATGWMTTINGKELKVEGQITYYNRYKRQNVVKDLSVELDRLSEESVNNDISSWTKGRSGEALSLLKKRFSHRPVQEKFVCLNCGFETHADEQAALNIARSWLFLRSQEYKKYQTNKTTGNTDKRAFVETWQSFYRKKLKEVWKPAV

SEQ ID NO: 43792 - protein, 978 aa, synthetic construct
  REGION 1..978: note = engineered CasX variant
QEIKRINKIRRRLVKDSNTKKAGKTGPMKTLLVRVMTPDLRERLENLRKKPENIPQPISNTSRANLNKLLTDYTEMKKAILHVYWEEFQKDPVGLMSRVAQPASKKIDQNKLKPEMDEKGNLTTAGFACSQCGQPLFVYKLEQVSEKGKAYTNYFGRCNVAEHEKLILLAQLKPEKDSDEAVTYSLGKFGQRALDFYSIHVTKESTHPVKPLAQIAGNRYASYPVGKALSDACMGTIASFLSKYQDIIIEHQKVVKGNQKRLESLRELAGKENLEYPSVTLPPQPHTKEGVDAYNEVIARVRTWVNLNLWQKLKLSRDDAKPLLRLKGFPSFPLVERQANEVDWWDMVCNVKKLINEKKEDGKVFWQNLAGYKRQEALRPYLSSEEDRKKGKKFARYQLGDLLLHLEKKHGEDWGDVYDEAWERIDKKVEGLSKHIKLEEERRSEDAQSKAALTDWLRAKASFVIEGLKEADKDEFCRCELKLQKWYGDLRGKPFAIEAENSILDISGFSKQYNCAFIWQKDGVKKLNLYLIINYFKGGKLRFKKIKPEAFEANRFYTVINKKSGEIVPMEVNFNFDDPNLIILPLAFGKRQGREFIWNDLLSLETGSLKLANGRVIEKTLYNRRTRQDEPALFVALTFERREVLDSSNIKPMNLIGVDRGENIPAVIALTDPEGCPLSRFKDSLGNPTHILRIGESYKEKQRTIQAKKEVEQRRAGGYSRKYASKAKNLADDMVRNTARDLLYYAVTQDAMLIFENLSRGFGRQGKRTFMAERQYTRMEDWLTAKLAYEGLPSKTYLSKTLAQYTSKTCSNCGFTITSADYDRVLEKLKKTATGWMTTINGKELKVEGQITYYNRYKRQNVVKDLSVELDRLSEESVNNDISSWTKGRSGEALSLLKKRFSHRPVQEKFVCLNCGFETHADEQAALNIARSWLFLRSQEYKKYQTNKTTGNTDKRAFVETWQSFYRKKLKEVWKPAV

SEQ ID NO: 43793 - protein, 978 aa, synthetic construct
  REGION 1..978: note = engineered CasX variant
QEIKRINKIRRRLVKDSNTKKAGKTGPMKTLLVRVMTPDLRERLENLRKKPENIPQPISNTSRANLNKLLTDYTEMKKAILHVYWEEFQKDPVGLMSRVAQPASKKIDQNKLKPEMDEKGNLTTAGFACSQCGQPLFVYKLEQVSEKGKAYTNYFGRCNVAEHEKLILLAQLKPEKDSDEAVTYSLGKFGQRALDFYSIHVTKESTHPVKPLAQIAGNRYASHPVGKALSDACMGTIASFLSKYQDIIIEHQKVVKGNQKRLESLRELAGKENLEYPSVTLPPQPHTKEGVDAYNEVIARVRTWVNLNLWQKLKLSRDDAKPLLRLKGFPSFPLVERQANEVDWWDMVCNVKKLINEKKEDGKVFWQNLAGYKRQEALRPYLSSEEDRKKGKKFARYQLGDLLLHLEKKHGEDWGDVYDEAWERIDKKVEGLSKHIKLEEERRSEDAQSKAALTDWLRAKASFVIEGLKEADKDEFCRCELKLQKWYGDLRGKPFAIEAENSILDISGFSKQYNCAFIWQKDGVKKLNLYLIINYFKGGKLRFKKIKPEAFEANRFYTVINKKSGEIVPMEVNFNFDDPNLIILPLAFGKRQGREFIWNDLLSLETGSLKLANGRVIEKTLYNRRTRQDEPALFVALTFERREVLDSSNIKPMNLIGVDRGENIPAVIALTDPEGCPLSRFKDSLGNPTHILRIGESYKEKQRTIQAKKEVEQRRAGGYSRKYASKAKNLADDMVRNTARDLLYYAVTQDAMLIFENLSRGFGRQGKRTFMAERQYTRMEDWLTAKLAYEGLPSKTYLSKTLAQYTSKTCSNCGFTITSADYDRVLEKLKKTATGWMTTINGKELKVEGQITYYNRYKRQNVVKDLSVELDRLSEESVNNDISSWTKGRSGEALSLLKKRFSHRPVQEKFVCLNCGFETHADEQAALNIARSWLFLRSQEYKKYQTNKTTGNTDKRAFVETWQSFYRKKLKEVWKPAV

SEQ ID NO: 43794 - protein, 978 aa, synthetic construct
  REGION 1..978: note = engineered CasX variant
QEIKRINKIRRRLVKDSNTKKAGKTGPMKTLLVRVMTPDLRERLENLRKKPENIPQPISNTSRANLNKLLTDYTEMKKAILHVYWEEFQKDPVGLMSRVAQPASKKIDQNKLKPEMDEKGNLTTAGFACSQCGQPLFVYKLEQVSEKGKAYTNYFGRCNVAEHEKLILLAQLKPEKDSDEAVTYSLGKFGQRALDFYSIHVTKESTHPVKPLAQIAGNRYASSPVGKALSDACMGTIASFLSKYQDIIIEHQKVVKGNQKRLESLRELAGKENLEYPSVTLPPQPHTKEGVDAYNEVIARVRTWVNLNLWQKLKLSRDDAKPLLRLKGFPSFPLVERQANEVDWWDMVCNVKKLINEKKEDGKVFWQNLAGYKRQEALRPYLSSEEDRKKGKKFARYQLGDLLLHLEKKHGEDWGDVYDEAWERIDKKVEGLSKHIKLEEERRSEDAQSKAALTDWLRAKASFVIEGLKEADKDEFCRCELKLQKWYGDLRGKPFAIEAENSILDISGFSKQYNCAFIWQKDGVKKLNLYLIINYFKGGKLRFKKIKPEAFEANRFYTVINKKSGEIVPMEVNFNFDDPNLIILPLAFGKRQGREFIWNDLLSLETGSLKLANGRVIEKTLYNRRTRQDEPALFVALTFERREVLDSSNIKPMNLIGVDRGENIPAVIALTDPEGCPLSRFKDSLGNPTHILRIGESYKEKQRTIQAKKEVEQRRAGGYSRKYASKAKNLADDMVRNTARDLLYYAVTQDAMLIFENLSRGFGRQGKRTFMAERQYTRMEDWLTAKLAYEGLPSKTYLSKTLAQYTSKTCSNCGFTITSADYDRVLEKLKKTATGWMTTINGKELKVEGQITYYNRYKRQNVVKDLSVELDRLSEESVNNDISSWTKGRSGEALSLLKKRFSHRPVQEKFVCLNCGFETHADEQAALNIARSWLFLRSQEYKKYQTNKTTGNTDKRAFVETWQSFYRKKLKEVWKPAV

SEQ ID NO: 43795 - protein, 978 aa, synthetic construct
  REGION 1..978: note = engineered CasX variant
QEIKRINKIRRRLVKDSNTKKAGKTGPMKTLLVRVMTPDLRERLENLRKKPENIPQPISNTSRANLNKLLTDYTEMKKAILHVYWEEFQKDPVGLMSRVAQPASKKIDQNKLKPEMDEKGNLTTAGFACSQCGQPLFVYKLEQVSEKGKAYTNYFGRCNVAEHEKLILLAQLKPEKDSDEAVTYSLGKFGQRALDFYSIHVTKESTHPVKPLAQIAGNRYASTPVGKALSDACMGTIASFLSKYQDIIIEHQKVVKGNQKRLESLRELAGKENLEYPSVTLPPQPHTKEGVDAYNEVIARVRTWVNLNLWQKLKLSRDDAKPLLRLKGFPSFPLVERQANEVDWWDMVCNVKKLINEKKEDGKVFWQNLAGYKRQEALRPYLSSEEDRKKGKKFARYQLGDLLLHLEKKHGEDWGDVYDEAWERIDKKVEGLSKHIKLEEERRSEDAQSKAALTDWLRAKASFVIEGLKEADKDEFCRCELKLQKWYGDLRGKPFAIEAENSILDISGFSKQYNCAFIWQKDGVKKLNLYLIINYFKGGKLRFKKIKPEAFEANRFYTVINKKSGEIVPMEVNFNFDDPNLIILPLAFGKRQGREFIWNDLLSLETGSLKLANGRVIEKTLYNRRTRQDEPALFVALTFERREVLDSSNIKPMNLIGVDRGENIPAVIALTDPEGCPLSRFKDSLGNPTHILRIGESYKEKQRTIQAKKEVEQRRAGGYSRKYASKAKNLADDMVRNTARDLLYYAVTQDAMLIFENLSRGFGRQGKRTFMAERQYTRMEDWLTAKLAYEGLPSKTYLSKTLAQYTSKTCSNCGFTITSADYDRVLEKLKKTATGWMTTINGKELKVEGQITYYNRYKRQNVVKDLSVELDRLSEESVNNDISSWTKGRSGEALSLLKKRFSHRPVQEKFVCLNCGFETHADEQAALNIARSWLFLRSQEYKKYQTNKTTGNTDKRAFVETWQSFYRKKLKEVWKPAV

SEQ ID NO: 43796 - protein, 978 aa, synthetic construct
  REGION 1..978: note = engineered CasX variant
QEIKRINKIRRRLVKDSNTKKAGKTGPMKTLLVRVMTPDLRERLENLRKKPENIPQPISNTSRANLNKLLTDYTEMKKAILHVYWEEFQKDPVGLMSRVAQPASKKIDQNKLKPEMDEKGNLTTAGFACSQCGQPLFVYKLEQVSEKGKAYTNYFGRCNVAEHEKLILLAQLKPEKDSDEAVTYSLGKFGQRALDFYSIHVTKESTHPVKPLAQIAGNRYASAPVGKALSDACMGTIASFLSKYQDIIIEHQKVVKGNQKRLESLRELAGKENLEYPSVTLPPQPHTKEGVDAYNEVIARVRTWVNLNLWQKLKLSRDDAKPLLRLKGFPSFPLVERQANEVDWWDMVCNVKKLINEKKEDGKVFWQNLAGYKRQEALRPYLSSEEDRKKGKKFARYQLGDLLLHLEKKHGEDWGDVYDEAWERIDKKVEGLSKHIKLEEERRSEDAQSKAALTDWLRAKASFVIEGLKEADKDEFCRCELKLQKWYGDLRGKPFAIEAENSILDISGFSKQYNCAFIWQKDGVKKLNLYLIINYFKGGKLRFKKIKPEAFEANRFYTVINKKSGEIVPMEVNFNFDDPNLIILPLAFGKRQGREFIWNDLLSLETGSLKLANGRVIEKTLYNRRTRQDEPALFVALTFERREVLDSSNIKPMNLIGVDRGENIPAVIALTDPEGCPLSRFKDSLGNPTHILRIGESYKEKQRTIQAKKEVEQRRAGGYSRKYASKAKNLADDMVRNTARDLLYYAVTQDAMLIFENLSRGFGRQGKRTFMAERQYTRMEDWLTAKLAYEGLPSKTYLSKTLAQYTSKTCSNCGFTITSADYDRVLEKLKKTATGWMTTINGKELKVEGQITYYNRYKRQNVVKDLSVELDRLSEESVNNDISSWTKGRSGEALSLLKKRFSHRPVQEKFVCLNCGFETHADEQAALNIARSWLFLRSQEYKKYQTNKTTGNTDKRAFVETWQSFYRKKLKEVWKPAV

SEQ ID NO: 43797 - protein, 978 aa, synthetic construct
  REGION 1..978: note = engineered CasX variant
QEIKRINKIRRRLVKDSNTKKAGKTGPMKTLLVRVMTPDLRERLENLRKKPENIPQPISNTSRANLNKLLTDYTEMKKAILHVYWEEFQKDPVGLMSRVAQPASKKIDQNKLKPEMDEKGNLTTAGFACSQCGQPLFVYKLEQVSEKGKAYTNYFGRCNVAEHEKLILLAQLKPEKDSDEAVTYSLGKFGQRALDFYSIHVTKESTHPVKPLAQIAGNRYASVPVGKALSDACMGTIASFLSKYQDIIIEHQKVVKGNQKRLESLRELAGKENLEYPSVTLPPQPHTKEGVDAYNEVIARVRTWVNLNLWQKLKLSRDDAKPLLRLKGFPSFPLVERQANEVDWWDMVCNVKKLINEKKEDGKVFWQNLAGYKRQEALRPYLSSEEDRKKGKKFARYQLGDLLLHLEKKHGEDWGDVYDEAWERIDKKVEGLSKHIKLEEERRSEDAQSKAALTDWLRAKASFVIEGLKEADKDEFCRCELKLQKWYGDLRGKPFAIEAENSILDISGFSKQYNCAFIWQKDGVKKLNLYLIINYFKGGKLRFKKIKPEAFEANRFYTVINKKSGEIVPMEVNFNFDDPNLIILPLAFGKRQGREFIWNDLLSLETGSLKLANGRVIEKTLYNRRTRQDEPALFVALTFERREVLDSSNIKPMNLIGVDRGENIPAVIALTDPEGCPLSRFKDSLGNPTHILRIGESYKEKQRTIQAKKEVEQRRAGGYSRKYASKAKNLADDMVRNTARDLLYYAVTQDAMLIFENLSRGFGRQGKRTFMAERQYTRMEDWLTAKLAYEGLPSKTYLSKTLAQYTSKTCSNCGFTITSADYDRVLEKLKKTATGWMTTINGKELKVEGQITYYNRYKRQNVVKDLSVELDRLSEESVNNDISSWTKGRSGEALSLLKKRFSHRPVQEKFVCLNCGFETHADEQAALNIARSWLFLRSQEYKKYQTNKTTGNTDKRAFVETWQSFYRKKLKEVWKPAV

SEQ ID NO: 43798 - protein, 978 aa, synthetic construct
  REGION 1..978: note = engineered CasX variant
QEIKRINKIRRRLVKDSNTKKAGKTGPMKTLLVRVMTPDLRERLENLRKKPENIPQPISNTSRANLNKLLTDYTEMKKAILHVYWEEFQKDPVGLMSRVAQPASKKIDQNKLKPEMDEKGNLTTAGFACSQCGQPLFVYKLEQVSEKGKAYTNYFGRCNVAEHEKLIKLAQLKPEKDSDEAVTYSLGKFGQRALDFYSIHVTKESTHPVKPLAQIAGNRYASGPVGKALSDACMGTIASFLSKYQDIIIEHQKVVKGNQKRLESLRELAGKENLEYPSVTLPPQPHTKEGVDAYNEVIARVRTWVNLNLWQKLKLSRDDAKPLLRLKGFPSFPLVERQANEVDWWDMVCNVKKLINEKKEDGKVFWQNLAGYKRQEALRPYLSSEEDRKKGKKFARYQLGDLLLHLEKKHGEDWGDVYDEAWERIDKKVEGLSKHIKLEEERRSEDAQSKAALTDWLRAKASFVIEGLKEADKDEFCRCELKLQKWYGDLRGKPFAIEAENSILDISGFSKQYNCAFIWQKDGVKKLNLYLIINYFKGGKLRFKKIKPEAFEANRFYTVINKKSGEIVPMEVNFNFDDPNLIILPLAFGKRQGREFIWNDLLSLETGSLKLANGRVIEKTLYNRRTRQDEPALFVALTFERREVLDSSNIKPMNLIGVDRGENIPAVIALTDPEGCPLSRFKDSLGNPTHILRIGESYKEKQRTIQAKKEVEQRRAGGYSRKYASKAKNLADDMVRNTARDLLYYAVTQDAMLIFENLSRGFGRQGKRTFMAERQYTRMEDWLTAKLAYEGLPSKTYLSKTLAQYTSKTCSNCGFTITSADYDRVLEKLKKTATGWMTTINGKELKVEGQITYYNRYKRQNVVKDLSVELDRLSEESVNNDISSWTKGRSGEALSLLKKRFSHRPVQEKFVCLNCGFETHADEQAALNIARSWLFLRSQEYKKYQTNKTTGNTDKRAFVETWQSFYRKKLKEVWKPAV

SEQ ID NO: 43799 - protein, 977 aa, synthetic construct
  REGION 1..977: note = engineered CasX variant
QEIKRINKIRRRLVKDSNTKKAGKTGPMKTLLVRVMTPDLRERLENLRKKPENIPQPISNTSRANLNKLLTDYTEMKKAILHVYWEEFQKDPVGLMSRVAQPASKKIDQNKLKPEMDEKGNLTTAGFACSQCGQPLFVYKLEQVSEKGKAYTNYFGRCNVAEHEKLILLAQLKPEKDSDEAVTYSLGKFGQRALDFYSIHVTKESTHPVKPLAQIAGNRYASPVGKALSDACMGTIASFLSKYQDIIIEHQKVVKGNQKRLESLRELAGKENLEYPSVTLPPQPHTKEGVDAYNEVIARVRTWVNLNLWQKLKLSRDDAKPLLRLKGFPSFPLVERQANEVDWWDMVCNVKKLINEKKEDGKVFWQNLAGYKRQEALRPYLSSEEDRKKGKKFARYQLGDLLLHLEKKHGEDWGDVYDEAWERIDKKVEGLSKHIKLEEERRSEDAQSKAALTDWLRAKASFVIEGLKEADKDEFCRCELKLQKWYGDLRGKPFAIEAENSILDISGFSKQYNCAFIWQKDGVKKLNLYLIINYFKGGKLRFKKIKPEAFEANRFYTVINKKSGEIVPMEVNFNFDDPNLIILPLAFGKRQGREFIWNDLLSLETGSLKLANGRVIEKTLYNRRTRQDEPALFVALTFERREVLDSSNIKPMNLIGVDRGENIPAVIALTDPEGCPLSRFKDSLGNPTHILRIGESYKEKQRTIQAKKEVEQRRAGGYSRKYASKAKNLADDMVRNTARDLLYYAVTQDAMLIFENLSRGFGRQGKRTFMAERQYTRMEDWLTAKLAYEGLPSKTYLSKTLAQYTSKTCSNCGFTITSADYDRVLEKLKKTATGWMTTINGKELKVEGQITYYNRYKRQNVVKDLSVELDRLSEESVNNDISSWTKGRSGEALSLLKKRFSHRPVQEKFVCLNCGFETHADEQAALNIARSWLFLRSQEYKKYQTNKTTGNTDKRAFVETWQSFYRKKLKEVWKPAV

SEQ ID NO: 43800 - protein, 978 aa, synthetic construct
  REGION 1..978: note = engineered CasX variant
QEIKRINKIRRRLVKDSNTKKAGKTGPMKTLLVRVMTPDLRERLENLRKKPENIPQPISNTSRANLNKLLTDYTEMKKAILHVYWEEFQKDPVGLMSRVAQPASKKIDQNKLKPEMDEKGNLTTAGFACSQCGQPLFVYKLEQVSEKGKAYTNYFGRCNVAEHEKLILLAQLKPEKDSDEAVTYSLGKFGQRALDFYSIHVTKESTHPVKPLAQIAGNRYASYPVGKALSDACMGTIASFLSKYQDIIIEHQKVVKGNQKRLESLRELAGKENLEYPSVTLPPQPHTKEGVDAYNEVIARVRTWVNLNLWQKLKLSRDDAKPLLRLKGFPSFPLVERQANEVDWWDMVCNVKKLINEKKEDGKVFWQNLAGYKRQEALRPYLSSEEDRKKGKKFARYQLGDLLLHLEKKHGEDWGKVYGEAWERIDKKVEGLSKHIKLEEERRSEDAQSKAALTDWLRAKASFVIEGLKEADKDEFCRCELKLQKWYGDLRGKPFAIEAENSILDISGFSKQYNCAFIWQKDGVKKLNLYLIINYFKGGKLRFKKIKPEAFEANRFYTVINKKSGEIVPMEVNFNFDDPNLIILPLAFGKRQGREFIWNDLLSLETGSLKLANGRVIEKTLYNRRTRQDEPALFVALTFERREVLDSSNIKPMNLIGVDRGENIPAVIALTDPEGCPLSRFKDSLGNPTHILRIGESYKEKQRTIQAKKEVEQRRAGGYSRKYASKAKNLADDMVRNTARDLLYYAVTQDAMLIFENLSRGFGRQGKRTFMAERQYTRMEDWLTAKLAYEGLPSKTYLSKTLAQYTSKTCSNCGFTITSADYDRVLEKLKKTATGWMTTINGKELKVEGQITYYNRYKRQNVVKDLSVELDRLSEESVNNDISSWTKGRSGEALSLLKKRFSHRPVQEKFVCLNCGFETHADEQAALNIARSWLFLRSQEYKKYQTNKTTGNTDKRAFVETWQSFYRKKLKEVWKPAV

SEQ ID NO: 43801 - protein, 978 aa, synthetic construct
  REGION 1..978: note = engineered CasX variant
QEIKRINKIRRRLVKDSNTKKAGKTGPMKTLLVRVMTPDLRERLENLRKKPENIPQPISNTSRANLNKLLTDYTEMKKAILHVYWEEFQKDPVGLMSRVAQPASKKIDQNKLKPEMDEKGNLTTAGFACSQCGQPLFVYKLEQVSEKGKAYTNYFGRCNVAEHEKLILLAQLKPEKDSDEAVTYSLGKFGQRALDFYSIHVTKESTHPVKPLAQIAGNRYASHPVGKALSDACMGTIASFLSKYQDIIIEHQKVVKGNQKRLESLRELAGKENLEYPSVTLPPQPHTKEGVDAYNEVIARVRTWVNLNLWQKLKLSRDDAKPLLRLKGFPSFPLVERQANEVDWWDMVCNVKKLINEKKEDGKVFWQNLAGYKRQEALRPYLSSEEDRKKGKKFARYQLGDLLLHLEKKHGEDWGKVYGEAWERIDKKVEGLSKHIKLEEERRSEDAQSKAALTDWLRAKASFVIEGLKEADKDEFCRCELKLQKWYGDLRGKPFAIEAENSILDISGFSKQYNCAFIWQKDGVKKLNLYLIINYFKGGKLRFKKIKPEAFEANRFYTVINKKSGEIVPMEVNFNFDDPNLIILPLAFGKRQGREFIWNDLLSLETGSLKLANGRVIEKTLYNRRTRQDEPALFVALTFERREVLDSSNIKPMNLIGVDRGENIPAVIALTDPEGCPLSRFKDSLGNPTHILRIGESYKEKQRTIQAKKEVEQRRAGGYSRKYASKAKNLADDMVRNTARDLLYYAVTQDAMLIFENLSRGFGRQGKRTFMAERQYTRMEDWLTAKLAYEGLPSKTYLSKTLAQYTSKTCSNCGFTITSADYDRVLEKLKKTATGWMTTINGKELKVEGQITYYNRYKRQNVVKDLSVELDRLSEESVNNDISSWTKGRSGEALSLLKKRFSHRPVQEKFVCLNCGFETHADEQAALNIARSWLFLRSQEYKKYQTNKTTGNTDKRAFVETWQSFYRKKLKEVWKPAV

SEQ ID NO: 43802 - protein, 978 aa, synthetic construct
  REGION 1..978: note = engineered CasX variant
QEIKRINKIRRRLVKDSNTKKAGKTGPMKTLLVRVMTPDLRERLENLRKKPENIPQPISNTSRANLNKLLTDYTEMKKAILHVYWEEFQKDPVGLMSRVAQPASKKIDQNKLKPEMDEKGNLTTAGFACSQCGQPLFVYKLEQVSEKGKAYTNYFGRCNVAEHEKLILLAQLKPEKDSDEAVTYSLGKFGQRALDFYSIHVTKESTHPVKPLAQIAGNRYASSPVGKALSDACMGTIASFLSKYQDIIIEHQKVVKGNQKRLESLRELAGKENLEYPSVTLPPQPHTKEGVDAYNEVIARVRTWVNLNLWQKLKLSRDDAKPLLRLKGFPSFPLVERQANEVDWWDMVCNVKKLINEKKEDGKVFWQNLAGYKRQEALRPYLSSEEDRKKGKKFARYQLGDLLLHLEKKHGEDWGKVYGEAWERIDKKVEGLSKHIKLEEERRSEDAQSKAALTDWLRAKASFVIEGLKEADKDEFCRCELKLQKWYGDLRGKPFAIEAENSILDISGFSKQYNCAFIWQKDGVKKLNLYLIINYFKGGKLRFKKIKPEAFEANRFYTVINKKSGEIVPMEVNFNFDDPNLIILPLAFGKRQGREFIWNDLLSLETGSLKLANGRVIEKTLYNRRTRQDEPALFVALTFERREVLDSSNIKPMNLIGVDRGENIPAVIALTDPEGCPLSRFKDSLGNPTHILRIGESYKEKQRTIQAKKEVEQRRAGGYSRKYASKAKNLADDMVRNTARDLLYYAVTQDAMLIFENLSRGFGRQGKRTFMAERQYTRMEDWLTAKLAYEGLPSKTYLSKTLAQYTSKTCSNCGFTITSADYDRVLEKLKKTATGWMTTINGKELKVEGQITYYNRYKRQNVVKDLSVELDRLSEESVNNDISSWTKGRSGEALSLLKKRFSHRPVQEKFVCLNCGFETHADEQAALNIARSWLFLRSQEYKKYQTNKTTGNTDKRAFVETWQSFYRKKLKEVWKPAV

SEQ ID NO: 43803 - protein, 978 aa, synthetic construct
  REGION 1..978: note = engineered CasX variant
QEIKRINKIRRRLVKDSNTKKAGKTGPMKTLLVRVMTPDLRERLENLRKKPENIPQPISNTSRANLNKLLTDYTEMKKAILHVYWEEFQKDPVGLMSRVAQPASKKIDQNKLKPEMDEKGNLTTAGFACSQCGQPLFVYKLEQVSEKGKAYTNYFGRCNVAEHEKLILLAQLKPEKDSDEAVTYSLGKFGQRALDFYSIHVTKESTHPVKPLAQIAGNRYASTPVGKALSDACMGTIASFLSKYQDIIIEHQKVVKGNQKRLESLRELAGKENLEYPSVTLPPQPHTKEGVDAYNEVIARVRTWVNLNLWQKLKLSRDDAKPLLRLKGFPSFPLVERQANEVDWWDMVCNVKKLINEKKEDGKVFWQNLAGYKRQEALRPYLSSEEDRKKGKKFARYQLGDLLLHLEKKHGEDWGKVYGEAWERIDKKVEGLSKHIKLEEERRSEDAQSKAALTDWLRAKASFVIEGLKEADKDEFCRCELKLQKWYGDLRGKPFAIEAENSILDISGFSKQYNCAFIWQKDGVKKLNLYLIINYFKGGKLRFKKIKPEAFEANRFYTVINKKSGEIVPMEVNFNFDDPNLIILPLAFGKRQGREFIWNDLLSLETGSLKLANGRVIEKTLYNRRTRQDEPALFVALTFERREVLDSSNIKPMNLIGVDRGENIPAVIALTDPEGCPLSRFKDSLGNPTHILRIGESYKEKQRTIQAKKEVEQRRAGGYSRKYASKAKNLADDMVRNTARDLLYYAVTQDAMLIFENLSRGFGRQGKRTFMAERQYTRMEDWLTAKLAYEGLPSKTYLSKTLAQYTSKTCSNCGFTITSADYDRVLEKLKKTATGWMTTINGKELKVEGQITYYNRYKRQNVVKDLSVELDRLSEESVNNDISSWTKGRSGEALSLLKKRFSHRPVQEKFVCLNCGFETHADEQAALNIARSWLFLRSQEYKKYQTNKTTGNTDKRAFVETWQSFYRKKLKEVWKPAV

SEQ ID NO: 43804 - protein, 978 aa, synthetic construct
  REGION 1..978: note = engineered CasX variant
QEIKRINKIRRRLVKDSNTKKAGKTGPMKTLLVRVMTPDLRERLENLRKKPENIPQPISNTSRANLNKLLTDYTEMKKAILHVYWEEFQKDPVGLMSRVAQPASKKIDQNKLKPEMDEKGNLTTAGFACSQCGQPLFVYKLEQVSEKGKAYTNYFGRCNVAEHEKLILLAQLKPEKDSDEAVTYSLGKFGQRALDFYSIHVTKESTHPVKPLAQIAGNRYASAPVGKALSDACMGTIASFLSKYQDIIIEHQKVVKGNQKRLESLRELAGKENLEYPSVTLPPQPHTKEGVDAYNEVIARVRTWVNLNLWQKLKLSRDDAKPLLRLKGFPSFPLVERQANEVDWWDMVCNVKKLINEKKEDGKVFWQNLAGYKRQEALRPYLSSEEDRKKGKKFARYQLGDLLLHLEKKHGEDWGKVYGEAWERIDKKVEGLSKHIKLEEERRSEDAQSKAALTDWLRAKASFVIEGLKEADKDEFCRCELKLQKWYGDLRGKPFAIEAENSILDISGFSKQYNCAFIWQKDGVKKLNLYLIINYFKGGKLRFKKIKPEAFEANRFYTVINKKSGEIVPMEVNFNFDDPNLIILPLAFGKRQGREFIWNDLLSLETGSLKLANGRVIEKTLYNRRTRQDEPALFVALTFERREVLDSSNIKPMNLIGVDRGENIPAVIALTDPEGCPLSRFKDSLGNPTHILRIGESYKEKQRTIQAKKEVEQRRAGGYSRKYASKAKNLADDMVRNTARDLLYYAVTQDAMLIFENLSRGFGRQGKRTFMAERQYTRMEDWLTAKLAYEGLPSKTYLSKTLAQYTSKTCSNCGFTITSADYDRVLEKLKKTATGWMTTINGKELKVEGQITYYNRYKRQNVVKDLSVELDRLSEESVNNDISSWTKGRSGEALSLLKKRFSHRPVQEKFVCLNCGFETHADEQAALNIARSWLFLRSQEYKKYQTNKTTGNTDKRAFVETWQSFYRKKLKEVWKPAV

SEQ ID NO: 43805 - protein, 978 aa, synthetic construct
  REGION 1..978: note = engineered CasX variant
QEIKRINKIRRRLVKDSNTKKAGKTGPMKTLLVRVMTPDLRERLENLRKKPENIPQPISNTSRANLNKLLTDYTEMKKAILHVYWEEFQKDPVGLMSRVAQPASKKIDQNKLKPEMDEKGNLTTAGFACSQCGQPLFVYKLEQVSEKGKAYTNYFGRCNVAEHEKLILLAQLKPEKDSDEAVTYSLGKFGQRALDFYSIHVTKESTHPVKPLAQIAGNRYASVPVGKALSDACMGTIASFLSKYQDIIIEHQKVVKGNQKRLESLRELAGKENLEYPSVTLPPQPHTKEGVDAYNEVIARVRTWVNLNLWQKLKLSRDDAKPLLRLKGFPSFPLVERQANEVDWWDMVCNVKKLINEKKEDGKVFWQNLAGYKRQEALRPYLSSEEDRKKGKKFARYQLGDLLLHLEKKHGEDWGKVYGEAWERIDKKVEGLSKHIKLEEERRSEDAQSKAALTDWLRAKASFVIEGLKEADKDEFCRCELKLQKWYGDLRGKPFAIEAENSILDISGFSKQYNCAFIWQKDGVKKLNLYLIINYFKGGKLRFKKIKPEAFEANRFYTVINKKSGEIVPMEVNFNFDDPNLIILPLAFGKRQGREFIWNDLLSLETGSLKLANGRVIEKTLYNRRTRQDEPALFVALTFERREVLDSSNIKPMNLIGVDRGENIPAVIALTDPEGCPLSRFKDSLGNPTHILRIGESYKEKQRTIQAKKEVEQRRAGGYSRKYASKAKNLADDMVRNTARDLLYYAVTQDAMLIFENLSRGFGRQGKRTFMAERQYTRMEDWLTAKLAYEGLPSKTYLSKTLAQYTSKTCSNCGFTITSADYDRVLEKLKKTATGWMTTINGKELKVEGQITYYNRYKRQNVVKDLSVELDRLSEESVNNDISSWTKGRSGEALSLLKKRFSHRPVQEKFVCLNCGFETHADEQAALNIARSWLFLRSQEYKKYQTNKTTGNTDKRAFVETWQSFYRKKLKEVWKPAV

SEQ ID NO: 43806 - protein, 978 aa, synthetic construct
  REGION 1..978: note = engineered CasX variant
QEIKRINKIRRRLVKDSNTKKAGKTGPMKTLLVRVMTPDLRERLENLRKKPENIPQPISNTSRANLNKLLTDYTEMKKAILHVYWEEFQKDPVGLMSRVAQPASKKIDQNKLKPEMDEKGNLTTAGFACSQCGQPLFVYKLEQVSEKGKAYTNYFGRCNVAEHEKLIKLAQLKPEKDSDEAVTYSLGKFGQRALDFYSIHVTKESTHPVKPLAQIAGNRYASGPVGKALSDACMGTIASFLSKYQDIIIEHQKVVKGNQKRLESLRELAGKENLEYPSVTLPPQPHTKEGVDAYNEVIARVRTWVNLNLWQKLKLSRDDAKPLLRLKGFPSFPLVERQANEVDWWDMVCNVKKLINEKKEDGKVFWQNLAGYKRQEALRPYLSSEEDRKKGKKFARYQLGDLLLHLEKKHGEDWGKVYGEAWERIDKKVEGLSKHIKLEEERRSEDAQSKAALTDWLRAKASFVIEGLKEADKDEFCRCELKLQKWYGDLRGKPFAIEAENSILDISGFSKQYNCAFIWQKDGVKKLNLYLIINYFKGGKLRFKKIKPEAFEANRFYTVINKKSGEIVPMEVNFNFDDPNLIILPLAFGKRQGREFIWNDLLSLETGSLKLANGRVIEKTLYNRRTRQDEPALFVALTFERREVLDSSNIKPMNLIGVDRGENIPAVIALTDPEGCPLSRFKDSLGNPTHILRIGESYKEKQRTIQAKKEVEQRRAGGYSRKYASKAKNLADDMVRNTARDLLYYAVTQDAMLIFENLSRGFGRQGKRTFMAERQYTRMEDWLTAKLAYEGLPSKTYLSKTLAQYTSKTCSNCGFTITSADYDRVLEKLKKTATGWMTTINGKELKVEGQITYYNRYKRQNVVKDLSVELDRLSEESVNNDISSWTKGRSGEALSLLKKRFSHRPVQEKFVCLNCGFETHADEQAALNIARSWLFLRSQEYKKYQTNKTTGNTDKRAFVETWQSFYRKKLKEVWKPAV

SEQ ID NO: 43807 - protein, 977 aa, synthetic construct
  REGION 1..977: note = engineered CasX variant
QEIKRINKIRRRLVKDSNTKKAGKTGPMKTLLVRVMTPDLRERLENLRKKPENIPQPISNTSRANLNKLLTDYTEMKKAILHVYWEEFQKDPVGLMSRVAQPASKKIDQNKLKPEMDEKGNLTTAGFACSQCGQPLFVYKLEQVSEKGKAYTNYFGRCNVAEHEKLILLAQLKPEKDSDEAVTYSLGKFGQRALDFYSIHVTKESTHPVKPLAQIAGNRYASPVGKALSDACMGTIASFLSKYQDIIIEHQKVVKGNQKRLESLRELAGKENLEYPSVTLPPQPHTKEGVDAYNEVIARVRTWVNLNLWQKLKLSRDDAKPLLRLKGFPSFPLVERQANEVDWWDMVCNVKKLINEKKEDGKVFWQNLAGYKRQEALRPYLSSEEDRKKGKKFARYQLGDLLLHLEKKHGEDWGKVYGEAWERIDKKVEGLSKHIKLEEERRSEDAQSKAALTDWLRAKASFVIEGLKEADKDEFCRCELKLQKWYGDLRGKPFAIEAENSILDISGFSKQYNCAFIWQKDGVKKLNLYLIINYFKGGKLRFKKIKPEAFEANRFYTVINKKSGEIVPMEVNFNFDDPNLIILPLAFGKRQGREFIWNDLLSLETGSLKLANGRVIEKTLYNRRTRQDEPALFVALTFERREVLDSSNIKPMNLIGVDRGENIPAVIALTDPEGCPLSRFKDSLGNPTHILRIGESYKEKQRTIQAKKEVEQRRAGGYSRKYASKAKNLADDMVRNTARDLLYYAVTQDAMLIFENLSRGFGRQGKRTFMAERQYTRMEDWLTAKLAYEGLPSKTYLSKTLAQYTSKTCSNCGFTITSADYDRVLEKLKKTATGWMTTINGKELKVEGQITYYNRYKRQNVVKDLSVELDRLSEESVNNDISSWTKGRSGEALSLLKKRFSHRPVQEKFVCLNCGFETHADEQAALNIARSWLFLRSQEYKKYQTNKTTGNTDKRAFVETWQSFYRKKLKEVWKPAV

SEQ ID NO: 43808 - protein, 978 aa, synthetic construct
  REGION 1..978: note = engineered CasX variant
QEIKRINKIRRRLVKDSNTKKAGKTGPMKTLLVRVMTPDLRERLENLRKKPENIPQPISNTSRANLNKLLTDYTEMKKAILHVYWEEFQKDPVGLMSRVAQPASKKIDQNKLKPEMDEKGNLTTAGFACSQCGQPLFVYKLEQVSEKGKAYTNYFGRCNVAEHEKLILLAQLKPEKDSDEAVTYSLGKFGQRALDFYSIHVTKESTHPVKPLAQIAGNRYASYPVGKALSDACMGTIASFLSKYQDIIIEHQKVVKGNQKRLESLRELAGKENLEYPSVTLPPQPHTKEGVDAYNEVIARVRTWVNLNLWQKLKLSRDDAKPLLRLKGFPSFPLVERQANEVDWWDMVCNVKKLINEKKEDGKVFWQNLAGYKRQEALRPYLSSEEDRKKGKKFARYQLGDLLLHLEKKHGEDWGKVYDEAWERIDKKVEGLSKHIKLEEERRSEDAQSKAALTDWLRAKASFVIEGKKEADKDEFCRCELKLQKWYGDLRGKPFAIEAENSILDISGFSKQYNCAFIWQKDGVKKLNLYLIINYFKGGKLRFKKIKPEAFEANRFYTVINKKSGEIVPMEVNFNFDDPNLIILPLAFGKRQGREFIWNDLLSLETGSLKLANGRVIEKTLYNRRTRQDEPALFVALTFERREVLDSSNIKPMNLIGVDRGENIPAVIALTDPEGCPLSRFKDSLGNPTHILRIGESYKEKQRTIQAKKEVEQRRAGGYSRKYASKAKNLADDMVRNTARDLLYYAVTQDAMLIFENLSRGFGRQGKRTFMAERQYTRMEDWLTAKLAYEGLPSKTYLSKTLAQYTSKTCSNCGFTITSADYDRVLEKLKKTATGWMTTINGKELKVEGQITYYNRYKRQNVVKDLSVELDRLSEESVNNDISSWTKGRSGEALSLLKKRFSHRPVQEKFVCLNCGFETHADEQAALNIARSWLFLRSQEYKKYQTNKTTGNTDKRAFVETWQSFYRKKLKEVWKPAV

SEQ ID NO: 43809 - protein, 978 aa, synthetic construct
  REGION 1..978: note = engineered CasX variant
QEIKRINKIRRRLVKDSNTKKAGKTGPMKTLLVRVMTPDLRERLENLRKKPENIPQPISNTSRANLNKLLTDYTEMKKAILHVYWEEFQKDPVGLMSRVAQPASKKIDQNKLKPEMDEKGNLTTAGFACSQCGQPLFVYKLEQVSEKGKAYTNYFGRCNVAEHEKLILLAQLKPEKDSDEAVTYSLGKFGQRALDFYSIHVTKESTHPVKPLAQIAGNRYASHPVGKALSDACMGTIASFLSKYQDIIIEHQKVVKGNQKRLESLRELAGKENLEYPSVTLPPQPHTKEGVDAYNEVIARVRTWVNLNLWQKLKLSRDDAKPLLRLKGFPSFPLVERQANEVDWWDMVCNVKKLINEKKEDGKVFWQNLAGYKRQEALRPYLSSEEDRKKGKKFARYQLGDLLLHLEKKHGEDWGKVYDEAWERIDKKVEGLSKHIKLEEERRSEDAQSKAALTDWLRAKASFVIEGKKEADKDEFCRCELKLQKWYGDLRGKPFAIEAENSILDISGFSKQYNCAFIWQKDGVKKLNLYLIINYFKGGKLRFKKIKPEAFEANRFYTVINKKSGEIVPMEVNFNFDDPNLIILPLAFGKRQGREFIWNDLLSLETGSLKLANGRVIEKTLYNRRTRQDEPALFVALTFERREVLDSSNIKPMNLIGVDRGENIPAVIALTDPEGCPLSRFKDSLGNPTHILRIGESYKEKQRTIQAKKEVEQRRAGGYSRKYASKAKNLADDMVRNTARDLLYYAVTQDAMLIFENLSRGFGRQGKRTFMAERQYTRMEDWLTAKLAYEGLPSKTYLSKTLAQYTSKTCSNCGFTITSADYDRVLEKLKKTATGWMTTINGKELKVEGQITYYNRYKRQNVVKDLSVELDRLSEESVNNDISSWTKGRSGEALSLLKKRFSHRPVQEKFVCLNCGFETHADEQAALNIARSWLFLRSQEYKKYQTNKTTGNTDKRAFVETWQSFYRKKLKEVWKPAV

SEQ ID NO: 43810 - protein, 978 aa, synthetic construct
  REGION 1..978: note = engineered CasX variant
QEIKRINKIRRRLVKDSNTKKAGKTGPMKTLLVRVMTPDLRERLENLRKKPENIPQPISNTSRANLNKLLTDYTEMKKAILHVYWEEFQKDPVGLMSRVAQPASKKIDQNKLKPEMDEKGNLTTAGFACSQCGQPLFVYKLEQVSEKGKAYTNYFGRCNVAEHEKLILLAQLKPEKDSDEAVTYSLGKFGQRALDFYSIHVTKESTHPVKPLAQIAGNRYASSPVGKALSDACMGTIASFLSKYQDIIIEHQKVVKGNQKRLESLRELAGKENLEYPSVTLPPQPHTKEGVDAYNEVIARVRTWVNLNLWQKLKLSRDDAKPLLRLKGFPSFPLVERQANEVDWWDMVCNVKKLINEKKEDGKVFWQNLAGYKRQEALRPYLSSEEDRKKGKKFARYQLGDLLLHLEKKHGEDWGKVYDEAWERIDKKVEGLSKHIKLEEERRSEDAQSKAALTDWLRAKASFVIEGKKEADKDEFCRCELKLQKWYGDLRGKPFAIEAENSILDISGFSKQYNCAFIWQKDGVKKLNLYLIINYFKGGKLRFKKIKPEAFEANRFYTVINKKSGEIVPMEVNFNFDDPNLIILPLAFGKRQGREFIWNDLLSLETGSLKLANGRVIEKTLYNRRTRQDEPALFVALTFERREVLDSSNIKPMNLIGVDRGENIPAVIALTDPEGCPLSRFKDSLGNPTHILRIGESYKEKQRTIQAKKEVEQRRAGGYSRKYASKAKNLADDMVRNTARDLLYYAVTQDAMLIFENLSRGFGRQGKRTFMAERQYTRMEDWLTAKLAYEGLPSKTYLSKTLAQYTSKTCSNCGFTITSADYDRVLEKLKKTATGWMTTINGKELKVEGQITYYNRYKRQNVVKDLSVELDRLSEESVNNDISSWTKGRSGEALSLLKKRFSHRPVQEKFVCLNCGFETHADEQAALNIARSWLFLRSQEYKKYQTNKTTGNTDKRAFVETWQSFYRKKLKEVWKPAV

SEQ ID NO: 43811 - protein, 978 aa, synthetic construct
  REGION 1..978: note = engineered CasX variant
QEIKRINKIRRRLVKDSNTKKAGKTGPMKTLLVRVMTPDLRERLENLRKKPENIPQPISNTSRANLNKLLTDYTEMKKAILHVYWEEFQKDPVGLMSRVAQPASKKIDQNKLKPEMDEKGNLTTAGFACSQCGQPLFVYKLEQVSEKGKAYTNYFGRCNVAEHEKLILLAQLKPEKDSDEAVTYSLGKFGQRALDFYSIHVTKESTHPVKPLAQIAGNRYASTPVGKALSDACMGTIASFLSKYQDIIIEHQKVVKGNQKRLESLRELAGKENLEYPSVTLPPQPHTKEGVDAYNEVIARVRTWVNLNLWQKLKLSRDDAKPLLRLKGFPSFPLVERQANEVDWWDMVCNVKKLINEKKEDGKVFWQNLAGYKRQEALRPYLSSEEDRKKGKKFARYQLGDLLLHLEKKHGEDWGKVYDEAWERIDKKVEGLSKHIKLEEERRSEDAQSKAALTDWLRAKASFVIEGKKEADKDEFCRCELKLQKWYGDLRGKPFAIEAENSILDISGFSKQYNCAFIWQKDGVKKLNLYLIINYFKGGKLRFKKIKPEAFEANRFYTVINKKSGEIVPMEVNFNFDDPNLIILPLAFGKRQGREFIWNDLLSLETGSLKLANGRVIEKTLYNRRTRQDEPALFVALTFERREVLDSSNIKPMNLIGVDRGENIPAVIALTDPEGCPLSRFKDSLGNPTHILRIGESYKEKQRTIQAKKEVEQRRAGGYSRKYASKAKNLADDMVRNTARDLLYYAVTQDAMLIFENLSRGFGRQGKRTFMAERQYTRMEDWLTAKLAYEGLPSKTYLSKTLAQYTSKTCSNCGFTITSADYDRVLEKLKKTATGWMTTINGKELKVEGQITYYNRYKRQNVVKDLSVELDRLSEESVNNDISSWTKGRSGEALSLLKKRFSHRPVQEKFVCLNCGFETHADEQAALNIARSWLFLRSQEYKKYQTNKTTGNTDKRAFVETWQSFYRKKLKEVWKPAV

SEQ ID NO: 43812 - protein, 978 aa, synthetic construct
  REGION 1..978: note = engineered CasX variant
QEIKRINKIRRRLVKDSNTKKAGKTGPMKTLLVRVMTPDLRERLENLRKKPENIPQPISNTSRANLNKLLTDYTEMKKAILHVYWEEFQKDPVGLMSRVAQPASKKIDQNKLKPEMDEKGNLTTAGFACSQCGQPLFVYKLEQVSEKGKAYTNYFGRCNVAEHEKLILLAQLKPEKDSDEAVTYSLGKFGQRALDFYSIHVTKESTHPVKPLAQIAGNRYASAPVGKALSDACMGTIASFLSKYQDIIIEHQKVVKGNQKRLESLRELAGKENLEYPSVTLPPQPHTKEGVDAYNEVIARVRTWVNLNLWQKLKLSRDDAKPLLRLKGFPSFPLVERQANEVDWWDMVCNVKKLINEKKEDGKVFWQNLAGYKRQEALRPYLSSEEDRKKGKKFARYQLGDLLLHLEKKHGEDWGKVYDEAWERIDKKVEGLSKHIKLEEERRSEDAQSKAALTDWLRAKASFVIEGKKEADKDEFCRCELKLQKWYGDLRGKPFAIEAENSILDISGFSKQYNCAFIWQKDGVKKLNLYLIINYFKGGKLRFKKIKPEAFEANRFYTVINKKSGEIVPMEVNFNFDDPNLIILPLAFGKRQGREFIWNDLLSLETGSLKLANGRVIEKTLYNRRTRQDEPALFVALTFERREVLDSSNIKPMNLIGVDRGENIPAVIALTDPEGCPLSRFKDSLGNPTHILRIGESYKEKQRTIQAKKEVEQRRAGGYSRKYASKAKNLADDMVRNTARDLLYYAVTQDAMLIFENLSRGFGRQGKRTFMAERQYTRMEDWLTAKLAYEGLPSKTYLSKTLAQYTSKTCSNCGFTITSADYDRVLEKLKKTATGWMTTINGKELKVEGQITYYNRYKRQNVVKDLSVELDRLSEESVNNDISSWTKGRSGEALSLLKKRFSHRPVQEKFVCLNCGFETHADEQAALNIARSWLFLRSQEYKKYQTNKTTGNTDKRAFVETWQSFYRKKLKEVWKPAV

SEQ ID NO: 43813 - protein, 978 aa, synthetic construct
  REGION 1..978: note = engineered CasX variant
QEIKRINKIRRRLVKDSNTKKAGKTGPMKTLLVRVMTPDLRERLENLRKKPENIPQPISNTSRANLNKLLTDYTEMKKAILHVYWEEFQKDPVGLMSRVAQPASKKIDQNKLKPEMDEKGNLTTAGFACSQCGQPLFVYKLEQVSEKGKAYTNYFGRCNVAEHEKLILLAQLKPEKDSDEAVTYSLGKFGQRALDFYSIHVTKESTHPVKPLAQIAGNRYASVPVGKALSDACMGTIASFLSKYQDIIIEHQKVVKGNQKRLESLRELAGKENLEYPSVTLPPQPHTKEGVDAYNEVIARVRTWVNLNLWQKLKLSRDDAKPLLRLKGFPSFPLVERQANEVDWWDMVCNVKKLINEKKEDGKVFWQNLAGYKRQEALRPYLSSEEDRKKGKKFARYQLGDLLLHLEKKHGEDWGKVYDEAWERIDKKVEGLSKHIKLEEERRSEDAQSKAALTDWLRAKASFVIEGKKEADKDEFCRCELKLQKWYGDLRGKPFAIEAENSILDISGFSKQYNCAFIWQKDGVKKLNLYLIINYFKGGKLRFKKIKPEAFEANRFYTVINKKSGEIVPMEVNFNFDDPNLIILPLAFGKRQGREFIWNDLLSLETGSLKLANGRVIEKTLYNRRTRQDEPALFVALTFERREVLDSSNIKPMNLIGVDRGENIPAVIALTDPEGCPLSRFKDSLGNPTHILRIGESYKEKQRTIQAKKEVEQRRAGGYSRKYASKAKNLADDMVRNTARDLLYYAVTQDAMLIFENLSRGFGRQGKRTFMAERQYTRMEDWLTAKLAYEGLPSKTYLSKTLAQYTSKTCSNCGFTITSADYDRVLEKLKKTATGWMTTINGKELKVEGQITYYNRYKRQNVVKDLSVELDRLSEESVNNDISSWTKGRSGEALSLLKKRFSHRPVQEKFVCLNCGFETHADEQAALNIARSWLFLRSQEYKKYQTNKTTGNTDKRAFVETWQSFYRKKLKEVWKPAV

SEQ ID NO: 43814 - protein, 978 aa, synthetic construct
  REGION 1..978: note = engineered CasX variant
QEIKRINKIRRRLVKDSNTKKAGKTGPMKTLLVRVMTPDLRERLENLRKKPENIPQPISNTSRANLNKLLTDYTEMKKAILHVYWEEFQKDPVGLMSRVAQPASKKIDQNKLKPEMDEKGNLTTAGFACSQCGQPLFVYKLEQVSEKGKAYTNYFGRCNVAEHEKLIKLAQLKPEKDSDEAVTYSLGKFGQRALDFYSIHVTKESTHPVKPLAQIAGNRYASGPVGKALSDACMGTIASFLSKYQDIIIEHQKVVKGNQKRLESLRELAGKENLEYPSVTLPPQPHTKEGVDAYNEVIARVRTWVNLNLWQKLKLSRDDAKPLLRLKGFPSFPLVERQANEVDWWDMVCNVKKLINEKKEDGKVFWQNLAGYKRQEALRPYLSSEEDRKKGKKFARYQLGDLLLHLEKKHGEDWGKVYDEAWERIDKKVEGLSKHIKLEEERRSEDAQSKAALTDWLRAKASFVIEGKKEADKDEFCRCELKLQKWYGDLRGKPFAIEAENSILDISGFSKQYNCAFIWQKDGVKKLNLYLIINYFKGGKLRFKKIKPEAFEANRFYTVINKKSGEIVPMEVNFNFDDPNLIILPLAFGKRQGREFIWNDLLSLETGSLKLANGRVIEKTLYNRRTRQDEPALFVALTFERREVLDSSNIKPMNLIGVDRGENIPAVIALTDPEGCPLSRFKDSLGNPTHILRIGESYKEKQRTIQAKKEVEQRRAGGYSRKYASKAKNLADDMVRNTARDLLYYAVTQDAMLIFENLSRGFGRQGKRTFMAERQYTRMEDWLTAKLAYEGLPSKTYLSKTLAQYTSKTCSNCGFTITSADYDRVLEKLKKTATGWMTTINGKELKVEGQITYYNRYKRQNVVKDLSVELDRLSEESVNNDISSWTKGRSGEALSLLKKRFSHRPVQEKFVCLNCGFETHADEQAALNIARSWLFLRSQEYKKYQTNKTTGNTDKRAFVETWQSFYRKKLKEVWKPAV

SEQ ID NO: 43815 - protein, 977 aa, synthetic construct
  REGION 1..977: note = engineered CasX variant
QEIKRINKIRRRLVKDSNTKKAGKTGPMKTLLVRVMTPDLRERLENLRKKPENIPQPISNTSRANLNKLLTDYTEMKKAILHVYWEEFQKDPVGLMSRVAQPASKKIDQNKLKPEMDEKGNLTTAGFACSQCGQPLFVYKLEQVSEKGKAYTNYFGRCNVAEHEKLILLAQLKPEKDSDEAVTYSLGKFGQRALDFYSIHVTKESTHPVKPLAQIAGNRYASPVGKALSDACMGTIASFLSKYQDIIIEHQKVVKGNQKRLESLRELAGKENLEYPSVTLPPQPHTKEGVDAYNEVIARVRTWVNLNLWQKLKLSRDDAKPLLRLKGFPSFPLVERQANEVDWWDMVCNVKKLINEKKEDGKVFWQNLAGYKRQEALRPYLSSEEDRKKGKKFARYQLGDLLLHLEKKHGEDWGKVYDEAWERIDKKVEGLSKHIKLEEERRSEDAQSKAALTDWLRAKASFVIEGKKEADKDEFCRCELKLQKWYGDLRGKPFAIEAENSILDISGFSKQYNCAFIWQKDGVKKLNLYLIINYFKGGKLRFKKIKPEAFEANRFYTVINKKSGEIVPMEVNFNFDDPNLIILPLAFGKRQGREFIWNDLLSLETGSLKLANGRVIEKTLYNRRTRQDEPALFVALTFERREVLDSSNIKPMNLIGVDRGENIPAVIALTDPEGCPLSRFKDSLGNPTHILRIGESYKEKQRTIQAKKEVEQRRAGGYSRKYASKAKNLADDMVRNTARDLLYYAVTQDAMLIFENLSRGFGRQGKRTFMAERQYTRMEDWLTAKLAYEGLPSKTYLSKTLAQYTSKTCSNCGFTITSADYDRVLEKLKKTATGWMTTINGKELKVEGQITYYNRYKRQNVVKDLSVELDRLSEESVNNDISSWTKGRSGEALSLLKKRFSHRPVQEKFVCLNCGFETHADEQAALNIARSWLFLRSQEYKKYQTNKTTGNTDKRAFVETWQSFYRKKLKEVWKPAV

SEQ ID NO: 43816 - protein, 978 aa, synthetic construct
  REGION 1..978: note = engineered CasX variant
QEIKRINKIRRRLVKDSNTKKAGKTGPMKTLLVRVMTPDLRERLENLRKKPENIPQPISNTSRANLNKLLTDYTEMKKAILHVYWEEFQKDPVGLMSRVAQPASKKIDQNKLKPEMDEKGNLTTAGFACSQCGQPLFVYKLEQVSEKGKAYTNYFGRCNVAEHEKLILLAQLKPEKDSDEAVTYSLGKFGQRALDFYSIHVTKESTHPVKPLAQIAGNRYASYPVGKALSDACMGTIASFLSKYQDIIIEHQKVVKGNQKRLESLRELAGKENLEYPSVTLPPQPHTKEGVDAYNEVIARVRTWVNLNLWQKLKLSRDDAKPLLRLKGFPSFPLVERQANEVDWWDMVCNVKKLINEKKEDGKVFWQNLAGYKRQEALRPYLSSEEDRKKGKKFARYQLGDLLLHLEKKHGEDWGKVYDEAWERIDKKVEGLSKHIKLEEERRSEDAQSKAALTDWLRAKASFVIEGSKEADKDEFCRCELKLQKWYGDLRGKPFAIEAENSILDISGFSKQYNCAFIWQKDGVKKLNLYLIINYFKGGKLRFKKIKPEAFEANRFYTVINKKSGEIVPMEVNFNFDDPNLIILPLAFGKRQGREFIWNDLLSLETGSLKLANGRVIEKTLYNRRTRQDEPALFVALTFERREVLDSSNIKPMNLIGVDRGENIPAVIALTDPEGCPLSRFKDSLGNPTHILRIGESYKEKQRTIQAKKEVEQRRAGGYSRKYASKAKNLADDMVRNTARDLLYYAVTQDAMLIFENLSRGFGRQGKRTFMAERQYTRMEDWLTAKLAYEGLPSKTYLSKTLAQYTSKTCSNCGFTITSADYDRVLEKLKKTATGWMTTINGKELKVEGQITYYNRYKRQNVVKDLSVELDRLSEESVNNDISSWTKGRSGEALSLLKKRFSHRPVQEKFVCLNCGFETHADEQAALNIARSWLFLRSQEYKKYQTNKTTGNTDKRAFVETWQSFYRKKLKEVWKPAV

SEQ ID NO: 43817 - protein, 978 aa, synthetic construct
  REGION 1..978: note = engineered CasX variant
QEIKRINKIRRRLVKDSNTKKAGKTGPMKTLLVRVMTPDLRERLENLRKKPENIPQPISNTSRANLNKLLTDYTEMKKAILHVYWEEFQKDPVGLMSRVAQPASKKIDQNKLKPEMDEKGNLTTAGFACSQCGQPLFVYKLEQVSEKGKAYTNYFGRCNVAEHEKLILLAQLKPEKDSDEAVTYSLGKFGQRALDFYSIHVTKESTHPVKPLAQIAGNRYASHPVGKALSDACMGTIASFLSKYQDIIIEHQKVVKGNQKRLESLRELAGKENLEYPSVTLPPQPHTKEGVDAYNEVIARVRTWVNLNLWQKLKLSRDDAKPLLRLKGFPSFPLVERQANEVDWWDMVCNVKKLINEKKEDGKVFWQNLAGYKRQEALRPYLSSEEDRKKGKKFARYQLGDLLLHLEKKHGEDWGKVYDEAWERIDKKVEGLSKHIKLEEERRSEDAQSKAALTDWLRAKASFVIEGSKEADKDEFCRCELKLQKWYGDLRGKPFAIEAENSILDISGFSKQYNCAFIWQKDGVKKLNLYLIINYFKGGKLRFKKIKPEAFEANRFYTVINKKSGEIVPMEVNFNFDDPNLIILPLAFGKRQGREFIWNDLLSLETGSLKLANGRVIEKTLYNRRTRQDEPALFVALTFERREVLDSSNIKPMNLIGVDRGENIPAVIALTDPEGCPLSRFKDSLGNPTHILRIGESYKEKQRTIQAKKEVEQRRAGGYSRKYASKAKNLADDMVRNTARDLLYYAVTQDAMLIFENLSRGFGRQGKRTFMAERQYTRMEDWLTAKLAYEGLPSKTYLSKTLAQYTSKTCSNCGFTITSADYDRVLEKLKKTATGWMTTINGKELKVEGQITYYNRYKRQNVVKDLSVELDRLSEESVNNDISSWTKGRSGEALSLLKKRFSHRPVQEKFVCLNCGFETHADEQAALNIARSWLFLRSQEYKKYQTNKTTGNTDKRAFVETWQSFYRKKLKEVWKPAV

SEQ ID NO: 43818 - protein, 978 aa, synthetic construct
  REGION 1..978: note = engineered CasX variant
QEIKRINKIRRRLVKDSNTKKAGKTGPMKTLLVRVMTPDLRERLENLRKKPENIPQPISNTSRANLNKLLTDYTEMKKAILHVYWEEFQKDPVGLMSRVAQPASKKIDQNKLKPEMDEKGNLTTAGFACSQCGQPLFVYKLEQVSEKGKAYTNYFGRCNVAEHEKLILLAQLKPEKDSDEAVTYSLGKFGQRALDFYSIHVTKESTHPVKPLAQIAGNRYASSPVGKALSDACMGTIASFLSKYQDIIIEHQKVVKGNQKRLESLRELAGKENLEYPSVTLPPQPHTKEGVDAYNEVIARVRTWVNLNLWQKLKLSRDDAKPLLRLKGFPSFPLVERQANEVDWWDMVCNVKKLINEKKEDGKVFWQNLAGYKRQEALRPYLSSEEDRKKGKKFARYQLGDLLLHLEKKHGEDWGKVYDEAWERIDKKVEGLSKHIKLEEERRSEDAQSKAALTDWLRAKASFVIEGSKEADKDEFCRCELKLQKWYGDLRGKPFAIEAENSILDISGFSKQYNCAFIWQKDGVKKLNLYLIINYFKGGKLRFKKIKPEAFEANRFYTVINKKSGEIVPMEVNFNFDDPNLIILPLAFGKRQGREFIWNDLLSLETGSLKLANGRVIEKTLYNRRTRQDEPALFVALTFERREVLDSSNIKPMNLIGVDRGENIPAVIALTDPEGCPLSRFKDSLGNPTHILRIGESYKEKQRTIQAKKEVEQRRAGGYSRKYASKAKNLADDMVRNTARDLLYYAVTQDAMLIFENLSRGFGRQGKRTFMAERQYTRMEDWLTAKLAYEGLPSKTYLSKTLAQYTSKTCSNCGFTITSADYDRVLEKLKKTATGWMTTINGKELKVEGQITYYNRYKRQNVVKDLSVELDRLSEESVNNDISSWTKGRSGEALSLLKKRFSHRPVQEKFVCLNCGFETHADEQAALNIARSWLFLRSQEYKKYQTNKTTGNTDKRAFVETWQSFYRKKLKEVWKPAV

SEQ ID NO: 43819 - protein, 978 aa, synthetic construct
  REGION 1..978: note = engineered CasX variant
QEIKRINKIRRRLVKDSNTKKAGKTGPMKTLLVRVMTPDLRERLENLRKKPENIPQPISNTSRANLNKLLTDYTEMKKAILHVYWEEFQKDPVGLMSRVAQPASKKIDQNKLKPEMDEKGNLTTAGFACSQCGQPLFVYKLEQVSEKGKAYTNYFGRCNVAEHEKLILLAQLKPEKDSDEAVTYSLGKFGQRALDFYSIHVTKESTHPVKPLAQIAGNRYASTPVGKALSDACMGTIASFLSKYQDIIIEHQKVVKGNQKRLESLRELAGKENLEYPSVTLPPQPHTKEGVDAYNEVIARVRTWVNLNLWQKLKLSRDDAKPLLRLKGFPSFPLVERQANEVDWWDMVCNVKKLINEKKEDGKVFWQNLAGYKRQEALRPYLSSEEDRKKGKKFARYQLGDLLLHLEKKHGEDWGKVYDEAWERIDKKVEGLSKHIKLEEERRSEDAQSKAALTDWLRAKASFVIEGSKEADKDEFCRCELKLQKWYGDLRGKPFAIEAENSILDISGFSKQYNCAFIWQKDGVKKLNLYLIINYFKGGKLRFKKIKPEAFEANRFYTVINKKSGEIVPMEVNFNFDDPNLIILPLAFGKRQGREFIWNDLLSLETGSLKLANGRVIEKTLYNRRTRQDEPALFVALTFERREVLDSSNIKPMNLIGVDRGENIPAVIALTDPEGCPLSRFKDSLGNPTHILRIGESYKEKQRTIQAKKEVEQRRAGGYSRKYASKAKNLADDMVRNTARDLLYYAVTQDAMLIFENLSRGFGRQGKRTFMAERQYTRMEDWLTAKLAYEGLPSKTYLSKTLAQYTSKTCSNCGFTITSADYDRVLEKLKKTATGWMTTINGKELKVEGQITYYNRYKRQNVVKDLSVELDRLSEESVNNDISSWTKGRSGEALSLLKKRFSHRPVQEKFVCLNCGFETHADEQAALNIARSWLFLRSQEYKKYQTNKTTGNTDKRAFVETWQSFYRKKLKEVWKPAV

SEQ ID NO: 43820 - protein, 978 aa, synthetic construct
  REGION 1..978: note = engineered CasX variant
QEIKRINKIRRRLVKDSNTKKAGKTGPMKTLLVRVMTPDLRERLENLRKKPENIPQPISNTSRANLNKLLTDYTEMKKAILHVYWEEFQKDPVGLMSRVAQPASKKIDQNKLKPEMDEKGNLTTAGFACSQCGQPLFVYKLEQVSEKGKAYTNYFGRCNVAEHEKLILLAQLKPEKDSDEAVTYSLGKFGQRALDFYSIHVTKESTHPVKPLAQIAGNRYASAPVGKALSDACMGTIASFLSKYQDIIIEHQKVVKGNQKRLESLRELAGKENLEYPSVTLPPQPHTKEGVDAYNEVIARVRTWVNLNLWQKLKLSRDDAKPLLRLKGFPSFPLVERQANEVDWWDMVCNVKKLINEKKEDGKVFWQNLAGYKRQEALRPYLSSEEDRKKGKKFARYQLGDLLLHLEKKHGEDWGKVYDEAWERIDKKVEGLSKHIKLEEERRSEDAQSKAALTDWLRAKASFVIEGSKEADKDEFCRCELKLQKWYGDLRGKPFAIEAENSILDISGFSKQYNCAFIWQKDGVKKLNLYLIINYFKGGKLRFKKIKPEAFEANRFYTVINKKSGEIVPMEVNFNFDDPNLIILPLAFGKRQGREFIWNDLLSLETGSLKLANGRVIEKTLYNRRTRQDEPALFVALTFERREVLDSSNIKPMNLIGVDRGENIPAVIALTDPEGCPLSRFKDSLGNPTHILRIGESYKEKQRTIQAKKEVEQRRAGGYSRKYASKAKNLADDMVRNTARDLLYYAVTQDAMLIFENLSRGFGRQGKRTFMAERQYTRMEDWLTAKLAYEGLPSKTYLSKTLAQYTSKTCSNCGFTITSADYDRVLEKLKKTATGWMTTINGKELKVEGQITYYNRYKRQNVVKDLSVELDRLSEESVNNDISSWTKGRSGEALSLLKKRFSHRPVQEKFVCLNCGFETHADEQAALNIARSWLFLRSQEYKKYQTNKTTGNTDKRAFVETWQSFYRKKLKEVWKPAV

SEQ ID NO: 43821 - protein, 978 aa, synthetic construct
  REGION 1..978: note = engineered CasX variant
QEIKRINKIRRRLVKDSNTKKAGKTGPMKTLLVRVMTPDLRERLENLRKKPENIPQPISNTSRANLNKLLTDYTEMKKAILHVYWEEFQKDPVGLMSRVAQPASKKIDQNKLKPEMDEKGNLTTAGFACSQCGQPLFVYKLEQVSEKGKAYTNYFGRCNVAEHEKLILLAQLKPEKDSDEAVTYSLGKFGQRALDFYSIHVTKESTHPVKPLAQIAGNRYASVPVGKALSDACMGTIASFLSKYQDIIIEHQKVVKGNQKRLESLRELAGKENLEYPSVTLPPQPHTKEGVDAYNEVIARVRTWVNLNLWQKLKLSRDDAKPLLRLKGFPSFPLVERQANEVDWWDMVCNVKKLINEKKEDGKVFWQNLAGYKRQEALRPYLSSEEDRKKGKKFARYQLGDLLLHLEKKHGEDWGKVYDEAWERIDKKVEGLSKHIKLEEERRSEDAQSKAALTDWLRAKASFVIEGSKEADKDEFCRCELKLQKWYGDLRGKPFAIEAENSILDISGFSKQYNCAFIWQKDGVKKLNLYLIINYFKGGKLRFKKIKPEAFEANRFYTVINKKSGEIVPMEVNFNFDDPNLIILPLAFGKRQGREFIWNDLLSLETGSLKLANGRVIEKTLYNRRTRQDEPALFVALTFERREVLDSSNIKPMNLIGVDRGENIPAVIALTDPEGCPLSRFKDSLGNPTHILRIGESYKEKQRTIQAKKEVEQRRAGGYSRKYASKAKNLADDMVRNTARDLLYYAVTQDAMLIFENLSRGFGRQGKRTFMAERQYTRMEDWLTAKLAYEGLPSKTYLSKTLAQYTSKTCSNCGFTITSADYDRVLEKLKKTATGWMTTINGKELKVEGQITYYNRYKRQNVVKDLSVELDRLSEESVNNDISSWTKGRSGEALSLLKKRFSHRPVQEKFVCLNCGFETHADEQAALNIARSWLFLRSQEYKKYQTNKTTGNTDKRAFVETWQSFYRKKLKEVWKPAV

SEQ ID NO: 43822 - protein, 978 aa, synthetic construct
  REGION 1..978: note = engineered CasX variant
QEIKRINKIRRRLVKDSNTKKAGKTGPMKTLLVRVMTPDLRERLENLRKKPENIPQPISNTSRANLNKLLTDYTEMKKAILHVYWEEFQKDPVGLMSRVAQPASKKIDQNKLKPEMDEKGNLTTAGFACSQCGQPLFVYKLEQVSEKGKAYTNYFGRCNVAEHEKLIKLAQLKPEKDSDEAVTYSLGKFGQRALDFYSIHVTKESTHPVKPLAQIAGNRYASGPVGKALSDACMGTIASFLSKYQDIIIEHQKVVKGNQKRLESLRELAGKENLEYPSVTLPPQPHTKEGVDAYNEVIARVRTWVNLNLWQKLKLSRDDAKPLLRLKGFPSFPLVERQANEVDWWDMVCNVKKLINEKKEDGKVFWQNLAGYKRQEALRPYLSSEEDRKKGKKFARYQLGDLLLHLEKKHGEDWGKVYDEAWERIDKKVEGLSKHIKLEEERRSEDAQSKAALTDWLRAKASFVIEGSKEADKDEFCRCELKLQKWYGDLRGKPFAIEAENSILDISGFSKQYNCAFIWQKDGVKKLNLYLIINYFKGGKLRFKKIKPEAFEANRFYTVINKKSGEIVPMEVNFNFDDPNLIILPLAFGKRQGREFIWNDLLSLETGSLKLANGRVIEKTLYNRRTRQDEPALFVALTFERREVLDSSNIKPMNLIGVDRGENIPAVIALTDPEGCPLSRFKDSLGNPTHILRIGESYKEKQRTIQAKKEVEQRRAGGYSRKYASKAKNLADDMVRNTARDLLYYAVTQDAMLIFENLSRGFGRQGKRTFMAERQYTRMEDWLTAKLAYEGLPSKTYLSKTLAQYTSKTCSNCGFTITSADYDRVLEKLKKTATGWMTTINGKELKVEGQITYYNRYKRQNVVKDLSVELDRLSEESVNNDISSWTKGRSGEALSLLKKRFSHRPVQEKFVCLNCGFETHADEQAALNIARSWLFLRSQEYKKYQTNKTTGNTDKRAFVETWQSFYRKKLKEVWKPAV

SEQ ID NO: 43823 - protein, 977 aa, synthetic construct
  REGION 1..977: note = engineered CasX variant
QEIKRINKIRRRLVKDSNTKKAGKTGPMKTLLVRVMTPDLRERLENLRKKPENIPQPISNTSRANLNKLLTDYTEMKKAILHVYWEEFQKDPVGLMSRVAQPASKKIDQNKLKPEMDEKGNLTTAGFACSQCGQPLFVYKLEQVSEKGKAYTNYFGRCNVAEHEKLILLAQLKPEKDSDEAVTYSLGKFGQRALDFYSIHVTKESTHPVKPLAQIAGNRYASPVGKALSDACMGTIASFLSKYQDIIIEHQKVVKGNQKRLESLRELAGKENLEYPSVTLPPQPHTKEGVDAYNEVIARVRTWVNLNLWQKLKLSRDDAKPLLRLKGFPSFPLVERQANEVDWWDMVCNVKKLINEKKEDGKVFWQNLAGYKRQEALRPYLSSEEDRKKGKKFARYQLGDLLLHLEKKHGEDWGKVYDEAWERIDKKVEGLSKHIKLEEERRSEDAQSKAALTDWLRAKASFVIEGSKEADKDEFCRCELKLQKWYGDLRGKPFAIEAENSILDISGFSKQYNCAFIWQKDGVKKLNLYLIINYFKGGKLRFKKIKPEAFEANRFYTVINKKSGEIVPMEVNFNFDDPNLIILPLAFGKRQGREFIWNDLLSLETGSLKLANGRVIEKTLYNRRTRQDEPALFVALTFERREVLDSSNIKPMNLIGVDRGENIPAVIALTDPEGCPLSRFKDSLGNPTHILRIGESYKEKQRTIQAKKEVEQRRAGGYSRKYASKAKNLADDMVRNTARDLLYYAVTQDAMLIFENLSRGFGRQGKRTFMAERQYTRMEDWLTAKLAYEGLPSKTYLSKTLAQYTSKTCSNCGFTITSADYDRVLEKLKKTATGWMTTINGKELKVEGQITYYNRYKRQNVVKDLSVELDRLSEESVNNDISSWTKGRSGEALSLLKKRFSHRPVQEKFVCLNCGFETHADEQAALNIARSWLFLRSQEYKKYQTNKTTGNTDKRAFVETWQSFYRKKLKEVWKPAV

SEQ ID NO: 43824 - protein, 979 aa, synthetic construct
  REGION 1..979: note = engineered CasX variant
QEIKRINKIRRRLVKDSNTKKAGKTGPMKTLLVRVMTPDLRERLENLRKKPENIPQPISNTSRANLNKLLTDYTEMKKAILHVYWEEFQKDPVGLMSRVAQPASKKIDQNKLKPEMDEKGNLTTAGFACSQCGQPLFVYKLEQVSEKGKAYTNYFGRCNVAEHEKLILLAQLKPEKDSDEAVTYSLGKFGQRALDFYSIHVTKESTHPVKPLAQIAGNRYASYPVGKALSDACMGTIASFLSKYQDIIIEHQKVVKGNQKRLESLRELAGKENLEYPSVTLPPQPHTKEGVDAYNEVIARVRTWVNLNLWQKLKLSRDDAKPLLRLKGFPSFPLVERQANEVDWWDMVCNVKKLINEKKEDGKVFWQNLAGYKRQEALRPYLSSEEDRKKGKKFARYQLGDLLLHLEKKHGEDWGKVYDEAWERIDKKVEGLSKHIKLEEERRSEDAQSKAALTDWLRAKASFVIEGLKEADDKDEFCRCELKLQKWYGDLRGKPFAIEAENSILDISGFSKQYNCAFIWQKDGVKKLNLYLIINYFKGGKLRFKKIKPEAFEANRFYTVINKKSGEIVPMEVNFNFDDPNLIILPLAFGKRQGREFIWNDLLSLETGSLKLANGRVIEKTLYNRRTRQDEPALFVALTFERREVLDSSNIKPMNLIGVDRGENIPAVIALTDPEGCPLSRFKDSLGNPTHILRIGESYKEKQRTIQAKKEVEQRRAGGYSRKYASKAKNLADDMVRNTARDLLYYAVTQDAMLIFENLSRGFGRQGKRTFMAERQYTRMEDWLTAKLAYEGLPSKTYLSKTLAQYTSKTCSNCGFTITSADYDRVLEKLKKTATGWMTTINGKELKVEGQITYYNRYKRQNVVKDLSVELDRLSEESVNNDISSWTKGRSGEALSLLKKRFSHRPVQEKFVCLNCGFETHADEQAALNIARSWLFLRSQEYKKYQTNKTTGNTDKRAFVETWQSFYRKKLKEVWKPAV

SEQ ID NO: 43825 - protein, 979 aa, synthetic construct
  REGION 1..979: note = engineered CasX variant
QEIKRINKIRRRLVKDSNTKKAGKTGPMKTLLVRVMTPDLRERLENLRKKPENIPQPISNTSRANLNKLLTDYTEMKKAILHVYWEEFQKDPVGLMSRVAQPASKKIDQNKLKPEMDEKGNLTTAGFACSQCGQPLFVYKLEQVSEKGKAYTNYFGRCNVAEHEKLILLAQLKPEKDSDEAVTYSLGKFGQRALDFYSIHVTKESTHPVKPLAQIAGNRYASHPVGKALSDACMGTIASFLSKYQDIIIEHQKVVKGNQKRLESLRELAGKENLEYPSVTLPPQPHTKEGVDAYNEVIARVRTWVNLNLWQKLKLSRDDAKPLLRLKGFPSFPLVERQANEVDWWDMVCNVKKLINEKKEDGKVFWQNLAGYKRQEALRPYLSSEEDRKKGKKFARYQLGDLLLHLEKKHGEDWGKVYDEAWERIDKKVEGLSKHIKLEEERRSEDAQSKAALTDWLRAKASFVIEGLKEADDKDEFCRCELKLQKWYGDLRGKPFAIEAENSILDISGFSKQYNCAFIWQKDGVKKLNLYLIINYFKGGKLRFKKIKPEAFEANRFYTVINKKSGEIVPMEVNFNFDDPNLIILPLAFGKRQGREFIWNDLLSLETGSLKLANGRVIEKTLYNRRTRQDEPALFVALTFERREVLDSSNIKPMNLIGVDRGENIPAVIALTDPEGCPLSRFKDSLGNPTHILRIGESYKEKQRTIQAKKEVEQRRAGGYSRKYASKAKNLADDMVRNTARDLLYYAVTQDAMLIFENLSRGFGRQGKRTFMAERQYTRMEDWLTAKLAYEGLPSKTYLSKTLAQYTSKTCSNCGFTITSADYDRVLEKLKKTATGWMTTINGKELKVEGQITYYNRYKRQNVVKDLSVELDRLSEESVNNDISSWTKGRSGEALSLLKKRFSHRPVQEKFVCLNCGFETHADEQAALNIARSWLFLRSQEYKKYQTNKTTGNTDKRAFVETWQSFYRKKLKEVWKPAV

SEQ ID NO: 43826 - protein, 979 aa, synthetic construct
  REGION 1..979: note = engineered CasX variant
QEIKRINKIRRRLVKDSNTKKAGKTGPMKTLLVRVMTPDLRERLENLRKKPENIPQPISNTSRANLNKLLTDYTEMKKAILHVYWEEFQKDPVGLMSRVAQPASKKIDQNKLKPEMDEKGNLTTAGFACSQCGQPLFVYKLEQVSEKGKAYTNYFGRCNVAEHEKLILLAQLKPEKDSDEAVTYSLGKFGQRALDFYSIHVTKESTHPVKPLAQIAGNRYASSPVGKALSDACMGTIASFLSKYQDIIIEHQKVVKGNQKRLESLRELAGKENLEYPSVTLPPQPHTKEGVDAYNEVIARVRTWVNLNLWQKLKLSRDDAKPLLRLKGFPSFPLVERQANEVDWWDMVCNVKKLINEKKEDGKVFWQNLAGYKRQEALRPYLSSEEDRKKGKKFARYQLGDLLLHLEKKHGEDWGKVYDEAWERIDKKVEGLSKHIKLEEERRSEDAQSKAALTDWLRAKASFVIEGLKEADDKDEFCRCELKLQKWYGDLRGKPFAIEAENSILDISGFSKQYNCAFIWQKDGVKKLNLYLIINYFKGGKLRFKKIKPEAFEANRFYTVINKKSGEIVPMEVNFNFDDPNLIILPLAFGKRQGREFIWNDLLSLETGSLKLANGRVIEKTLYNRRTRQDEPALFVALTFERREVLDSSNIKPMNLIGVDRGENIPAVIALTDPEGCPLSRFKDSLGNPTHILRIGESYKEKQRTIQAKKEVEQRRAGGYSRKYASKAKNLADDMVRNTARDLLYYAVTQDAMLIFENLSRGFGRQGKRTFMAERQYTRMEDWLTAKLAYEGLPSKTYLSKTLAQYTSKTCSNCGFTITSADYDRVLEKLKKTATGWMTTINGKELKVEGQITYYNRYKRQNVVKDLSVELDRLSEESVNNDISSWTKGRSGEALSLLKKRFSHRPVQEKFVCLNCGFETHADEQAALNIARSWLFLRSQEYKKYQTNKTTGNTDKRAFVETWQSFYRKKLKEVWKPAV

SEQ ID NO: 43827 - protein, 979 aa, synthetic construct
  REGION 1..979: note = engineered CasX variant
QEIKRINKIRRRLVKDSNTKKAGKTGPMKTLLVRVMTPDLRERLENLRKKPENIPQPISNTSRANLNKLLTDYTEMKKAILHVYWEEFQKDPVGLMSRVAQPASKKIDQNKLKPEMDEKGNLTTAGFACSQCGQPLFVYKLEQVSEKGKAYTNYFGRCNVAEHEKLILLAQLKPEKDSDEAVTYSLGKFGQRALDFYSIHVTKESTHPVKPLAQIAGNRYASTPVGKALSDACMGTIASFLSKYQDIIIEHQKVVKGNQKRLESLRELAGKENLEYPSVTLPPQPHTKEGVDAYNEVIARVRTWVNLNLWQKLKLSRDDAKPLLRLKGFPSFPLVERQANEVDWWDMVCNVKKLINEKKEDGKVFWQNLAGYKRQEALRPYLSSEEDRKKGKKFARYQLGDLLLHLEKKHGEDWGKVYDEAWERIDKKVEGLSKHIKLEEERRSEDAQSKAALTDWLRAKASFVIEGLKEADDKDEFCRCELKLQKWYGDLRGKPFAIEAENSILDISGFSKQYNCAFIWQKDGVKKLNLYLIINYFKGGKLRFKKIKPEAFEANRFYTVINKKSGEIVPMEVNFNFDDPNLIILPLAFGKRQGREFIWNDLLSLETGSLKLANGRVIEKTLYNRRTRQDEPALFVALTFERREVLDSSNIKPMNLIGVDRGENIPAVIALTDPEGCPLSRFKDSLGNPTHILRIGESYKEKQRTIQAKKEVEQRRAGGYSRKYASKAKNLADDMVRNTARDLLYYAVTQDAMLIFENLSRGFGRQGKRTFMAERQYTRMEDWLTAKLAYEGLPSKTYLSKTLAQYTSKTCSNCGFTITSADYDRVLEKLKKTATGWMTTINGKELKVEGQITYYNRYKRQNVVKDLSVELDRLSEESVNNDISSWTKGRSGEALSLLKKRFSHRPVQEKFVCLNCGFETHADEQAALNIARSWLFLRSQEYKKYQTNKTTGNTDKRAFVETWQSFYRKKLKEVWKPAV

SEQ ID NO: 43828 - protein, 979 aa, synthetic construct
  REGION 1..979: note = engineered CasX variant
QEIKRINKIRRRLVKDSNTKKAGKTGPMKTLLVRVMTPDLRERLENLRKKPENIPQPISNTSRANLNKLLTDYTEMKKAILHVYWEEFQKDPVGLMSRVAQPASKKIDQNKLKPEMDEKGNLTTAGFACSQCGQPLFVYKLEQVSEKGKAYTNYFGRCNVAEHEKLILLAQLKPEKDSDEAVTYSLGKFGQRALDFYSIHVTKESTHPVKPLAQIAGNRYASAPVGKALSDACMGTIASFLSKYQDIIIEHQKVVKGNQKRLESLRELAGKENLEYPSVTLPPQPHTKEGVDAYNEVIARVRTWVNLNLWQKLKLSRDDAKPLLRLKGFPSFPLVERQANEVDWWDMVCNVKKLINEKKEDGKVFWQNLAGYKRQEALRPYLSSEEDRKKGKKFARYQLGDLLLHLEKKHGEDWGKVYDEAWERIDKKVEGLSKHIKLEEERRSEDAQSKAALTDWLRAKASFVIEGLKEADDKDEFCRCELKLQKWYGDLRGKPFAIEAENSILDISGFSKQYNCAFIWQKDGVKKLNLYLIINYFKGGKLRFKKIKPEAFEANRFYTVINKKSGEIVPMEVNFNFDDPNLIILPLAFGKRQGREFIWNDLLSLETGSLKLANGRVIEKTLYNRRTRQDEPALFVALTFERREVLDSSNIKPMNLIGVDRGENIPAVIALTDPEGCPLSRFKDSLGNPTHILRIGESYKEKQRTIQAKKEVEQRRAGGYSRKYASKAKNLADDMVRNTARDLLYYAVTQDAMLIFENLSRGFGRQGKRTFMAERQYTRMEDWLTAKLAYEGLPSKTYLSKTLAQYTSKTCSNCGFTITSADYDRVLEKLKKTATGWMTTINGKELKVEGQITYYNRYKRQNVVKDLSVELDRLSEESVNNDISSWTKGRSGEALSLLKKRFSHRPVQEKFVCLNCGFETHADEQAALNIARSWLFLRSQEYKKYQTNKTTGNTDKRAFVETWQSFYRKKLKEVWKPAV

SEQ ID NO: 43829 - protein, 979 aa, synthetic construct
  REGION 1..979: note = engineered CasX variant
QEIKRINKIRRRLVKDSNTKKAGKTGPMKTLLVRVMTPDLRERLENLRKKPENIPQPISNTSRANLNKLLTDYTEMKKAILHVYWEEFQKDPVGLMSRVAQPASKKIDQNKLKPEMDEKGNLTTAGFACSQCGQPLFVYKLEQVSEKGKAYTNYFGRCNVAEHEKLILLAQLKPEKDSDEAVTYSLGKFGQRALDFYSIHVTKESTHPVKPLAQIAGNRYASVPVGKALSDACMGTIASFLSKYQDIIIEHQKVVKGNQKRLESLRELAGKENLEYPSVTLPPQPHTKEGVDAYNEVIARVRTWVNLNLWQKLKLSRDDAKPLLRLKGFPSFPLVERQANEVDWWDMVCNVKKLINEKKEDGKVFWQNLAGYKRQEALRPYLSSEEDRKKGKKFARYQLGDLLLHLEKKHGEDWGKVYDEAWERIDKKVEGLSKHIKLEEERRSEDAQSKAALTDWLRAKASFVIEGLKEADDKDEFCRCELKLQKWYGDLRGKPFAIEAENSILDISGFSKQYNCAFIWQKDGVKKLNLYLIINYFKGGKLRFKKIKPEAFEANRFYTVINKKSGEIVPMEVNFNFDDPNLIILPLAFGKRQGREFIWNDLLSLETGSLKLANGRVIEKTLYNRRTRQDEPALFVALTFERREVLDSSNIKPMNLIGVDRGENIPAVIALTDPEGCPLSRFKDSLGNPTHILRIGESYKEKQRTIQAKKEVEQRRAGGYSRKYASKAKNLADDMVRNTARDLLYYAVTQDAMLIFENLSRGFGRQGKRTFMAERQYTRMEDWLTAKLAYEGLPSKTYLSKTLAQYTSKTCSNCGFTITSADYDRVLEKLKKTATGWMTTINGKELKVEGQITYYNRYKRQNVVKDLSVELDRLSEESVNNDISSWTKGRSGEALSLLKKRFSHRPVQEKFVCLNCGFETHADEQAALNIARSWLFLRSQEYKKYQTNKTTGNTDKRAFVETWQSFYRKKLKEVWKPAV

SEQ ID NO: 43830 - protein, 979 aa, synthetic construct
  REGION 1..979: note = engineered CasX variant
QEIKRINKIRRRLVKDSNTKKAGKTGPMKTLLVRVMTPDLRERLENLRKKPENIPQPISNTSRANLNKLLTDYTEMKKAILHVYWEEFQKDPVGLMSRVAQPASKKIDQNKLKPEMDEKGNLTTAGFACSQCGQPLFVYKLEQVSEKGKAYTNYFGRCNVAEHEKLIKLAQLKPEKDSDEAVTYSLGKFGQRALDFYSIHVTKESTHPVKPLAQIAGNRYASGPVGKALSDACMGTIASFLSKYQDIIIEHQKVVKGNQKRLESLRELAGKENLEYPSVTLPPQPHTKEGVDAYNEVIARVRTWVNLNLWQKLKLSRDDAKPLLRLKGFPSFPLVERQANEVDWWDMVCNVKKLINEKKEDGKVFWQNLAGYKRQEALRPYLSSEEDRKKGKKFARYQLGDLLLHLEKKHGEDWGKVYDEAWERIDKKVEGLSKHIKLEEERRSEDAQSKAALTDWLRAKASFVIEGLKEADDKDEFCRCELKLQKWYGDLRGKPFAIEAENSILDISGFSKQYNCAFIWQKDGVKKLNLYLIINYFKGGKLRFKKIKPEAFEANRFYTVINKKSGEIVPMEVNFNFDDPNLIILPLAFGKRQGREFIWNDLLSLETGSLKLANGRVIEKTLYNRRTRQDEPALFVALTFERREVLDSSNIKPMNLIGVDRGENIPAVIALTDPEGCPLSRFKDSLGNPTHILRIGESYKEKQRTIQAKKEVEQRRAGGYSRKYASKAKNLADDMVRNTARDLLYYAVTQDAMLIFENLSRGFGRQGKRTFMAERQYTRMEDWLTAKLAYEGLPSKTYLSKTLAQYTSKTCSNCGFTITSADYDRVLEKLKKTATGWMTTINGKELKVEGQITYYNRYKRQNVVKDLSVELDRLSEESVNNDISSWTKGRSGEALSLLKKRFSHRPVQEKFVCLNCGFETHADEQAALNIARSWLFLRSQEYKKYQTNKTTGNTDKRAFVETWQSFYRKKLKEVWKPAV

SEQ ID NO: 43831 - protein, 978 aa, synthetic construct
  REGION 1..978: note = engineered CasX variant
QEIKRINKIRRRLVKDSNTKKAGKTGPMKTLLVRVMTPDLRERLENLRKKPENIPQPISNTSRANLNKLLTDYTEMKKAILHVYWEEFQKDPVGLMSRVAQPASKKIDQNKLKPEMDEKGNLTTAGFACSQCGQPLFVYKLEQVSEKGKAYTNYFGRCNVAEHEKLILLAQLKPEKDSDEAVTYSLGKFGQRALDFYSIHVTKESTHPVKPLAQIAGNRYASPVGKALSDACMGTIASFLSKYQDIIIEHQKVVKGNQKRLESLRELAGKENLEYPSVTLPPQPHTKEGVDAYNEVIARVRTWVNLNLWQKLKLSRDDAKPLLRLKGFPSFPLVERQANEVDWWDMVCNVKKLINEKKEDGKVFWQNLAGYKRQEALRPYLSSEEDRKKGKKFARYQLGDLLLHLEKKHGEDWGKVYDEAWERIDKKVEGLSKHIKLEEERRSEDAQSKAALTDWLRAKASFVIEGLKEADDKDEFCRCELKLQKWYGDLRGKPFAIEAENSILDISGFSKQYNCAFIWQKDGVKKLNLYLIINYFKGGKLRFKKIKPEAFEANRFYTVINKKSGEIVPMEVNFNFDDPNLIILPLAFGKRQGREFIWNDLLSLETGSLKLANGRVIEKTLYNRRTRQDEPALFVALTFERREVLDSSNIKPMNLIGVDRGENIPAVIALTDPEGCPLSRFKDSLGNPTHILRIGESYKEKQRTIQAKKEVEQRRAGGYSRKYASKAKNLADDMVRNTARDLLYYAVTQDAMLIFENLSRGFGRQGKRTFMAERQYTRMEDWLTAKLAYEGLPSKTYLSKTLAQYTSKTCSNCGFTITSADYDRVLEKLKKTATGWMTTINGKELKVEGQITYYNRYKRQNVVKDLSVELDRLSEESVNNDISSWTKGRSGEALSLLKKRFSHRPVQEKFVCLNCGFETHADEQAALNIARSWLFLRSQEYKKYQTNKTTGNTDKRAFVETWQSFYRKKLKEVWKPAV

SEQ ID NO: 43832 - protein, 979 aa, synthetic construct
  REGION 1..979: note = engineered CasX variant
QEIKRINKIRRRLVKDSNTKKAGKTGPMKTLLVRVMTPDLRERLENLRKKPENIPQPISNTSRANLNKLLTDYTEMKKAILHVYWEEFQKDPVGLMSRVAQPASKKIDQNKLKPEMDEKGNLTTAGFACSQCGQPLFVYKLEQVSEKGKAYTNYFGRCNVAEHEKLILLAQLKPEKDSDEAVTYSLGKFGQRALDFYSIHVTKESTHPVKPLAQIAGNRYASYPVGKALSDACMGTIASFLSKYQDIIIEHQKVVKGNQKRLESLRELAGKENLEYPSVTLPPQPHTKEGVDAYNEVIARVRTWVNLNLWQKLKLSRDDAKPLLRLKGFPSFPLVERQANEVDWWDMVCNVKKLINEKKEDGKVFWQNLAGYKRQEALRPYLSSEEDRKKGKKFARYQLGDLLLHLEKKHGEDWGKVYDEAWERIDKKVEGLSKHIKLEEERRSEDAQSKAALTDWLRAKASFVIEGLKEADKDEFCRCELKLQKWYGDLRGKPFAIEAENSILDISGFSKQYNCAFIWQKDGVKKLNLYLIINYFKGGKLRFKKIKPEAFEANRFYTVINKKSGEIVPMEVNFNFDDPNLIILPLAFGKRQGREFIWNDLLSLETGSLKLANGRVIEKTLYNRRTRQDEPALFVALTFERREVLDSSNIKPMNLIGVDRGENIPAVIALTDPEGCPLSRFKDSLGNPTHILRIGESYKEKQRTIQAKKEVEQRRAGGYSRKYASKAKNLADDMVRNTARDLLYYAVTQDAMLIFENLSRGFGRQGKRTFMAERQYTRMEDWLTAKLAYEGLPSKTYLSKTLAQYTSKTCSNCGFTITSADYDRVLEKLKKTATGWMTTINGKELKVEGQITYYNRYKRQNVVKDLSVELDRLSEESVNNDISSWTKGRSGNEALSLLKKRFSHRPVQEKFVCLNCGFETHADEQAALNIARSWLFLRSQEYKKYQTNKTTGNTDKRAFVETWQSFYRKKLKEVWKPAV

SEQ ID NO: 43833 - protein, 979 aa, synthetic construct
  REGION 1..979: note = engineered CasX variant
QEIKRINKIRRRLVKDSNTKKAGKTGPMKTLLVRVMTPDLRERLENLRKKPENIPQPISNTSRANLNKLLTDYTEMKKAILHVYWEEFQKDPVGLMSRVAQPASKKIDQNKLKPEMDEKGNLTTAGFACSQCGQPLFVYKLEQVSEKGKAYTNYFGRCNVAEHEKLILLAQLKPEKDSDEAVTYSLGKFGQRALDFYSIHVTKESTHPVKPLAQIAGNRYASHPVGKALSDACMGTIASFLSKYQDIIIEHQKVVKGNQKRLESLRELAGKENLEYPSVTLPPQPHTKEGVDAYNEVIARVRTWVNLNLWQKLKLSRDDAKPLLRLKGFPSFPLVERQANEVDWWDMVCNVKKLINEKKEDGKVFWQNLAGYKRQEALRPYLSSEEDRKKGKKFARYQLGDLLLHLEKKHGEDWGKVYDEAWERIDKKVEGLSKHIKLEEERRSEDAQSKAALTDWLRAKASFVIEGLKEADKDEFCRCELKLQKWYGDLRGKPFAIEAENSILDISGFSKQYNCAFIWQKDGVKKLNLYLIINYFKGGKLRFKKIKPEAFEANRFYTVINKKSGEIVPMEVNFNFDDPNLIILPLAFGKRQGREFIWNDLLSLETGSLKLANGRVIEKTLYNRRTRQDEPALFVALTFERREVLDSSNIKPMNLIGVDRGENIPAVIALTDPEGCPLSRFKDSLGNPTHILRIGESYKEKQRTIQAKKEVEQRRAGGYSRKYASKAKNLADDMVRNTARDLLYYAVTQDAMLIFENLSRGFGRQGKRTFMAERQYTRMEDWLTAKLAYEGLPSKTYLSKTLAQYTSKTCSNCGFTITSADYDRVLEKLKKTATGWMTTINGKELKVEGQITYYNRYKRQNVVKDLSVELDRLSEESVNNDISSWTKGRSGNEALSLLKKRFSHRPVQEKFVCLNCGFETHADEQAALNIARSWLFLRSQEYKKYQTNKTTGNTDKRAFVETWQSFYRKKLKEVWKPAV

SEQ ID NO: 43834 - protein, 979 aa, synthetic construct
  REGION 1..979: note = engineered CasX variant
QEIKRINKIRRRLVKDSNTKKAGKTGPMKTLLVRVMTPDLRERLENLRKKPENIPQPISNTSRANLNKLLTDYTEMKKAILHVYWEEFQKDPVGLMSRVAQPASKKIDQNKLKPEMDEKGNLTTAGFACSQCGQPLFVYKLEQVSEKGKAYTNYFGRCNVAEHEKLILLAQLKPEKDSDEAVTYSLGKFGQRALDFYSIHVTKESTHPVKPLAQIAGNRYASSPVGKALSDACMGTIASFLSKYQDIIIEHQKVVKGNQKRLESLRELAGKENLEYPSVTLPPQPHTKEGVDAYNEVIARVRTWVNLNLWQKLKLSRDDAKPLLRLKGFPSFPLVERQANEVDWWDMVCNVKKLINEKKEDGKVFWQNLAGYKRQEALRPYLSSEEDRKKGKKFARYQLGDLLLHLEKKHGEDWGKVYDEAWERIDKKVEGLSKHIKLEEERRSEDAQSKAALTDWLRAKASFVIEGLKEADKDEFCRCELKLQKWYGDLRGKPFAIEAENSILDISGFSKQYNCAFIWQKDGVKKLNLYLIINYFKGGKLRFKKIKPEAFEANRFYTVINKKSGEIVPMEVNFNFDDPNLIILPLAFGKRQGREFIWNDLLSLETGSLKLANGRVIEKTLYNRRTRQDEPALFVALTFERREVLDSSNIKPMNLIGVDRGENIPAVIALTDPEGCPLSRFKDSLGNPTHILRIGESYKEKQRTIQAKKEVEQRRAGGYSRKYASKAKNLADDMVRNTARDLLYYAVTQDAMLIFENLSRGFGRQGKRTFMAERQYTRMEDWLTAKLAYEGLPSKTYLSKTLAQYTSKTCSNCGFTITSADYDRVLEKLKKTATGWMTTINGKELKVEGQITYYNRYKRQNVVKDLSVELDRLSEESVNNDISSWTKGRSGNEALSLLKKRFSHRPVQEKFVCLNCGFETHADEQAALNIARSWLFLRSQEYKKYQTNKTTGNTDKRAFVETWQSFYRKKLKEVWKPAV

SEQ ID NO: 43835 - protein, 979 aa, synthetic construct
  REGION 1..979: note = engineered CasX variant
QEIKRINKIRRRLVKDSNTKKAGKTGPMKTLLVRVMTPDLRERLENLRKKPENIPQPISNTSRANLNKLLTDYTEMKKAILHVYWEEFQKDPVGLMSRVAQPASKKIDQNKLKPEMDEKGNLTTAGFACSQCGQPLFVYKLEQVSEKGKAYTNYFGRCNVAEHEKLILLAQLKPEKDSDEAVTYSLGKFGQRALDFYSIHVTKESTHPVKPLAQIAGNRYASTPVGKALSDACMGTIASFLSKYQDIIIEHQKVVKGNQKRLESLRELAGKENLEYPSVTLPPQPHTKEGVDAYNEVIARVRTWVNLNLWQKLKLSRDDAKPLLRLKGFPSFPLVERQANEVDWWDMVCNVKKLINEKKEDGKVFWQNLAGYKRQEALRPYLSSEEDRKKGKKFARYQLGDLLLHLEKKHGEDWGKVYDEAWERIDKKVEGLSKHIKLEEERRSEDAQSKAALTDWLRAKASFVIEGLKEADKDEFCRCELKLQKWYGDLRGKPFAIEAENSILDISGFSKQYNCAFIWQKDGVKKLNLYLIINYFKGGKLRFKKIKPEAFEANRFYTVINKKSGEIVPMEVNFNFDDPNLIILPLAFGKRQGREFIWNDLLSLETGSLKLANGRVIEKTLYNRRTRQDEPALFVALTFERREVLDSSNIKPMNLIGVDRGENIPAVIALTDPEGCPLSRFKDSLGNPTHILRIGESYKEKQRTIQAKKEVEQRRAGGYSRKYASKAKNLADDMVRNTARDLLYYAVTQDAMLIFENLSRGFGRQGKRTFMAERQYTRMEDWLTAKLAYEGLPSKTYLSKTLAQYTSKTCSNCGFTITSADYDRVLEKLKKTATGWMTTINGKELKVEGQITYYNRYKRQNVVKDLSVELDRLSEESVNNDISSWTKGRSGNEALSLLKKRFSHRPVQEKFVCLNCGFETHADEQAALNIARSWLFLRSQEYKKYQTNKTTGNTDKRAFVETWQSFYRKKLKEVWKPAV

SEQ ID NO: 43836 - protein, 979 aa, synthetic construct
  REGION 1..979: note = engineered CasX variant
QEIKRINKIRRRLVKDSNTKKAGKTGPMKTLLVRVMTPDLRERLENLRKKPENIPQPISNTSRANLNKLLTDYTEMKKAILHVYWEEFQKDPVGLMSRVAQPASKKIDQNKLKPEMDEKGNLTTAGFACSQCGQPLFVYKLEQVSEKGKAYTNYFGRCNVAEHEKLILLAQLKPEKDSDEAVTYSLGKFGQRALDFYSIHVTKESTHPVKPLAQIAGNRYASAPVGKALSDACMGTIASFLSKYQDIIIEHQKVVKGNQKRLESLRELAGKENLEYPSVTLPPQPHTKEGVDAYNEVIARVRTWVNLNLWQKLKLSRDDAKPLLRLKGFPSFPLVERQANEVDWWDMVCNVKKLINEKKEDGKVFWQNLAGYKRQEALRPYLSSEEDRKKGKKFARYQLGDLLLHLEKKHGEDWGKVYDEAWERIDKKVEGLSKHIKLEEERRSEDAQSKAALTDWLRAKASFVIEGLKEADKDEFCRCELKLQKWYGDLRGKPFAIEAENSILDISGFSKQYNCAFIWQKDGVKKLNLYLIINYFKGGKLRFKKIKPEAFEANRFYTVINKKSGEIVPMEVNFNFDDPNLIILPLAFGKRQGREFIWNDLLSLETGSLKLANGRVIEKTLYNRRTRQDEPALFVALTFERREVLDSSNIKPMNLIGVDRGENIPAVIALTDPEGCPLSRFKDSLGNPTHILRIGESYKEKQRTIQAKKEVEQRRAGGYSRKYASKAKNLADDMVRNTARDLLYYAVTQDAMLIFENLSRGFGRQGKRTFMAERQYTRMEDWLTAKLAYEGLPSKTYLSKTLAQYTSKTCSNCGFTITSADYDRVLEKLKKTATGWMTTINGKELKVEGQITYYNRYKRQNVVKDLSVELDRLSEESVNNDISSWTKGRSGNEALSLLKKRFSHRPVQEKFVCLNCGFETHADEQAALNIARSWLFLRSQEYKKYQTNKTTGNTDKRAFVETWQSFYRKKLKEVWKPAV

SEQ ID NO: 43837 - protein, 979 aa, synthetic construct
  REGION 1..979: note = engineered CasX variant
QEIKRINKIRRRLVKDSNTKKAGKTGPMKTLLVRVMTPDLRERLENLRKKPENIPQPISNTSRANLNKLLTDYTEMKKAILHVYWEEFQKDPVGLMSRVAQPASKKIDQNKLKPEMDEKGNLTTAGFACSQCGQPLFVYKLEQVSEKGKAYTNYFGRCNVAEHEKLILLAQLKPEKDSDEAVTYSLGKFGQRALDFYSIHVTKESTHPVKPLAQIAGNRYASVPVGKALSDACMGTIASFLSKYQDIIIEHQKVVKGNQKRLESLRELAGKENLEYPSVTLPPQPHTKEGVDAYNEVIARVRTWVNLNLWQKLKLSRDDAKPLLRLKGFPSFPLVERQANEVDWWDMVCNVKKLINEKKEDGKVFWQNLAGYKRQEALRPYLSSEEDRKKGKKFARYQLGDLLLHLEKKHGEDWGKVYDEAWERIDKKVEGLSKHIKLEEERRSEDAQSKAALTDWLRAKASFVIEGLKEADKDEFCRCELKLQKWYGDLRGKPFAIEAENSILDISGFSKQYNCAFIWQKDGVKKLNLYLIINYFKGGKLRFKKIKPEAFEANRFYTVINKKSGEIVPMEVNFNFDDPNLIILPLAFGKRQGREFIWNDLLSLETGSLKLANGRVIEKTLYNRRTRQDEPALFVALTFERREVLDSSNIKPMNLIGVDRGENIPAVIALTDPEGCPLSRFKDSLGNPTHILRIGESYKEKQRTIQAKKEVEQRRAGGYSRKYASKAKNLADDMVRNTARDLLYYAVTQDAMLIFENLSRGFGRQGKRTFMAERQYTRMEDWLTAKLAYEGLPSKTYLSKTLAQYTSKTCSNCGFTITSADYDRVLEKLKKTATGWMTTINGKELKVEGQITYYNRYKRQNVVKDLSVELDRLSEESVNNDISSWTKGRSGNEALSLLKKRFSHRPVQEKFVCLNCGFETHADEQAALNIARSWLFLRSQEYKKYQTNKTTGNTDKRAFVETWQSFYRKKLKEVWKPAV

SEQ ID NO: 43838 - protein, 979 aa, synthetic construct
  REGION 1..979: note = engineered CasX variant
QEIKRINKIRRRLVKDSNTKKAGKTGPMKTLLVRVMTPDLRERLENLRKKPENIPQPISNTSRANLNKLLTDYTEMKKAILHVYWEEFQKDPVGLMSRVAQPASKKIDQNKLKPEMDEKGNLTTAGFACSQCGQPLFVYKLEQVSEKGKAYTNYFGRCNVAEHEKLIKLAQLKPEKDSDEAVTYSLGKFGQRALDFYSIHVTKESTHPVKPLAQIAGNRYASGPVGKALSDACMGTIASFLSKYQDIIIEHQKVVKGNQKRLESLRELAGKENLEYPSVTLPPQPHTKEGVDAYNEVIARVRTWVNLNLWQKLKLSRDDAKPLLRLKGFPSFPLVERQANEVDWWDMVCNVKKLINEKKEDGKVFWQNLAGYKRQEALRPYLSSEEDRKKGKKFARYQLGDLLLHLEKKHGEDWGKVYDEAWERIDKKVEGLSKHIKLEEERRSEDAQSKAALTDWLRAKASFVIEGLKEADKDEFCRCELKLQKWYGDLRGKPFAIEAENSILDISGFSKQYNCAFIWQKDGVKKLNLYLIINYFKGGKLRFKKIKPEAFEANRFYTVINKKSGEIVPMEVNFNFDDPNLIILPLAFGKRQGREFIWNDLLSLETGSLKLANGRVIEKTLYNRRTRQDEPALFVALTFERREVLDSSNIKPMNLIGVDRGENIPAVIALTDPEGCPLSRFKDSLGNPTHILRIGESYKEKQRTIQAKKEVEQRRAGGYSRKYASKAKNLADDMVRNTARDLLYYAVTQDAMLIFENLSRGFGRQGKRTFMAERQYTRMEDWLTAKLAYEGLPSKTYLSKTLAQYTSKTCSNCGFTITSADYDRVLEKLKKTATGWMTTINGKELKVEGQITYYNRYKRQNVVKDLSVELDRLSEESVNNDISSWTKGRSGNEALSLLKKRFSHRPVQEKFVCLNCGFETHADEQAALNIARSWLFLRSQEYKKYQTNKTTGNTDKRAFVETWQSFYRKKLKEVWKPAV

SEQ ID NO: 43839 - protein, 978 aa, synthetic construct
  REGION 1..978: note = engineered CasX variant
QEIKRINKIRRRLVKDSNTKKAGKTGPMKTLLVRVMTPDLRERLENLRKKPENIPQPISNTSRANLNKLLTDYTEMKKAILHVYWEEFQKDPVGLMSRVAQPASKKIDQNKLKPEMDEKGNLTTAGFACSQCGQPLFVYKLEQVSEKGKAYTNYFGRCNVAEHEKLILLAQLKPEKDSDEAVTYSLGKFGQRALDFYSIHVTKESTHPVKPLAQIAGNRYASPVGKALSDACMGTIASFLSKYQDIIIEHQKVVKGNQKRLESLRELAGKENLEYPSVTLPPQPHTKEGVDAYNEVIARVRTWVNLNLWQKLKLSRDDAKPLLRLKGFPSFPLVERQANEVDWWDMVCNVKKLINEKKEDGKVFWQNLAGYKRQEALRPYLSSEEDRKKGKKFARYQLGDLLLHLEKKHGEDWGKVYDEAWERIDKKVEGLSKHIKLEEERRSEDAQSKAALTDWLRAKASFVIEGLKEADKDEFCRCELKLQKWYGDLRGKPFAIEAENSILDISGFSKQYNCAFIWQKDGVKKLNLYLIINYFKGGKLRFKKIKPEAFEANRFYTVINKKSGEIVPMEVNFNFDDPNLIILPLAFGKRQGREFIWNDLLSLETGSLKLANGRVIEKTLYNRRTRQDEPALFVALTFERREVLDSSNIKPMNLIGVDRGENIPAVIALTDPEGCPLSRFKDSLGNPTHILRIGESYKEKQRTIQAKKEVEQRRAGGYSRKYASKAKNLADDMVRNTARDLLYYAVTQDAMLIFENLSRGFGRQGKRTFMAERQYTRMEDWLTAKLAYEGLPSKTYLSKTLAQYTSKTCSNCGFTITSADYDRVLEKLKKTATGWMTTINGKELKVEGQITYYNRYKRQNVVKDLSVELDRLSEESVNNDISSWTKGRSGNEALSLLKKRFSHRPVQEKFVCLNCGFETHADEQAALNIARSWLFLRSQEYKKYQTNKTTGNTDKRAFVETWQSFYRKKLKEVWKPAV

SEQ ID NO: 43840 - protein, 978 aa, synthetic construct
  REGION 1..978: note = engineered CasX variant
QEIKRINKIRRRLVKDSNTKKAGKTGPMKTLLVRVMTPDLRERLENLRKKPENIPQPISNTSRANLNKLLTDYTEMKKAILHVYWEEFQKDPVGLMSRVAQPASKKIDQNKLKPEMDEKGNLTTAGFACSQCGQPLFVYKLEQVSEKGKAYTNYFGRCNVAEHEKLILLAQLKPEKDSDEAVTYSLGKFGQRALDFYSIHVTKESTHPVKPLAQIAGNRYASYPVGKALSDACMGTIASFLSKYQDIIIEHQKVVKGNQKRLESLRELAGKENLEYPSVTLPPQPHTKEGVDAYNEVIARVRTWVNLNLWQKLKLSRDDAKPLLRLKGFPSFPLVERQANEVDWWDMVCNVKKLINEKKEDGKVFWQNLAGYKRQEALRPYLSSEEDRQKGKKFARYQLGDLLLHLEKKHGEDWGKVYDEAWERIDKKVEGLSKHIKLEEERRSEDAQSKAALTDWLRAKASFVIEGLKEADKDEFCRCELKLQKWYGDLRGKPFAIEAENSILDISGFSKQYNCAFIWQKDGVKKLNLYLIINYFKGGKLRFKKIKPEAFEANRFYTVINKKSGEIVPMEVNFNFDDPNLIILPLAFGKRQGREFIWNDLLSLETGSLKLANGRVIEKTLYNRRTRQDEPALFVALTFERREVLDSSNIKPMNLIGVDRGENIPAVIALTDPEGCPLSRFKDSLGNPTHILRIGESYKEKQRTIQAKKEVEQRRAGGYSRKYASKAKNLADDMVRNTARDLLYYAVTQDAMLIFENLSRGFGRQGKRTFMAERQYTRMEDWLTAKLAYEGLPSKTYLSKTLAQYTSKTCSNCGFTITSADYDRVLEKLKKTATGWMTTINGKELKVEGQITYYNRYKRQNVVKDLSVELDRLSEESVNNDISSWTKGRSGEALSLLKKRFSHRPVQEKFVCLNCGFETHADEQAALNIARSWLFLRSQEYKKYQTNKTTGNTDKRAFVETWQSFYRKKLKEVWKPAV

SEQ ID NO: 43841 - protein, 978 aa, synthetic construct
  REGION 1..978: note = engineered CasX variant
QEIKRINKIRRRLVKDSNTKKAGKTGPMKTLLVRVMTPDLRERLENLRKKPENIPQPISNTSRANLNKLLTDYTEMKKAILHVYWEEFQKDPVGLMSRVAQPASKKIDQNKLKPEMDEKGNLTTAGFACSQCGQPLFVYKLEQVSEKGKAYTNYFGRCNVAEHEKLILLAQLKPEKDSDEAVTYSLGKFGQRALDFYSIHVTKESTHPVKPLAQIAGNRYASHPVGKALSDACMGTIASFLSKYQDIIIEHQKVVKGNQKRLESLRELAGKENLEYPSVTLPPQPHTKEGVDAYNEVIARVRTWVNLNLWQKLKLSRDDAKPLLRLKGFPSFPLVERQANEVDWWDMVCNVKKLINEKKEDGKVFWQNLAGYKRQEALRPYLSSEEDRQKGKKFARYQLGDLLLHLEKKHGEDWGKVYDEAWERIDKKVEGLSKHIKLEEERRSEDAQSKAALTDWLRAKASFVIEGLKEADKDEFCRCELKLQKWYGDLRGKPFAIEAENSILDISGFSKQYNCAFIWQKDGVKKLNLYLIINYFKGGKLRFKKIKPEAFEANRFYTVINKKSGEIVPMEVNFNFDDPNLIILPLAFGKRQGREFIWNDLLSLETGSLKLANGRVIEKTLYNRRTRQDEPALFVALTFERREVLDSSNIKPMNLIGVDRGENIPAVIALTDPEGCPLSRFKDSLGNPTHILRIGESYKEKQRTIQAKKEVEQRRAGGYSRKYASKAKNLADDMVRNTARDLLYYAVTQDAMLIFENLSRGFGRQGKRTFMAERQYTRMEDWLTAKLAYEGLPSKTYLSKTLAQYTSKTCSNCGFTITSADYDRVLEKLKKTATGWMTTINGKELKVEGQITYYNRYKRQNVVKDLSVELDRLSEESVNNDISSWTKGRSGEALSLLKKRFSHRPVQEKFVCLNCGFETHADEQAALNIARSWLFLRSQEYKKYQTNKTTGNTDKRAFVETWQSFYRKKLKEVWKPAV

SEQ ID NO: 43842 - protein, 978 aa, synthetic construct
  REGION 1..978: note = engineered CasX variant
QEIKRINKIRRRLVKDSNTKKAGKTGPMKTLLVRVMTPDLRERLENLRKKPENIPQPISNTSRANLNKLLTDYTEMKKAILHVYWEEFQKDPVGLMSRVAQPASKKIDQNKLKPEMDEKGNLTTAGFACSQCGQPLFVYKLEQVSEKGKAYTNYFGRCNVAEHEKLILLAQLKPEKDSDEAVTYSLGKFGQRALDFYSIHVTKESTHPVKPLAQIAGNRYASSPVGKALSDACMGTIASFLSKYQDIIIEHQKVVKGNQKRLESLRELAGKENLEYPSVTLPPQPHTKEGVDAYNEVIARVRTWVNLNLWQKLKLSRDDAKPLLRLKGFPSFPLVERQANEVDWWDMVCNVKKLINEKKEDGKVFWQNLAGYKRQEALRPYLSSEEDRQKGKKFARYQLGDLLLHLEKKHGEDWGKVYDEAWERIDKKVEGLSKHIKLEEERRSEDAQSKAALTDWLRAKASFVIEGLKEADKDEFCRCELKLQKWYGDLRGKPFAIEAENSILDISGFSKQYNCAFIWQKDGVKKLNLYLIINYFKGGKLRFKKIKPEAFEANRFYTVINKKSGEIVPMEVNFNFDDPNLIILPLAFGKRQGREFIWNDLLSLETGSLKLANGRVIEKTLYNRRTRQDEPALFVALTFERREVLDSSNIKPMNLIGVDRGENIPAVIALTDPEGCPLSRFKDSLGNPTHILRIGESYKEKQRTIQAKKEVEQRRAGGYSRKYASKAKNLADDMVRNTARDLLYYAVTQDAMLIFENLSRGFGRQGKRTFMAERQYTRMEDWLTAKLAYEGLPSKTYLSKTLAQYTSKTCSNCGFTITSADYDRVLEKLKKTATGWMTTINGKELKVEGQITYYNRYKRQNVVKDLSVELDRLSEESVNNDISSWTKGRSGEALSLLKKRFSHRPVQEKFVCLNCGFETHADEQAALNIARSWLFLRSQEYKKYQTNKTTGNTDKRAFVETWQSFYRKKLKEVWKPAV

SEQ ID NO: 43843 - protein, 978 aa, synthetic construct
  REGION 1..978: note = engineered CasX variant
QEIKRINKIRRRLVKDSNTKKAGKTGPMKTLLVRVMTPDLRERLENLRKKPENIPQPISNTSRANLNKLLTDYTEMKKAILHVYWEEFQKDPVGLMSRVAQPASKKIDQNKLKPEMDEKGNLTTAGFACSQCGQPLFVYKLEQVSEKGKAYTNYFGRCNVAEHEKLILLAQLKPEKDSDEAVTYSLGKFGQRALDFYSIHVTKESTHPVKPLAQIAGNRYASTPVGKALSDACMGTIASFLSKYQDIIIEHQKVVKGNQKRLESLRELAGKENLEYPSVTLPPQPHTKEGVDAYNEVIARVRTWVNLNLWQKLKLSRDDAKPLLRLKGFPSFPLVERQANEVDWWDMVCNVKKLINEKKEDGKVFWQNLAGYKRQEALRPYLSSEEDRQKGKKFARYQLGDLLLHLEKKHGEDWGKVYDEAWERIDKKVEGLSKHIKLEEERRSEDAQSKAALTDWLRAKASFVIEGLKEADKDEFCRCELKLQKWYGDLRGKPFAIEAENSILDISGFSKQYNCAFIWQKDGVKKLNLYLIINYFKGGKLRFKKIKPEAFEANRFYTVINKKSGEIVPMEVNFNFDDPNLIILPLAFGKRQGREFIWNDLLSLETGSLKLANGRVIEKTLYNRRTRQDEPALFVALTFERREVLDSSNIKPMNLIGVDRGENIPAVIALTDPEGCPLSRFKDSLGNPTHILRIGESYKEKQRTIQAKKEVEQRRAGGYSRKYASKAKNLADDMVRNTARDLLYYAVTQDAMLIFENLSRGFGRQGKRTFMAERQYTRMEDWLTAKLAYEGLPSKTYLSKTLAQYTSKTCSNCGFTITSADYDRVLEKLKKTATGWMTTINGKELKVEGQITYYNRYKRQNVVKDLSVELDRLSEESVNNDISSWTKGRSGEALSLLKKRFSHRPVQEKFVCLNCGFETHADEQAALNIARSWLFLRSQEYKKYQTNKTTGNTDKRAFVETWQSFYRKKLKEVWKPAV

SEQ ID NO: 43844 - protein, 978 aa, synthetic construct
  REGION 1..978: note = engineered CasX variant
QEIKRINKIRRRLVKDSNTKKAGKTGPMKTLLVRVMTPDLRERLENLRKKPENIPQPISNTSRANLNKLLTDYTEMKKAILHVYWEEFQKDPVGLMSRVAQPASKKIDQNKLKPEMDEKGNLTTAGFACSQCGQPLFVYKLEQVSEKGKAYTNYFGRCNVAEHEKLILLAQLKPEKDSDEAVTYSLGKFGQRALDFYSIHVTKESTHPVKPLAQIAGNRYASAPVGKALSDACMGTIASFLSKYQDIIIEHQKVVKGNQKRLESLRELAGKENLEYPSVTLPPQPHTKEGVDAYNEVIARVRTWVNLNLWQKLKLSRDDAKPLLRLKGFPSFPLVERQANEVDWWDMVCNVKKLINEKKEDGKVFWQNLAGYKRQEALRPYLSSEEDRQKGKKFARYQLGDLLLHLEKKHGEDWGKVYDEAWERIDKKVEGLSKHIKLEEERRSEDAQSKAALTDWLRAKASFVIEGLKEADKDEFCRCELKLQKWYGDLRGKPFAIEAENSILDISGFSKQYNCAFIWQKDGVKKLNLYLIINYFKGGKLRFKKIKPEAFEANRFYTVINKKSGEIVPMEVNFNFDDPNLIILPLAFGKRQGREFIWNDLLSLETGSLKLANGRVIEKTLYNRRTRQDEPALFVALTFERREVLDSSNIKPMNLIGVDRGENIPAVIALTDPEGCPLSRFKDSLGNPTHILRIGESYKEKQRTIQAKKEVEQRRAGGYSRKYASKAKNLADDMVRNTARDLLYYAVTQDAMLIFENLSRGFGRQGKRTFMAERQYTRMEDWLTAKLAYEGLPSKTYLSKTLAQYTSKTCSNCGFTITSADYDRVLEKLKKTATGWMTTINGKELKVEGQITYYNRYKRQNVVKDLSVELDRLSEESVNNDISSWTKGRSGEALSLLKKRFSHRPVQEKFVCLNCGFETHADEQAALNIARSWLFLRSQEYKKYQTNKTTGNTDKRAFVETWQSFYRKKLKEVWKPAV

SEQ ID NO: 43845 - protein, 978 aa, synthetic construct
  REGION 1..978: note = engineered CasX variant
QEIKRINKIRRRLVKDSNTKKAGKTGPMKTLLVRVMTPDLRERLENLRKKPENIPQPISNTSRANLNKLLTDYTEMKKAILHVYWEEFQKDPVGLMSRVAQPASKKIDQNKLKPEMDEKGNLTTAGFACSQCGQPLFVYKLEQVSEKGKAYTNYFGRCNVAEHEKLILLAQLKPEKDSDEAVTYSLGKFGQRALDFYSIHVTKESTHPVKPLAQIAGNRYASVPVGKALSDACMGTIASFLSKYQDIIIEHQKVVKGNQKRLESLRELAGKENLEYPSVTLPPQPHTKEGVDAYNEVIARVRTWVNLNLWQKLKLSRDDAKPLLRLKGFPSFPLVERQANEVDWWDMVCNVKKLINEKKEDGKVFWQNLAGYKRQEALRPYLSSEEDRQKGKKFARYQLGDLLLHLEKKHGEDWGKVYDEAWERIDKKVEGLSKHIKLEEERRSEDAQSKAALTDWLRAKASFVIEGLKEADKDEFCRCELKLQKWYGDLRGKPFAIEAENSILDISGFSKQYNCAFIWQKDGVKKLNLYLIINYFKGGKLRFKKIKPEAFEANRFYTVINKKSGEIVPMEVNFNFDDPNLIILPLAFGKRQGREFIWNDLLSLETGSLKLANGRVIEKTLYNRRTRQDEPALFVALTFERREVLDSSNIKPMNLIGVDRGENIPAVIALTDPEGCPLSRFKDSLGNPTHILRIGESYKEKQRTIQAKKEVEQRRAGGYSRKYASKAKNLADDMVRNTARDLLYYAVTQDAMLIFENLSRGFGRQGKRTFMAERQYTRMEDWLTAKLAYEGLPSKTYLSKTLAQYTSKTCSNCGFTITSADYDRVLEKLKKTATGWMTTINGKELKVEGQITYYNRYKRQNVVKDLSVELDRLSEESVNNDISSWTKGRSGEALSLLKKRFSHRPVQEKFVCLNCGFETHADEQAALNIARSWLFLRSQEYKKYQTNKTTGNTDKRAFVETWQSFYRKKLKEVWKPAV

SEQ ID NO: 43846 - protein, 978 aa, synthetic construct
  REGION 1..978: note = engineered CasX variant
QEIKRINKIRRRLVKDSNTKKAGKTGPMKTLLVRVMTPDLRERLENLRKKPENIPQPISNTSRANLNKLLTDYTEMKKAILHVYWEEFQKDPVGLMSRVAQPASKKIDQNKLKPEMDEKGNLTTAGFACSQCGQPLFVYKLEQVSEKGKAYTNYFGRCNVAEHEKLIKLAQLKPEKDSDEAVTYSLGKFGQRALDFYSIHVTKESTHPVKPLAQIAGNRYASGPVGKALSDACMGTIASFLSKYQDIIIEHQKVVKGNQKRLESLRELAGKENLEYPSVTLPPQPHTKEGVDAYNEVIARVRTWVNLNLWQKLKLSRDDAKPLLRLKGFPSFPLVERQANEVDWWDMVCNVKKLINEKKEDGKVFWQNLAGYKRQEALRPYLSSEEDRQKGKKFARYQLGDLLLHLEKKHGEDWGKVYDEAWERIDKKVEGLSKHIKLEEERRSEDAQSKAALTDWLRAKASFVIEGLKEADKDEFCRCELKLQKWYGDLRGKPFAIEAENSILDISGFSKQYNCAFIWQKDGVKKLNLYLIINYFKGGKLRFKKIKPEAFEANRFYTVINKKSGEIVPMEVNFNFDDPNLIILPLAFGKRQGREFIWNDLLSLETGSLKLANGRVIEKTLYNRRTRQDEPALFVALTFERREVLDSSNIKPMNLIGVDRGENIPAVIALTDPEGCPLSRFKDSLGNPTHILRIGESYKEKQRTIQAKKEVEQRRAGGYSRKYASKAKNLADDMVRNTARDLLYYAVTQDAMLIFENLSRGFGRQGKRTFMAERQYTRMEDWLTAKLAYEGLPSKTYLSKTLAQYTSKTCSNCGFTITSADYDRVLEKLKKTATGWMTTINGKELKVEGQITYYNRYKRQNVVKDLSVELDRLSEESVNNDISSWTKGRSGEALSLLKKRFSHRPVQEKFVCLNCGFETHADEQAALNIARSWLFLRSQEYKKYQTNKTTGNTDKRAFVETWQSFYRKKLKEVWKPAV

SEQ ID NO: 43847 - protein, 977 aa, synthetic construct
  REGION 1..977: note = engineered CasX variant
QEIKRINKIRRRLVKDSNTKKAGKTGPMKTLLVRVMTPDLRERLENLRKKPENIPQPISNTSRANLNKLLTDYTEMKKAILHVYWEEFQKDPVGLMSRVAQPASKKIDQNKLKPEMDEKGNLTTAGFACSQCGQPLFVYKLEQVSEKGKAYTNYFGRCNVAEHEKLILLAQLKPEKDSDEAVTYSLGKFGQRALDFYSIHVTKESTHPVKPLAQIAGNRYASPVGKALSDACMGTIASFLSKYQDIIIEHQKVVKGNQKRLESLRELAGKENLEYPSVTLPPQPHTKEGVDAYNEVIARVRTWVNLNLWQKLKLSRDDAKPLLRLKGFPSFPLVERQANEVDWWDMVCNVKKLINEKKEDGKVFWQNLAGYKRQEALRPYLSSEEDRQKGKKFARYQLGDLLLHLEKKHGEDWGKVYDEAWERIDKKVEGLSKHIKLEEERRSEDAQSKAALTDWLRAKASFVIEGLKEADKDEFCRCELKLQKWYGDLRGKPFAIEAENSILDISGFSKQYNCAFIWQKDGVKKLNLYLIINYFKGGKLRFKKIKPEAFEANRFYTVINKKSGEIVPMEVNFNFDDPNLIILPLAFGKRQGREFIWNDLLSLETGSLKLANGRVIEKTLYNRRTRQDEPALFVALTFERREVLDSSNIKPMNLIGVDRGENIPAVIALTDPEGCPLSRFKDSLGNPTHILRIGESYKEKQRTIQAKKEVEQRRAGGYSRKYASKAKNLADDMVRNTARDLLYYAVTQDAMLIFENLSRGFGRQGKRTFMAERQYTRMEDWLTAKLAYEGLPSKTYLSKTLAQYTSKTCSNCGFTITSADYDRVLEKLKKTATGWMTTINGKELKVEGQITYYNRYKRQNVVKDLSVELDRLSEESVNNDISSWTKGRSGEALSLLKKRFSHRPVQEKFVCLNCGFETHADEQAALNIARSWLFLRSQEYKKYQTNKTTGNTDKRAFVETWQSFYRKKLKEVWKPAV

SEQ ID NO: 43848 - protein, 978 aa, synthetic construct
  REGION 1..978: note = engineered CasX variant
QEIKRINKIRRRLVKDSNTKKAGKTGPMKTLLVRVMTPDLRERLENLRKKPENIPQPISNTSRANLNKLLTDYTEMKKAILHVYWEEFQKDPVGLMSRVAQPASKKIDQNKLKPEMDEKGNLTTAGFACSQCGQPLFVYKLEQVSEKGKAYTNYFGRCNVAEHEKLILLAQLKPEKDSDEAVTYSLGKFGQRALDFYSIHVTKESTHPVKPLAQIAGNRYASYPVGKALSDACMGTIASFLSKYQDIIIEHQKVVKGNQKRLESLRELAGKENLEYPSVTLPPQPHTKEGVDAYNEVIARVRTWVNLNLWQKLKLSRDDAKPLLRLKGFPSFPLVERQANEVDWWDMVCNVKKLINEKKEDGKVFWQNLAGYKRQEALRPYLSSEEDRKKGKKFARYQLGDLLLHLEKKHGEDWGKVYDEAWERIDKKVEGLSKHIKLEEERRSEDAQSKAALTDWLRAKASFVIEGLKEADKDEFCRCELKLQKWYGDLRGKPFAIEAENSILDISGFSKQYNCAFIWQKDGVKKLNLYLIINYFKGGKLRFKKIKPEAFEANRFYTVINKKSGEIVPMEVNFNFDDPNLIILPLAFGKRQGREFIWNDLLSLETGSLKLANGRVIEKTLYNRRTRQDEPALFVALTFERREVLDSSNIKPMNLIGVDRGENIPAVIALTDPEGCPLSRFKDSLGNPTHILRIGESYKEKQRTIQAKKEVEQRRAGGYSRKYASKAKNLADDMVRNTARDLLYYAVTQDAMLIFENLSRGFGRQGKRTFMAERQYTRMEDWLTAKLAYEGLPSQTYLSKTLAQYTSKTCSNCGFTITSADYDRVLEKLKKTATGWMTTINGKELKVEGQITYYNRYKRQNVVKDLSVELDRLSEESVNNDISSWTKGRSGEALSLLKKRFSHRPVQEKFVCLNCGFETHADEQAALNIARSWLFLRSQEYKKYQTNKTTGNTDKRAFVETWQSFYRKKLKEVWKPAV

SEQ ID NO: 43849 - protein, 978 aa, synthetic construct
  REGION 1..978: note = engineered CasX variant
QEIKRINKIRRRLVKDSNTKKAGKTGPMKTLLVRVMTPDLRERLENLRKKPENIPQPISNTSRANLNKLLTDYTEMKKAILHVYWEEFQKDPVGLMSRVAQPASKKIDQNKLKPEMDEKGNLTTAGFACSQCGQPLFVYKLEQVSEKGKAYTNYFGRCNVAEHEKLILLAQLKPEKDSDEAVTYSLGKFGQRALDFYSIHVTKESTHPVKPLAQIAGNRYASHPVGKALSDACMGTIASFLSKYQDIIIEHQKVVKGNQKRLESLRELAGKENLEYPSVTLPPQPHTKEGVDAYNEVIARVRTWVNLNLWQKLKLSRDDAKPLLRLKGFPSFPLVERQANEVDWWDMVCNVKKLINEKKEDGKVFWQNLAGYKRQEALRPYLSSEEDRKKGKKFARYQLGDLLLHLEKKHGEDWGKVYDEAWERIDKKVEGLSKHIKLEEERRSEDAQSKAALTDWLRAKASFVIEGLKEADKDEFCRCELKLQKWYGDLRGKPFAIEAENSILDISGFSKQYNCAFIWQKDGVKKLNLYLIINYFKGGKLRFKKIKPEAFEANRFYTVINKKSGEIVPMEVNFNFDDPNLIILPLAFGKRQGREFIWNDLLSLETGSLKLANGRVIEKTLYNRRTRQDEPALFVALTFERREVLDSSNIKPMNLIGVDRGENIPAVIALTDPEGCPLSRFKDSLGNPTHILRIGESYKEKQRTIQAKKEVEQRRAGGYSRKYASKAKNLADDMVRNTARDLLYYAVTQDAMLIFENLSRGFGRQGKRTFMAERQYTRMEDWLTAKLAYEGLPSQTYLSKTLAQYTSKTCSNCGFTITSADYDRVLEKLKKTATGWMTTINGKELKVEGQITYYNRYKRQNVVKDLSVELDRLSEESVNNDISSWTKGRSGEALSLLKKRFSHRPVQEKFVCLNCGFETHADEQAALNIARSWLFLRSQEYKKYQTNKTTGNTDKRAFVETWQSFYRKKLKEVWKPAV

SEQ ID NO: 43850 - protein, 978 aa, synthetic construct
  REGION 1..978: note = engineered CasX variant
QEIKRINKIRRRLVKDSNTKKAGKTGPMKTLLVRVMTPDLRERLENLRKKPENIPQPISNTSRANLNKLLTDYTEMKKAILHVYWEEFQKDPVGLMSRVAQPASKKIDQNKLKPEMDEKGNLTTAGFACSQCGQPLFVYKLEQVSEKGKAYTNYFGRCNVAEHEKLILLAQLKPEKDSDEAVTYSLGKFGQRALDFYSIHVTKESTHPVKPLAQIAGNRYASSPVGKALSDACMGTIASFLSKYQDIIIEHQKVVKGNQKRLESLRELAGKENLEYPSVTLPPQPHTKEGVDAYNEVIARVRTWVNLNLWQKLKLSRDDAKPLLRLKGFPSFPLVERQANEVDWWDMVCNVKKLINEKKEDGKVFWQNLAGYKRQEALRPYLSSEEDRKKGKKFARYQLGDLLLHLEKKHGEDWGKVYDEAWERIDKKVEGLSKHIKLEEERRSEDAQSKAALTDWLRAKASFVIEGLKEADKDEFCRCELKLQKWYGDLRGKPFAIEAENSILDISGFSKQYNCAFIWQKDGVKKLNLYLIINYFKGGKLRFKKIKPEAFEANRFYTVINKKSGEIVPMEVNFNFDDPNLIILPLAFGKRQGREFIWNDLLSLETGSLKLANGRVIEKTLYNRRTRQDEPALFVALTFERREVLDSSNIKPMNLIGVDRGENIPAVIALTDPEGCPLSRFKDSLGNPTHILRIGESYKEKQRTIQAKKEVEQRRAGGYSRKYASKAKNLADDMVRNTARDLLYYAVTQDAMLIFENLSRGFGRQGKRTFMAERQYTRMEDWLTAKLAYEGLPSQTYLSKTLAQYTSKTCSNCGFTITSADYDRVLEKLKKTATGWMTTINGKELKVEGQITYYNRYKRQNVVKDLSVELDRLSEESVNNDISSWTKGRSGEALSLLKKRFSHRPVQEKFVCLNCGFETHADEQAALNIARSWLFLRSQEYKKYQTNKTTGNTDKRAFVETWQSFYRKKLKEVWKPAV

SEQ ID NO: 43851 - protein, 978 aa, synthetic construct
  REGION 1..978: note = engineered CasX variant
QEIKRINKIRRRLVKDSNTKKAGKTGPMKTLLVRVMTPDLRERLENLRKKPENIPQPISNTSRANLNKLLTDYTEMKKAILHVYWEEFQKDPVGLMSRVAQPASKKIDQNKLKPEMDEKGNLTTAGFACSQCGQPLFVYKLEQVSEKGKAYTNYFGRCNVAEHEKLILLAQLKPEKDSDEAVTYSLGKFGQRALDFYSIHVTKESTHPVKPLAQIAGNRYASTPVGKALSDACMGTIASFLSKYQDIIIEHQKVVKGNQKRLESLRELAGKENLEYPSVTLPPQPHTKEGVDAYNEVIARVRTWVNLNLWQKLKLSRDDAKPLLRLKGFPSFPLVERQANEVDWWDMVCNVKKLINEKKEDGKVFWQNLAGYKRQEALRPYLSSEEDRKKGKKFARYQLGDLLLHLEKKHGEDWGKVYDEAWERIDKKVEGLSKHIKLEEERRSEDAQSKAALTDWLRAKASFVIEGLKEADKDEFCRCELKLQKWYGDLRGKPFAIEAENSILDISGFSKQYNCAFIWQKDGVKKLNLYLIINYFKGGKLRFKKIKPEAFEANRFYTVINKKSGEIVPMEVNFNFDDPNLIILPLAFGKRQGREFIWNDLLSLETGSLKLANGRVIEKTLYNRRTRQDEPALFVALTFERREVLDSSNIKPMNLIGVDRGENIPAVIALTDPEGCPLSRFKDSLGNPTHILRIGESYKEKQRTIQAKKEVEQRRAGGYSRKYASKAKNLADDMVRNTARDLLYYAVTQDAMLIFENLSRGFGRQGKRTFMAERQYTRMEDWLTAKLAYEGLPSQTYLSKTLAQYTSKTCSNCGFTITSADYDRVLEKLKKTATGWMTTINGKELKVEGQITYYNRYKRQNVVKDLSVELDRLSEESVNNDISSWTKGRSGEALSLLKKRFSHRPVQEKFVCLNCGFETHADEQAALNIARSWLFLRSQEYKKYQTNKTTGNTDKRAFVETWQSFYRKKLKEVWKPAV

SEQ ID NO: 43852 - protein, 978 aa, synthetic construct
  REGION 1..978: note = engineered CasX variant
QEIKRINKIRRRLVKDSNTKKAGKTGPMKTLLVRVMTPDLRERLENLRKKPENIPQPISNTSRANLNKLLTDYTEMKKAILHVYWEEFQKDPVGLMSRVAQPASKKIDQNKLKPEMDEKGNLTTAGFACSQCGQPLFVYKLEQVSEKGKAYTNYFGRCNVAEHEKLILLAQLKPEKDSDEAVTYSLGKFGQRALDFYSIHVTKESTHPVKPLAQIAGNRYASAPVGKALSDACMGTIASFLSKYQDIIIEHQKVVKGNQKRLESLRELAGKENLEYPSVTLPPQPHTKEGVDAYNEVIARVRTWVNLNLWQKLKLSRDDAKPLLRLKGFPSFPLVERQANEVDWWDMVCNVKKLINEKKEDGKVFWQNLAGYKRQEALRPYLSSEEDRKKGKKFARYQLGDLLLHLEKKHGEDWGKVYDEAWERIDKKVEGLSKHIKLEEERRSEDAQSKAALTDWLRAKASFVIEGLKEADKDEFCRCELKLQKWYGDLRGKPFAIEAENSILDISGFSKQYNCAFIWQKDGVKKLNLYLIINYFKGGKLRFKKIKPEAFEANRFYTVINKKSGEIVPMEVNFNFDDPNLIILPLAFGKRQGREFIWNDLLSLETGSLKLANGRVIEKTLYNRRTRQDEPALFVALTFERREVLDSSNIKPMNLIGVDRGENIPAVIALTDPEGCPLSRFKDSLGNPTHILRIGESYKEKQRTIQAKKEVEQRRAGGYSRKYASKAKNLADDMVRNTARDLLYYAVTQDAMLIFENLSRGFGRQGKRTFMAERQYTRMEDWLTAKLAYEGLPSQTYLSKTLAQYTSKTCSNCGFTITSADYDRVLEKLKKTATGWMTTINGKELKVEGQITYYNRYKRQNVVKDLSVELDRLSEESVNNDISSWTKGRSGEALSLLKKRFSHRPVQEKFVCLNCGFETHADEQAALNIARSWLFLRSQEYKKYQTNKTTGNTDKRAFVETWQSFYRKKLKEVWKPAV

SEQ ID NO: 43853 - protein, 978 aa, synthetic construct
  REGION 1..978: note = engineered CasX variant
QEIKRINKIRRRLVKDSNTKKAGKTGPMKTLLVRVMTPDLRERLENLRKKPENIPQPISNTSRANLNKLLTDYTEMKKAILHVYWEEFQKDPVGLMSRVAQPASKKIDQNKLKPEMDEKGNLTTAGFACSQCGQPLFVYKLEQVSEKGKAYTNYFGRCNVAEHEKLILLAQLKPEKDSDEAVTYSLGKFGQRALDFYSIHVTKESTHPVKPLAQIAGNRYASVPVGKALSDACMGTIASFLSKYQDIIIEHQKVVKGNQKRLESLRELAGKENLEYPSVTLPPQPHTKEGVDAYNEVIARVRTWVNLNLWQKLKLSRDDAKPLLRLKGFPSFPLVERQANEVDWWDMVCNVKKLINEKKEDGKVFWQNLAGYKRQEALRPYLSSEEDRKKGKKFARYQLGDLLLHLEKKHGEDWGKVYDEAWERIDKKVEGLSKHIKLEEERRSEDAQSKAALTDWLRAKASFVIEGLKEADKDEFCRCELKLQKWYGDLRGKPFAIEAENSILDISGFSKQYNCAFIWQKDGVKKLNLYLIINYFKGGKLRFKKIKPEAFEANRFYTVINKKSGEIVPMEVNFNFDDPNLIILPLAFGKRQGREFIWNDLLSLETGSLKLANGRVIEKTLYNRRTRQDEPALFVALTFERREVLDSSNIKPMNLIGVDRGENIPAVIALTDPEGCPLSRFKDSLGNPTHILRIGESYKEKQRTIQAKKEVEQRRAGGYSRKYASKAKNLADDMVRNTARDLLYYAVTQDAMLIFENLSRGFGRQGKRTFMAERQYTRMEDWLTAKLAYEGLPSQTYLSKTLAQYTSKTCSNCGFTITSADYDRVLEKLKKTATGWMTTINGKELKVEGQITYYNRYKRQNVVKDLSVELDRLSEESVNNDISSWTKGRSGEALSLLKKRFSHRPVQEKFVCLNCGFETHADEQAALNIARSWLFLRSQEYKKYQTNKTTGNTDKRAFVETWQSFYRKKLKEVWKPAV

SEQ ID NO: 43854 - protein, 978 aa, synthetic construct
  REGION 1..978: note = engineered CasX variant
QEIKRINKIRRRLVKDSNTKKAGKTGPMKTLLVRVMTPDLRERLENLRKKPENIPQPISNTSRANLNKLLTDYTEMKKAILHVYWEEFQKDPVGLMSRVAQPASKKIDQNKLKPEMDEKGNLTTAGFACSQCGQPLFVYKLEQVSEKGKAYTNYFGRCNVAEHEKLIKLAQLKPEKDSDEAVTYSLGKFGQRALDFYSIHVTKESTHPVKPLAQIAGNRYASGPVGKALSDACMGTIASFLSKYQDIIIEHQKVVKGNQKRLESLRELAGKENLEYPSVTLPPQPHTKEGVDAYNEVIARVRTWVNLNLWQKLKLSRDDAKPLLRLKGFPSFPLVERQANEVDWWDMVCNVKKLINEKKEDGKVFWQNLAGYKRQEALRPYLSSEEDRKKGKKFARYQLGDLLLHLEKKHGEDWGKVYDEAWERIDKKVEGLSKHIKLEEERRSEDAQSKAALTDWLRAKASFVIEGLKEADKDEFCRCELKLQKWYGDLRGKPFAIEAENSILDISGFSKQYNCAFIWQKDGVKKLNLYLIINYFKGGKLRFKKIKPEAFEANRFYTVINKKSGEIVPMEVNFNFDDPNLIILPLAFGKRQGREFIWNDLLSLETGSLKLANGRVIEKTLYNRRTRQDEPALFVALTFERREVLDSSNIKPMNLIGVDRGENIPAVIALTDPEGCPLSRFKDSLGNPTHILRIGESYKEKQRTIQAKKEVEQRRAGGYSRKYASKAKNLADDMVRNTARDLLYYAVTQDAMLIFENLSRGFGRQGKRTFMAERQYTRMEDWLTAKLAYEGLPSQTYLSKTLAQYTSKTCSNCGFTITSADYDRVLEKLKKTATGWMTTINGKELKVEGQITYYNRYKRQNVVKDLSVELDRLSEESVNNDISSWTKGRSGEALSLLKKRFSHRPVQEKFVCLNCGFETHADEQAALNIARSWLFLRSQEYKKYQTNKTTGNTDKRAFVETWQSFYRKKLKEVWKPAV

SEQ ID NO: 43855 - protein, 977 aa, synthetic construct
  REGION 1..977: note = engineered CasX variant
QEIKRINKIRRRLVKDSNTKKAGKTGPMKTLLVRVMTPDLRERLENLRKKPENIPQPISNTSRANLNKLLTDYTEMKKAILHVYWEEFQKDPVGLMSRVAQPASKKIDQNKLKPEMDEKGNLTTAGFACSQCGQPLFVYKLEQVSEKGKAYTNYFGRCNVAEHEKLILLAQLKPEKDSDEAVTYSLGKFGQRALDFYSIHVTKESTHPVKPLAQIAGNRYASPVGKALSDACMGTIASFLSKYQDIIIEHQKVVKGNQKRLESLRELAGKENLEYPSVTLPPQPHTKEGVDAYNEVIARVRTWVNLNLWQKLKLSRDDAKPLLRLKGFPSFPLVERQANEVDWWDMVCNVKKLINEKKEDGKVFWQNLAGYKRQEALRPYLSSEEDRKKGKKFARYQLGDLLLHLEKKHGEDWGKVYDEAWERIDKKVEGLSKHIKLEEERRSEDAQSKAALTDWLRAKASFVIEGLKEADKDEFCRCELKLQKWYGDLRGKPFAIEAENSILDISGFSKQYNCAFIWQKDGVKKLNLYLIINYFKGGKLRFKKIKPEAFEANRFYTVINKKSGEIVPMEVNFNFDDPNLIILPLAFGKRQGREFIWNDLLSLETGSLKLANGRVIEKTLYNRRTRQDEPALFVALTFERREVLDSSNIKPMNLIGVDRGENIPAVIALTDPEGCPLSRFKDSLGNPTHILRIGESYKEKQRTIQAKKEVEQRRAGGYSRKYASKAKNLADDMVRNTARDLLYYAVTQDAMLIFENLSRGFGRQGKRTFMAERQYTRMEDWLTAKLAYEGLPSQTYLSKTLAQYTSKTCSNCGFTITSADYDRVLEKLKKTATGWMTTINGKELKVEGQITYYNRYKRQNVVKDLSVELDRLSEESVNNDISSWTKGRSGEALSLLKKRFSHRPVQEKFVCLNCGFETHADEQAALNIARSWLFLRSQEYKKYQTNKTTGNTDKRAFVETWQSFYRKKLKEVWKPAV

SEQ ID NO: 43856 - protein, 978 aa, synthetic construct
  REGION 1..978: note = engineered CasX variant
QEIKRINKIRRRLVKDSNTKKAGKTGPMKTLLVRVMTPDLRERLENLRKKPENIPQPISNTSRANLNKLLTDYTEMKKAILHVYWEEFQKDPVGLMSRVAQPASKKIDQNKLKPEMDEKGNLTTAGFACSQCGQPLFVYKLEQVSEKGKAYTNYFGRCNVAEHEKLILLAQLKPEKDSDEAVTYSLGKFGQRALDFYSIHVTKESTHPVKPLAQIAGNRYASYPVGKALSDACMGTIASFLSKYQDIIIEHQKVVKGNQKRLESLRELAGKENLEYPSVTLPPQPHTKEGVDAYNEVIARVRTWVNLNLWQKLKLSRDDAKPLLRLKGFPSFPLVERQANEVDWWDMVCNVKKLINEKKEDGKVFWQNLAGYKRQEALRPYLSSEEDRKKGKKFARYQLGDLLLHLEKKHGEDWGKVYDEAWERIDKKVEGLSKHIKLEEERRSEDAQSKAALTDWLRAKASFVIEGLKEADKDEFCRCELKLQKWYGDLRGKPFAIEAENSILDISGFSKQYNCAFIWQKDGVKKLNLYLIINYFKGGKLRFKKIKPEAFEANRFYTVINKKSGEIVPMEVNFNFDDPNLIILPLAFGKRQGREFIWNDLLSLETGSLKLANGRVIEKTLYNRRTRQDEPALFVALTFERREVLDSSNIKPMNLIGVDRGENIPAVIALTDPEGCPLSRFKDSLGNPTHILRIGESYKEKQRTIQAKKEVEQRRAGGYSRKYASKAKNLADDMVRNTARDLLYYAVTQDAMLIFENLSRGFGRQGKRTFMAERQYTRMEDWLTAKLAYNGLPSKTYLSKTLAQYTSKTCSNCGFTITSADYDRVLEKLKKTATGWMTTINGKELKVEGQITYYNRYKRQNVVKDLSVELDRLSEESVNNDISSWTKGRSGEALSLLKKRFSHRPVQEKFVCLNCGFETHADEQAALNIARSWLFLRSQEYKKYQTNKTTGNTDKRAFVETWQSFYRKKLKEVWKPAV

SEQ ID NO: 43857 - protein, 978 aa, synthetic construct
  REGION 1..978: note = engineered CasX variant
QEIKRINKIRRRLVKDSNTKKAGKTGPMKTLLVRVMTPDLRERLENLRKKPENIPQPISNTSRANLNKLLTDYTEMKKAILHVYWEEFQKDPVGLMSRVAQPASKKIDQNKLKPEMDEKGNLTTAGFACSQCGQPLFVYKLEQVSEKGKAYTNYFGRCNVAEHEKLILLAQLKPEKDSDEAVTYSLGKFGQRALDFYSIHVTKESTHPVKPLAQIAGNRYASHPVGKALSDACMGTIASFLSKYQDIIIEHQKVVKGNQKRLESLRELAGKENLEYPSVTLPPQPHTKEGVDAYNEVIARVRTWVNLNLWQKLKLSRDDAKPLLRLKGFPSFPLVERQANEVDWWDMVCNVKKLINEKKEDGKVFWQNLAGYKRQEALRPYLSSEEDRKKGKKFARYQLGDLLLHLEKKHGEDWGKVYDEAWERIDKKVEGLSKHIKLEEERRSEDAQSKAALTDWLRAKASFVIEGLKEADKDEFCRCELKLQKWYGDLRGKPFAIEAENSILDISGFSKQYNCAFIWQKDGVKKLNLYLIINYFKGGKLRFKKIKPEAFEANRFYTVINKKSGEIVPMEVNFNFDDPNLIILPLAFGKRQGREFIWNDLLSLETGSLKLANGRVIEKTLYNRRTRQDEPALFVALTFERREVLDSSNIKPMNLIGVDRGENIPAVIALTDPEGCPLSRFKDSLGNPTHILRIGESYKEKQRTIQAKKEVEQRRAGGYSRKYASKAKNLADDMVRNTARDLLYYAVTQDAMLIFENLSRGFGRQGKRTFMAERQYTRMEDWLTAKLAYNGLPSKTYLSKTLAQYTSKTCSNCGFTITSADYDRVLEKLKKTATGWMTTINGKELKVEGQITYYNRYKRQNVVKDLSVELDRLSEESVNNDISSWTKGRSGEALSLLKKRFSHRPVQEKFVCLNCGFETHADEQAALNIARSWLFLRSQEYKKYQTNKTTGNTDKRAFVETWQSFYRKKLKEVWKPAV

SEQ ID NO: 43858 - protein, 978 aa, synthetic construct
  REGION 1..978: note = engineered CasX variant
QEIKRINKIRRRLVKDSNTKKAGKTGPMKTLLVRVMTPDLRERLENLRKKPENIPQPISNTSRANLNKLLTDYTEMKKAILHVYWEEFQKDPVGLMSRVAQPASKKIDQNKLKPEMDEKGNLTTAGFACSQCGQPLFVYKLEQVSEKGKAYTNYFGRCNVAEHEKLILLAQLKPEKDSDEAVTYSLGKFGQRALDFYSIHVTKESTHPVKPLAQIAGNRYASSPVGKALSDACMGTIASFLSKYQDIIIEHQKVVKGNQKRLESLRELAGKENLEYPSVTLPPQPHTKEGVDAYNEVIARVRTWVNLNLWQKLKLSRDDAKPLLRLKGFPSFPLVERQANEVDWWDMVCNVKKLINEKKEDGKVFWQNLAGYKRQEALRPYLSSEEDRKKGKKFARYQLGDLLLHLEKKHGEDWGKVYDEAWERIDKKVEGLSKHIKLEEERRSEDAQSKAALTDWLRAKASFVIEGLKEADKDEFCRCELKLQKWYGDLRGKPFAIEAENSILDISGFSKQYNCAFIWQKDGVKKLNLYLIINYFKGGKLRFKKIKPEAFEANRFYTVINKKSGEIVPMEVNFNFDDPNLIILPLAFGKRQGREFIWNDLLSLETGSLKLANGRVIEKTLYNRRTRQDEPALFVALTFERREVLDSSNIKPMNLIGVDRGENIPAVIALTDPEGCPLSRFKDSLGNPTHILRIGESYKEKQRTIQAKKEVEQRRAGGYSRKYASKAKNLADDMVRNTARDLLYYAVTQDAMLIFENLSRGFGRQGKRTFMAERQYTRMEDWLTAKLAYNGLPSKTYLSKTLAQYTSKTCSNCGFTITSADYDRVLEKLKKTATGWMTTINGKELKVEGQITYYNRYKRQNVVKDLSVELDRLSEESVNNDISSWTKGRSGEALSLLKKRFSHRPVQEKFVCLNCGFETHADEQAALNIARSWLFLRSQEYKKYQTNKTTGNTDKRAFVETWQSFYRKKLKEVWKPAV

SEQ ID NO: 43859 - protein, 978 aa, synthetic construct
  REGION 1..978: note = engineered CasX variant
QEIKRINKIRRRLVKDSNTKKAGKTGPMKTLLVRVMTPDLRERLENLRKKPENIPQPISNTSRANLNKLLTDYTEMKKAILHVYWEEFQKDPVGLMSRVAQPASKKIDQNKLKPEMDEKGNLTTAGFACSQCGQPLFVYKLEQVSEKGKAYTNYFGRCNVAEHEKLILLAQLKPEKDSDEAVTYSLGKFGQRALDFYSIHVTKESTHPVKPLAQIAGNRYASTPVGKALSDACMGTIASFLSKYQDIIIEHQKVVKGNQKRLESLRELAGKENLEYPSVTLPPQPHTKEGVDAYNEVIARVRTWVNLNLWQKLKLSRDDAKPLLRLKGFPSFPLVERQANEVDWWDMVCNVKKLINEKKEDGKVFWQNLAGYKRQEALRPYLSSEEDRKKGKKFARYQLGDLLLHLEKKHGEDWGKVYDEAWERIDKKVEGLSKHIKLEEERRSEDAQSKAALTDWLRAKASFVIEGLKEADKDEFCRCELKLQKWYGDLRGKPFAIEAENSILDISGFSKQYNCAFIWQKDGVKKLNLYLIINYFKGGKLRFKKIKPEAFEANRFYTVINKKSGEIVPMEVNFNFDDPNLIILPLAFGKRQGREFIWNDLLSLETGSLKLANGRVIEKTLYNRRTRQDEPALFVALTFERREVLDSSNIKPMNLIGVDRGENIPAVIALTDPEGCPLSRFKDSLGNPTHILRIGESYKEKQRTIQAKKEVEQRRAGGYSRKYASKAKNLADDMVRNTARDLLYYAVTQDAMLIFENLSRGFGRQGKRTFMAERQYTRMEDWLTAKLAYNGLPSKTYLSKTLAQYTSKTCSNCGFTITSADYDRVLEKLKKTATGWMTTINGKELKVEGQITYYNRYKRQNVVKDLSVELDRLSEESVNNDISSWTKGRSGEALSLLKKRFSHRPVQEKFVCLNCGFETHADEQAALNIARSWLFLRSQEYKKYQTNKTTGNTDKRAFVETWQSFYRKKLKEVWKPAV

SEQ ID NO: 43860 - protein, 978 aa, synthetic construct
  REGION 1..978: note = engineered CasX variant
QEIKRINKIRRRLVKDSNTKKAGKTGPMKTLLVRVMTPDLRERLENLRKKPENIPQPISNTSRANLNKLLTDYTEMKKAILHVYWEEFQKDPVGLMSRVAQPASKKIDQNKLKPEMDEKGNLTTAGFACSQCGQPLFVYKLEQVSEKGKAYTNYFGRCNVAEHEKLILLAQLKPEKDSDEAVTYSLGKFGQRALDFYSIHVTKESTHPVKPLAQIAGNRYASAPVGKALSDACMGTIASFLSKYQDIIIEHQKVVKGNQKRLESLRELAGKENLEYPSVTLPPQPHTKEGVDAYNEVIARVRTWVNLNLWQKLKLSRDDAKPLLRLKGFPSFPLVERQANEVDWWDMVCNVKKLINEKKEDGKVFWQNLAGYKRQEALRPYLSSEEDRKKGKKFARYQLGDLLLHLEKKHGEDWGKVYDEAWERIDKKVEGLSKHIKLEEERRSEDAQSKAALTDWLRAKASFVIEGLKEADKDEFCRCELKLQKWYGDLRGKPFAIEAENSILDISGFSKQYNCAFIWQKDGVKKLNLYLIINYFKGGKLRFKKIKPEAFEANRFYTVINKKSGEIVPMEVNFNFDDPNLIILPLAFGKRQGREFIWNDLLSLETGSLKLANGRVIEKTLYNRRTRQDEPALFVALTFERREVLDSSNIKPMNLIGVDRGENIPAVIALTDPEGCPLSRFKDSLGNPTHILRIGESYKEKQRTIQAKKEVEQRRAGGYSRKYASKAKNLADDMVRNTARDLLYYAVTQDAMLIFENLSRGFGRQGKRTFMAERQYTRMEDWLTAKLAYNGLPSKTYLSKTLAQYTSKTCSNCGFTITSADYDRVLEKLKKTATGWMTTINGKELKVEGQITYYNRYKRQNVVKDLSVELDRLSEESVNNDISSWTKGRSGEALSLLKKRFSHRPVQEKFVCLNCGFETHADEQAALNIARSWLFLRSQEYKKYQTNKTTGNTDKRAFVETWQSFYRKKLKEVWKPAV

SEQ ID NO: 43861 - protein, 978 aa, synthetic construct
  REGION 1..978: note = engineered CasX variant
QEIKRINKIRRRLVKDSNTKKAGKTGPMKTLLVRVMTPDLRERLENLRKKPENIPQPISNTSRANLNKLLTDYTEMKKAILHVYWEEFQKDPVGLMSRVAQPASKKIDQNKLKPEMDEKGNLTTAGFACSQCGQPLFVYKLEQVSEKGKAYTNYFGRCNVAEHEKLILLAQLKPEKDSDEAVTYSLGKFGQRALDFYSIHVTKESTHPVKPLAQIAGNRYASVPVGKALSDACMGTIASFLSKYQDIIIEHQKVVKGNQKRLESLRELAGKENLEYPSVTLPPQPHTKEGVDAYNEVIARVRTWVNLNLWQKLKLSRDDAKPLLRLKGFPSFPLVERQANEVDWWDMVCNVKKLINEKKEDGKVFWQNLAGYKRQEALRPYLSSEEDRKKGKKFARYQLGDLLLHLEKKHGEDWGKVYDEAWERIDKKVEGLSKHIKLEEERRSEDAQSKAALTDWLRAKASFVIEGLKEADKDEFCRCELKLQKWYGDLRGKPFAIEAENSILDISGFSKQYNCAFIWQKDGVKKLNLYLIINYFKGGKLRFKKIKPEAFEANRFYTVINKKSGEIVPMEVNFNFDDPNLIILPLAFGKRQGREFIWNDLLSLETGSLKLANGRVIEKTLYNRRTRQDEPALFVALTFERREVLDSSNIKPMNLIGVDRGENIPAVIALTDPEGCPLSRFKDSLGNPTHILRIGESYKEKQRTIQAKKEVEQRRAGGYSRKYASKAKNLADDMVRNTARDLLYYAVTQDAMLIFENLSRGFGRQGKRTFMAERQYTRMEDWLTAKLAYNGLPSKTYLSKTLAQYTSKTCSNCGFTITSADYDRVLEKLKKTATGWMTTINGKELKVEGQITYYNRYKRQNVVKDLSVELDRLSEESVNNDISSWTKGRSGEALSLLKKRFSHRPVQEKFVCLNCGFETHADEQAALNIARSWLFLRSQEYKKYQTNKTTGNTDKRAFVETWQSFYRKKLKEVWKPAV

SEQ ID NO: 43862 - protein, 978 aa, synthetic construct
  REGION 1..978: note = engineered CasX variant
QEIKRINKIRRRLVKDSNTKKAGKTGPMKTLLVRVMTPDLRERLENLRKKPENIPQPISNTSRANLNKLLTDYTEMKKAILHVYWEEFQKDPVGLMSRVAQPASKKIDQNKLKPEMDEKGNLTTAGFACSQCGQPLFVYKLEQVSEKGKAYTNYFGRCNVAEHEKLIKLAQLKPEKDSDEAVTYSLGKFGQRALDFYSIHVTKESTHPVKPLAQIAGNRYASGPVGKALSDACMGTIASFLSKYQDIIIEHQKVVKGNQKRLESLRELAGKENLEYPSVTLPPQPHTKEGVDAYNEVIARVRTWVNLNLWQKLKLSRDDAKPLLRLKGFPSFPLVERQANEVDWWDMVCNVKKLINEKKEDGKVFWQNLAGYKRQEALRPYLSSEEDRKKGKKFARYQLGDLLLHLEKKHGEDWGKVYDEAWERIDKKVEGLSKHIKLEEERRSEDAQSKAALTDWLRAKASFVIEGLKEADKDEFCRCELKLQKWYGDLRGKPFAIEAENSILDISGFSKQYNCAFIWQKDGVKKLNLYLIINYFKGGKLRFKKIKPEAFEANRFYTVINKKSGEIVPMEVNFNFDDPNLIILPLAFGKRQGREFIWNDLLSLETGSLKLANGRVIEKTLYNRRTRQDEPALFVALTFERREVLDSSNIKPMNLIGVDRGENIPAVIALTDPEGCPLSRFKDSLGNPTHILRIGESYKEKQRTIQAKKEVEQRRAGGYSRKYASKAKNLADDMVRNTARDLLYYAVTQDAMLIFENLSRGFGRQGKRTFMAERQYTRMEDWLTAKLAYNGLPSKTYLSKTLAQYTSKTCSNCGFTITSADYDRVLEKLKKTATGWMTTINGKELKVEGQITYYNRYKRQNVVKDLSVELDRLSEESVNNDISSWTKGRSGEALSLLKKRFSHRPVQEKFVCLNCGFETHADEQAALNIARSWLFLRSQEYKKYQTNKTTGNTDKRAFVETWQSFYRKKLKEVWKPAV

SEQ ID NO: 43863 - protein, 977 aa, synthetic construct
  REGION 1..977: note = engineered CasX variant
QEIKRINKIRRRLVKDSNTKKAGKTGPMKTLLVRVMTPDLRERLENLRKKPENIPQPISNTSRANLNKLLTDYTEMKKAILHVYWEEFQKDPVGLMSRVAQPASKKIDQNKLKPEMDEKGNLTTAGFACSQCGQPLFVYKLEQVSEKGKAYTNYFGRCNVAEHEKLILLAQLKPEKDSDEAVTYSLGKFGQRALDFYSIHVTKESTHPVKPLAQIAGNRYASPVGKALSDACMGTIASFLSKYQDIIIEHQKVVKGNQKRLESLRELAGKENLEYPSVTLPPQPHTKEGVDAYNEVIARVRTWVNLNLWQKLKLSRDDAKPLLRLKGFPSFPLVERQANEVDWWDMVCNVKKLINEKKEDGKVFWQNLAGYKRQEALRPYLSSEEDRKKGKKFARYQLGDLLLHLEKKHGEDWGKVYDEAWERIDKKVEGLSKHIKLEEERRSEDAQSKAALTDWLRAKASFVIEGLKEADKDEFCRCELKLQKWYGDLRGKPFAIEAENSILDISGFSKQYNCAFIWQKDGVKKLNLYLIINYFKGGKLRFKKIKPEAFEANRFYTVINKKSGEIVPMEVNFNFDDPNLIILPLAFGKRQGREFIWNDLLSLETGSLKLANGRVIEKTLYNRRTRQDEPALFVALTFERREVLDSSNIKPMNLIGVDRGENIPAVIALTDPEGCPLSRFKDSLGNPTHILRIGESYKEKQRTIQAKKEVEQRRAGGYSRKYASKAKNLADDMVRNTARDLLYYAVTQDAMLIFENLSRGFGRQGKRTFMAERQYTRMEDWLTAKLAYNGLPSKTYLSKTLAQYTSKTCSNCGFTITSADYDRVLEKLKKTATGWMTTINGKELKVEGQITYYNRYKRQNVVKDLSVELDRLSEESVNNDISSWTKGRSGEALSLLKKRFSHRPVQEKFVCLNCGFETHADEQAALNIARSWLFLRSQEYKKYQTNKTTGNTDKRAFVETWQSFYRKKLKEVWKPAV

SEQ ID NO: 43864 - protein, 978 aa, synthetic construct
  REGION 1..978: note = engineered CasX variant
QEIKRINKIRRRLVKDSNTKKAGKTGPMKTLLVRVMTPDLRERLENLRKKPENIPQPISNTSRANLNKLLTDYTEMKKAILHVYWEEFQKDPVGLMSRVAQPASKKIDQNKLKPEMDEKGNLTTAGFACSQCGQPLFVYKLEQVSEKGKAYTNYFGRCNVAEHEKLIQLAQLKPEKDSDEAVTYSLGKFGQRALDFYSIHVTKESTHPVKPLAQIAGNRYASYPVGKALSDACMGTIASFLSKYQDIIIEHQKVVKGNQKRLESLRELAGKENLEYPSVTLPPQPHTKEGVDAYNEVIARVRTWVNLNLWQKLKLSRDDAKPLLRLKGFPSFPLVERQANEVDWWDMVCNVKKLINEKKEDGKVFWQNLAGYKRQEALRPYLSSEEDRKKGKKFARYQLGDLLLHLEKKHGEDWGKVYDEAWERIDKKVEGLSKHIKLEEERRSEDAQSKAALTDWLRAKASFVIEGLKEADKDEFCRCELKLQKWYGDLRGKPFAIEAENSILDISGFSKQYNCAFIWQKDGVKKLNLYLIINYFKGGKLRFKKIKPEAFEANRFYTVINKKSGEIVPMEVNFNFDDPNLIILPLAFGKRQGREFIWNDLLSLETGSLKLANGRVIEKTLYNRRTRQDEPALFVALTFERREVLDSSNIKPMNLIGVDRGENIPAVIALTDPEGCPLSRFKDSLGNPTHILRIGESYKEKQRTIQAKKEVEQRRAGGYSRKYASKAKNLADDMVRNTARDLLYYAVTQDAMLIFENLSRGFGRQGKRTFMAERQYTRMEDWLTAKLAYEGLPSKTYLSKTLAQYTSKTCSNCGFTITSADYDRVLEKLKKTATGWMTTINGKELKVEGQITYYNRYKRQNVVKDLSVELDRLSEESVNNDISSWTKGRSGEALSLLKKRFSHRPVQEKFVCLNCGFETHADEQAALNIARSWLFLRSQEYKKYQTNKTTGNTDKRAFVETWQSFYRKKLKEVWKPAV

SEQ ID NO: 43865 - protein, 978 aa, synthetic construct
  REGION 1..978: note = engineered CasX variant
QEIKRINKIRRRLVKDSNTKKAGKTGPMKTLLVRVMTPDLRERLENLRKKPENIPQPISNTSRANLNKLLTDYTEMKKAILHVYWEEFQKDPVGLMSRVAQPASKKIDQNKLKPEMDEKGNLTTAGFACSQCGQPLFVYKLEQVSEKGKAYTNYFGRCNVAEHEKLIQLAQLKPEKDSDEAVTYSLGKFGQRALDFYSIHVTKESTHPVKPLAQIAGNRYASHPVGKALSDACMGTIASFLSKYQDIIIEHQKVVKGNQKRLESLRELAGKENLEYPSVTLPPQPHTKEGVDAYNEVIARVRTWVNLNLWQKLKLSRDDAKPLLRLKGFPSFPLVERQANEVDWWDMVCNVKKLINEKKEDGKVFWQNLAGYKRQEALRPYLSSEEDRKKGKKFARYQLGDLLLHLEKKHGEDWGKVYDEAWERIDKKVEGLSKHIKLEEERRSEDAQSKAALTDWLRAKASFVIEGLKEADKDEFCRCELKLQKWYGDLRGKPFAIEAENSILDISGFSKQYNCAFIWQKDGVKKLNLYLIINYFKGGKLRFKKIKPEAFEANRFYTVINKKSGEIVPMEVNFNFDDPNLIILPLAFGKRQGREFIWNDLLSLETGSLKLANGRVIEKTLYNRRTRQDEPALFVALTFERREVLDSSNIKPMNLIGVDRGENIPAVIALTDPEGCPLSRFKDSLGNPTHILRIGESYKEKQRTIQAKKEVEQRRAGGYSRKYASKAKNLADDMVRNTARDLLYYAVTQDAMLIFENLSRGFGRQGKRTFMAERQYTRMEDWLTAKLAYEGLPSKTYLSKTLAQYTSKTCSNCGFTITSADYDRVLEKLKKTATGWMTTINGKELKVEGQITYYNRYKRQNVVKDLSVELDRLSEESVNNDISSWTKGRSGEALSLLKKRFSHRPVQEKFVCLNCGFETHADEQAALNIARSWLFLRSQEYKKYQTNKTTGNTDKRAFVETWQSFYRKKLKEVWKPAV

SEQ ID NO: 43866 - protein, 978 aa, synthetic construct
  REGION 1..978: note = engineered CasX variant
QEIKRINKIRRRLVKDSNTKKAGKTGPMKTLLVRVMTPDLRERLENLRKKPENIPQPISNTSRANLNKLLTDYTEMKKAILHVYWEEFQKDPVGLMSRVAQPASKKIDQNKLKPEMDEKGNLTTAGFACSQCGQPLFVYKLEQVSEKGKAYTNYFGRCNVAEHEKLIQLAQLKPEKDSDEAVTYSLGKFGQRALDFYSIHVTKESTHPVKPLAQIAGNRYASSPVGKALSDACMGTIASFLSKYQDIIIEHQKVVKGNQKRLESLRELAGKENLEYPSVTLPPQPHTKEGVDAYNEVIARVRTWVNLNLWQKLKLSRDDAKPLLRLKGFPSFPLVERQANEVDWWDMVCNVKKLINEKKEDGKVFWQNLAGYKRQEALRPYLSSEEDRKKGKKFARYQLGDLLLHLEKKHGEDWGKVYDEAWERIDKKVEGLSKHIKLEEERRSEDAQSKAALTDWLRAKASFVIEGLKEADKDEFCRCELKLQKWYGDLRGKPFAIEAENSILDISGFSKQYNCAFIWQKDGVKKLNLYLIINYFKGGKLRFKKIKPEAFEANRFYTVINKKSGEIVPMEVNFNFDDPNLIILPLAFGKRQGREFIWNDLLSLETGSLKLANGRVIEKTLYNRRTRQDEPALFVALTFERREVLDSSNIKPMNLIGVDRGENIPAVIALTDPEGCPLSRFKDSLGNPTHILRIGESYKEKQRTIQAKKEVEQRRAGGYSRKYASKAKNLADDMVRNTARDLLYYAVTQDAMLIFENLSRGFGRQGKRTFMAERQYTRMEDWLTAKLAYEGLPSKTYLSKTLAQYTSKTCSNCGFTITSADYDRVLEKLKKTATGWMTTINGKELKVEGQITYYNRYKRQNVVKDLSVELDRLSEESVNNDISSWTKGRSGEALSLLKKRFSHRPVQEKFVCLNCGFETHADEQAALNIARSWLFLRSQEYKKYQTNKTTGNTDKRAFVETWQSFYRKKLKEVWKPAV

SEQ ID NO: 43867 - protein, 978 aa, synthetic construct
  REGION 1..978: note = engineered CasX variant
QEIKRINKIRRRLVKDSNTKKAGKTGPMKTLLVRVMTPDLRERLENLRKKPENIPQPISNTSRANLNKLLTDYTEMKKAILHVYWEEFQKDPVGLMSRVAQPASKKIDQNKLKPEMDEKGNLTTAGFACSQCGQPLFVYKLEQVSEKGKAYTNYFGRCNVAEHEKLIQLAQLKPEKDSDEAVTYSLGKFGQRALDFYSIHVTKESTHPVKPLAQIAGNRYASTPVGKALSDACMGTIASFLSKYQDIIIEHQKVVKGNQKRLESLRELAGKENLEYPSVTLPPQPHTKEGVDAYNEVIARVRTWVNLNLWQKLKLSRDDAKPLLRLKGFPSFPLVERQANEVDWWDMVCNVKKLINEKKEDGKVFWQNLAGYKRQEALRPYLSSEEDRKKGKKFARYQLGDLLLHLEKKHGEDWGKVYDEAWERIDKKVEGLSKHIKLEEERRSEDAQSKAALTDWLRAKASFVIEGLKEADKDEFCRCELKLQKWYGDLRGKPFAIEAENSILDISGFSKQYNCAFIWQKDGVKKLNLYLIINYFKGGKLRFKKIKPEAFEANRFYTVINKKSGEIVPMEVNFNFDDPNLIILPLAFGKRQGREFIWNDLLSLETGSLKLANGRVIEKTLYNRRTRQDEPALFVALTFERREVLDSSNIKPMNLIGVDRGENIPAVIALTDPEGCPLSRFKDSLGNPTHILRIGESYKEKQRTIQAKKEVEQRRAGGYSRKYASKAKNLADDMVRNTARDLLYYAVTQDAMLIFENLSRGFGRQGKRTFMAERQYTRMEDWLTAKLAYEGLPSKTYLSKTLAQYTSKTCSNCGFTITSADYDRVLEKLKKTATGWMTTINGKELKVEGQITYYNRYKRQNVVKDLSVELDRLSEESVNNDISSWTKGRSGEALSLLKKRFSHRPVQEKFVCLNCGFETHADEQAALNIARSWLFLRSQEYKKYQTNKTTGNTDKRAFVETWQSFYRKKLKEVWKPAV

SEQ ID NO: 43868 - protein, 978 aa, synthetic construct
  REGION 1..978: note = engineered CasX variant
QEIKRINKIRRRLVKDSNTKKAGKTGPMKTLLVRVMTPDLRERLENLRKKPENIPQPISNTSRANLNKLLTDYTEMKKAILHVYWEEFQKDPVGLMSRVAQPASKKIDQNKLKPEMDEKGNLTTAGFACSQCGQPLFVYKLEQVSEKGKAYTNYFGRCNVAEHEKLIQLAQLKPEKDSDEAVTYSLGKFGQRALDFYSIHVTKESTHPVKPLAQIAGNRYASAPVGKALSDACMGTIASFLSKYQDIIIEHQKVVKGNQKRLESLRELAGKENLEYPSVTLPPQPHTKEGVDAYNEVIARVRTWVNLNLWQKLKLSRDDAKPLLRLKGFPSFPLVERQANEVDWWDMVCNVKKLINEKKEDGKVFWQNLAGYKRQEALRPYLSSEEDRKKGKKFARYQLGDLLLHLEKKHGEDWGKVYDEAWERIDKKVEGLSKHIKLEEERRSEDAQSKAALTDWLRAKASFVIEGLKEADKDEFCRCELKLQKWYGDLRGKPFAIEAENSILDISGFSKQYNCAFIWQKDGVKKLNLYLIINYFKGGKLRFKKIKPEAFEANRFYTVINKKSGEIVPMEVNFNFDDPNLIILPLAFGKRQGREFIWNDLLSLETGSLKLANGRVIEKTLYNRRTRQDEPALFVALTFERREVLDSSNIKPMNLIGVDRGENIPAVIALTDPEGCPLSRFKDSLGNPTHILRIGESYKEKQRTIQAKKEVEQRRAGGYSRKYASKAKNLADDMVRNTARDLLYYAVTQDAMLIFENLSRGFGRQGKRTFMAERQYTRMEDWLTAKLAYEGLPSKTYLSKTLAQYTSKTCSNCGFTITSADYDRVLEKLKKTATGWMTTINGKELKVEGQITYYNRYKRQNVVKDLSVELDRLSEESVNNDISSWTKGRSGEALSLLKKRFSHRPVQEKFVCLNCGFETHADEQAALNIARSWLFLRSQEYKKYQTNKTTGNTDKRAFVETWQSFYRKKLKEVWKPAV

SEQ ID NO: 43869 - protein, 978 aa, synthetic construct
  REGION 1..978: note = engineered CasX variant
QEIKRINKIRRRLVKDSNTKKAGKTGPMKTLLVRVMTPDLRERLENLRKKPENIPQPISNTSRANLNKLLTDYTEMKKAILHVYWEEFQKDPVGLMSRVAQPASKKIDQNKLKPEMDEKGNLTTAGFACSQCGQPLFVYKLEQVSEKGKAYTNYFGRCNVAEHEKLIQLAQLKPEKDSDEAVTYSLGKFGQRALDFYSIHVTKESTHPVKPLAQIAGNRYASVPVGKALSDACMGTIASFLSKYQDIIIEHQKVVKGNQKRLESLRELAGKENLEYPSVTLPPQPHTKEGVDAYNEVIARVRTWVNLNLWQKLKLSRDDAKPLLRLKGFPSFPLVERQANEVDWWDMVCNVKKLINEKKEDGKVFWQNLAGYKRQEALRPYLSSEEDRKKGKKFARYQLGDLLLHLEKKHGEDWGKVYDEAWERIDKKVEGLSKHIKLEEERRSEDAQSKAALTDWLRAKASFVIEGLKEADKDEFCRCELKLQKWYGDLRGKPFAIEAENSILDISGFSKQYNCAFIWQKDGVKKLNLYLIINYFKGGKLRFKKIKPEAFEANRFYTVINKKSGEIVPMEVNFNFDDPNLIILPLAFGKRQGREFIWNDLLSLETGSLKLANGRVIEKTLYNRRTRQDEPALFVALTFERREVLDSSNIKPMNLIGVDRGENIPAVIALTDPEGCPLSRFKDSLGNPTHILRIGESYKEKQRTIQAKKEVEQRRAGGYSRKYASKAKNLADDMVRNTARDLLYYAVTQDAMLIFENLSRGFGRQGKRTFMAERQYTRMEDWLTAKLAYEGLPSKTYLSKTLAQYTSKTCSNCGFTITSADYDRVLEKLKKTATGWMTTINGKELKVEGQITYYNRYKRQNVVKDLSVELDRLSEESVNNDISSWTKGRSGEALSLLKKRFSHRPVQEKFVCLNCGFETHADEQAALNIARSWLFLRSQEYKKYQTNKTTGNTDKRAFVETWQSFYRKKLKEVWKPAV

SEQ ID NO: 43870 - protein, 979 aa, synthetic construct
  REGION 1..979: note = engineered CasX variant
QEIKRINKIRRRLVKDSNTKKAGKTGPMKTLLVRVMTPDLRERLENLRKKPENIPQPISNTSRANLNKLLTDYTEMKKAILHVYWEEFQKDPVGLMSRVAQPASKKIDQNKLKPEMDEKGNLTTAGFACSQCGQPLFVYKLEQVSEKGKAYTNYFGRCNVAEHEKLIQKLAQLKPEKDSDEAVTYSLGKFGQRALDFYSIHVTKESTHPVKPLAQIAGNRYASGPVGKALSDACMGTIASFLSKYQDIIIEHQKVVKGNQKRLESLRELAGKENLEYPSVTLPPQPHTKEGVDAYNEVIARVRTWVNLNLWQKLKLSRDDAKPLLRLKGFPSFPLVERQANEVDWWDMVCNVKKLINEKKEDGKVFWQNLAGYKRQEALRPYLSSEEDRKKGKKFARYQLGDLLLHLEKKHGEDWGKVYDEAWERIDKKVEGLSKHIKLEEERRSEDAQSKAALTDWLRAKASFVIEGLKEADKDEFCRCELKLQKWYGDLRGKPFAIEAENSILDISGFSKQYNCAFIWQKDGVKKLNLYLIINYFKGGKLRFKKIKPEAFEANRFYTVINKKSGEIVPMEVNFNFDDPNLIILPLAFGKRQGREFIWNDLLSLETGSLKLANGRVIEKTLYNRRTRQDEPALFVALTFERREVLDSSNIKPMNLIGVDRGENIPAVIALTDPEGCPLSRFKDSLGNPTHILRIGESYKEKQRTIQAKKEVEQRRAGGYSRKYASKAKNLADDMVRNTARDLLYYAVTQDAMLIFENLSRGFGRQGKRTFMAERQYTRMEDWLTAKLAYEGLPSKTYLSKTLAQYTSKTCSNCGFTITSADYDRVLEKLKKTATGWMTTINGKELKVEGQITYYNRYKRQNVVKDLSVELDRLSEESVNNDISSWTKGRSGEALSLLKKRFSHRPVQEKFVCLNCGFETHADEQAALNIARSWLFLRSQEYKKYQTNKTTGNTDKRAFVETWQSFYRKKLKEVWKPAV

SEQ ID NO: 43871 - protein, 977 aa, synthetic construct
  REGION 1..977: note = engineered CasX variant
QEIKRINKIRRRLVKDSNTKKAGKTGPMKTLLVRVMTPDLRERLENLRKKPENIPQPISNTSRANLNKLLTDYTEMKKAILHVYWEEFQKDPVGLMSRVAQPASKKIDQNKLKPEMDEKGNLTTAGFACSQCGQPLFVYKLEQVSEKGKAYTNYFGRCNVAEHEKLIQLAQLKPEKDSDEAVTYSLGKFGQRALDFYSIHVTKESTHPVKPLAQIAGNRYASPVGKALSDACMGTIASFLSKYQDIIIEHQKVVKGNQKRLESLRELAGKENLEYPSVTLPPQPHTKEGVDAYNEVIARVRTWVNLNLWQKLKLSRDDAKPLLRLKGFPSFPLVERQANEVDWWDMVCNVKKLINEKKEDGKVFWQNLAGYKRQEALRPYLSSEEDRKKGKKFARYQLGDLLLHLEKKHGEDWGKVYDEAWERIDKKVEGLSKHIKLEEERRSEDAQSKAALTDWLRAKASFVIEGLKEADKDEFCRCELKLQKWYGDLRGKPFAIEAENSILDISGFSKQYNCAFIWQKDGVKKLNLYLIINYFKGGKLRFKKIKPEAFEANRFYTVINKKSGEIVPMEVNFNFDDPNLIILPLAFGKRQGREFIWNDLLSLETGSLKLANGRVIEKTLYNRRTRQDEPALFVALTFERREVLDSSNIKPMNLIGVDRGENIPAVIALTDPEGCPLSRFKDSLGNPTHILRIGESYKEKQRTIQAKKEVEQRRAGGYSRKYASKAKNLADDMVRNTARDLLYYAVTQDAMLIFENLSRGFGRQGKRTFMAERQYTRMEDWLTAKLAYEGLPSKTYLSKTLAQYTSKTCSNCGFTITSADYDRVLEKLKKTATGWMTTINGKELKVEGQITYYNRYKRQNVVKDLSVELDRLSEESVNNDISSWTKGRSGEALSLLKKRFSHRPVQEKFVCLNCGFETHADEQAALNIARSWLFLRSQEYKKYQTNKTTGNTDKRAFVETWQSFYRKKLKEVWKPAV

SEQ ID NO: 43872 - protein, 978 aa, synthetic construct
  REGION 1..978: note = engineered CasX variant
QEIKRINKIRRRLVKDSNTKKAGKTGPMKTLLVRVMTPDLRERLENLRKKPENIPQPISNTSRANLNKLLTDYTEMKKAILHVYWEEFQKDPVGLMSRVAQPASKKIDQNKLKPEMDEKGNLTTAGFACSQCGQPLFVYKLEQVSEKGKAYTNYFGRCNVAEHEKLILLAQLKPEKDSDEAVTYSLGKFGQRALDFYSIHVTKESTHPVKPLAQIAGNRYASYPVGKALSDACMGTIASFLSKYQDIIIEHQKVVKGNQKRLESLRELAGKENLEYPSVTLPPQPHTKEGVDAYNEVIARVRTWVNLNLWQKLKLSRDDAKPLLRLKGFPSFPLVERQANEVDWWDMVCNVKKLINEKKEDGKVFWQNLAIYKRQEALRPYLSSEEDRKKGKKFARYQLGDLLLHLEKKHGEDWGKVYDEAWERIDKKVEGLSKHIKLEEERRSEDAQSKAALTDWLRAKASFVIEGLKEADKDEFCRCELKLQKWYGDLRGKPFAIEAENSILDISGFSKQYNCAFIWQKDGVKKLNLYLIINYFKGGKLRFKKIKPEAFEANRFYTVINKKSGEIVPMEVNFNFDDPNLIILPLAFGKRQGREFIWNDLLSLETGSLKLANGRVIEKTLYNRRTRQDEPALFVALTFERREVLDSSNIKPMNLIGVDRGENIPAVIALTDPEGCPLSRFKDSLGNPTHILRIGESYKEKQRTIQAKKEVEQRRAGGYSRKYASKAKNLADDMVRNTARDLLYYAVTQDAMLIFENLSRGFGRQGKRTFMAERQYTRMEDWLTAKLAYEGLPSKTYLSKTLAQYTSKTCSNCGFTITSADYDRVLEKLKKTATGWMTTINGKELKVEGQITYYNRYKRQNVVKDLSVELDRLSEESVNNDISSWTKGRSGEALSLLKKRFSHRPVQEKFVCLNCGFETHADEQAALNIARSWLFLRSQEYKKYQTNKTTGNTDKRAFVETWQSFYRKKLKEVWKPAV

SEQ ID NO: 43873 - protein, 978 aa, synthetic construct
  REGION 1..978: note = engineered CasX variant
QEIKRINKIRRRLVKDSNTKKAGKTGPMKTLLVRVMTPDLRERLENLRKKPENIPQPISNTSRANLNKLLTDYTEMKKAILHVYWEEFQKDPVGLMSRVAQPASKKIDQNKLKPEMDEKGNLTTAGFACSQCGQPLFVYKLEQVSEKGKAYTNYFGRCNVAEHEKLILLAQLKPEKDSDEAVTYSLGKFGQRALDFYSIHVTKESTHPVKPLAQIAGNRYASHPVGKALSDACMGTIASFLSKYQDIIIEHQKVVKGNQKRLESLRELAGKENLEYPSVTLPPQPHTKEGVDAYNEVIARVRTWVNLNLWQKLKLSRDDAKPLLRLKGFPSFPLVERQANEVDWWDMVCNVKKLINEKKEDGKVFWQNLAIYKRQEALRPYLSSEEDRKKGKKFARYQLGDLLLHLEKKHGEDWGKVYDEAWERIDKKVEGLSKHIKLEEERRSEDAQSKAALTDWLRAKASFVIEGLKEADKDEFCRCELKLQKWYGDLRGKPFAIEAENSILDISGFSKQYNCAFIWQKDGVKKLNLYLIINYFKGGKLRFKKIKPEAFEANRFYTVINKKSGEIVPMEVNFNFDDPNLIILPLAFGKRQGREFIWNDLLSLETGSLKLANGRVIEKTLYNRRTRQDEPALFVALTFERREVLDSSNIKPMNLIGVDRGENIPAVIALTDPEGCPLSRFKDSLGNPTHILRIGESYKEKQRTIQAKKEVEQRRAGGYSRKYASKAKNLADDMVRNTARDLLYYAVTQDAMLIFENLSRGFGRQGKRTFMAERQYTRMEDWLTAKLAYEGLPSKTYLSKTLAQYTSKTCSNCGFTITSADYDRVLEKLKKTATGWMTTINGKELKVEGQITYYNRYKRQNVVKDLSVELDRLSEESVNNDISSWTKGRSGEALSLLKKRFSHRPVQEKFVCLNCGFETHADEQAALNIARSWLFLRSQEYKKYQTNKTTGNTDKRAFVETWQSFYRKKLKEVWKPAV

SEQ ID NO: 43874 - protein, 978 aa, synthetic construct
  REGION 1..978: note = engineered CasX variant
QEIKRINKIRRRLVKDSNTKKAGKTGPMKTLLVRVMTPDLRERLENLRKKPENIPQPISNTSRANLNKLLTDYTEMKKAILHVYWEEFQKDPVGLMSRVAQPASKKIDQNKLKPEMDEKGNLTTAGFACSQCGQPLFVYKLEQVSEKGKAYTNYFGRCNVAEHEKLILLAQLKPEKDSDEAVTYSLGKFGQRALDFYSIHVTKESTHPVKPLAQIAGNRYASSPVGKALSDACMGTIASFLSKYQDIIIEHQKVVKGNQKRLESLRELAGKENLEYPSVTLPPQPHTKEGVDAYNEVIARVRTWVNLNLWQKLKLSRDDAKPLLRLKGFPSFPLVERQANEVDWWDMVCNVKKLINEKKEDGKVFWQNLAIYKRQEALRPYLSSEEDRKKGKKFARYQLGDLLLHLEKKHGEDWGKVYDEAWERIDKKVEGLSKHIKLEEERRSEDAQSKAALTDWLRAKASFVIEGLKEADKDEFCRCELKLQKWYGDLRGKPFAIEAENSILDISGFSKQYNCAFIWQKDGVKKLNLYLIINYFKGGKLRFKKIKPEAFEANRFYTVINKKSGEIVPMEVNFNFDDPNLIILPLAFGKRQGREFIWNDLLSLETGSLKLANGRVIEKTLYNRRTRQDEPALFVALTFERREVLDSSNIKPMNLIGVDRGENIPAVIALTDPEGCPLSRFKDSLGNPTHILRIGESYKEKQRTIQAKKEVEQRRAGGYSRKYASKAKNLADDMVRNTARDLLYYAVTQDAMLIFENLSRGFGRQGKRTFMAERQYTRMEDWLTAKLAYEGLPSKTYLSKTLAQYTSKTCSNCGFTITSADYDRVLEKLKKTATGWMTTINGKELKVEGQITYYNRYKRQNVVKDLSVELDRLSEESVNNDISSWTKGRSGEALSLLKKRFSHRPVQEKFVCLNCGFETHADEQAALNIARSWLFLRSQEYKKYQTNKTTGNTDKRAFVETWQSFYRKKLKEVWKPAV

SEQ ID NO: 43875 - protein, 978 aa, synthetic construct
  REGION 1..978: note = engineered CasX variant
QEIKRINKIRRRLVKDSNTKKAGKTGPMKTLLVRVMTPDLRERLENLRKKPENIPQPISNTSRANLNKLLTDYTEMKKAILHVYWEEFQKDPVGLMSRVAQPASKKIDQNKLKPEMDEKGNLTTAGFACSQCGQPLFVYKLEQVSEKGKAYTNYFGRCNVAEHEKLILLAQLKPEKDSDEAVTYSLGKFGQRALDFYSIHVTKESTHPVKPLAQIAGNRYASTPVGKALSDACMGTIASFLSKYQDIIIEHQKVVKGNQKRLESLRELAGKENLEYPSVTLPPQPHTKEGVDAYNEVIARVRTWVNLNLWQKLKLSRDDAKPLLRLKGFPSFPLVERQANEVDWWDMVCNVKKLINEKKEDGKVFWQNLAIYKRQEALRPYLSSEEDRKKGKKFARYQLGDLLLHLEKKHGEDWGKVYDEAWERIDKKVEGLSKHIKLEEERRSEDAQSKAALTDWLRAKASFVIEGLKEADKDEFCRCELKLQKWYGDLRGKPFAIEAENSILDISGFSKQYNCAFIWQKDGVKKLNLYLIINYFKGGKLRFKKIKPEAFEANRFYTVINKKSGEIVPMEVNFNFDDPNLIILPLAFGKRQGREFIWNDLLSLETGSLKLANGRVIEKTLYNRRTRQDEPALFVALTFERREVLDSSNIKPMNLIGVDRGENIPAVIALTDPEGCPLSRFKDSLGNPTHILRIGESYKEKQRTIQAKKEVEQRRAGGYSRKYASKAKNLADDMVRNTARDLLYYAVTQDAMLIFENLSRGFGRQGKRTFMAERQYTRMEDWLTAKLAYEGLPSKTYLSKTLAQYTSKTCSNCGFTITSADYDRVLEKLKKTATGWMTTINGKELKVEGQITYYNRYKRQNVVKDLSVELDRLSEESVNNDISSWTKGRSGEALSLLKKRFSHRPVQEKFVCLNCGFETHADEQAALNIARSWLFLRSQEYKKYQTNKTTGNTDKRAFVETWQSFYRKKLKEVWKPAV

SEQ ID NO: 43876 - protein, 978 aa, synthetic construct
  REGION 1..978: note = engineered CasX variant
QEIKRINKIRRRLVKDSNTKKAGKTGPMKTLLVRVMTPDLRERLENLRKKPENIPQPISNTSRANLNKLLTDYTEMKKAILHVYWEEFQKDPVGLMSRVAQPASKKIDQNKLKPEMDEKGNLTTAGFACSQCGQPLFVYKLEQVSEKGKAYTNYFGRCNVAEHEKLILLAQLKPEKDSDEAVTYSLGKFGQRALDFYSIHVTKESTHPVKPLAQIAGNRYASAPVGKALSDACMGTIASFLSKYQDIIIEHQKVVKGNQKRLESLRELAGKENLEYPSVTLPPQPHTKEGVDAYNEVIARVRTWVNLNLWQKLKLSRDDAKPLLRLKGFPSFPLVERQANEVDWWDMVCNVKKLINEKKEDGKVFWQNLAIYKRQEALRPYLSSEEDRKKGKKFARYQLGDLLLHLEKKHGEDWGKVYDEAWERIDKKVEGLSKHIKLEEERRSEDAQSKAALTDWLRAKASFVIEGLKEADKDEFCRCELKLQKWYGDLRGKPFAIEAENSILDISGFSKQYNCAFIWQKDGVKKLNLYLIINYFKGGKLRFKKIKPEAFEANRFYTVINKKSGEIVPMEVNFNFDDPNLIILPLAFGKRQGREFIWNDLLSLETGSLKLANGRVIEKTLYNRRTRQDEPALFVALTFERREVLDSSNIKPMNLIGVDRGENIPAVIALTDPEGCPLSRFKDSLGNPTHILRIGESYKEKQRTIQAKKEVEQRRAGGYSRKYASKAKNLADDMVRNTARDLLYYAVTQDAMLIFENLSRGFGRQGKRTFMAERQYTRMEDWLTAKLAYEGLPSKTYLSKTLAQYTSKTCSNCGFTITSADYDRVLEKLKKTATGWMTTINGKELKVEGQITYYNRYKRQNVVKDLSVELDRLSEESVNNDISSWTKGRSGEALSLLKKRFSHRPVQEKFVCLNCGFETHADEQAALNIARSWLFLRSQEYKKYQTNKTTGNTDKRAFVETWQSFYRKKLKEVWKPAV

SEQ ID NO: 43877 - protein, 978 aa, synthetic construct
  REGION 1..978: note = engineered CasX variant
QEIKRINKIRRRLVKDSNTKKAGKTGPMKTLLVRVMTPDLRERLENLRKKPENIPQPISNTSRANLNKLLTDYTEMKKAILHVYWEEFQKDPVGLMSRVAQPASKKIDQNKLKPEMDEKGNLTTAGFACSQCGQPLFVYKLEQVSEKGKAYTNYFGRCNVAEHEKLILLAQLKPEKDSDEAVTYSLGKFGQRALDFYSIHVTKESTHPVKPLAQIAGNRYASVPVGKALSDACMGTIASFLSKYQDIIIEHQKVVKGNQKRLESLRELAGKENLEYPSVTLPPQPHTKEGVDAYNEVIARVRTWVNLNLWQKLKLSRDDAKPLLRLKGFPSFPLVERQANEVDWWDMVCNVKKLINEKKEDGKVFWQNLAIYKRQEALRPYLSSEEDRKKGKKFARYQLGDLLLHLEKKHGEDWGKVYDEAWERIDKKVEGLSKHIKLEEERRSEDAQSKAALTDWLRAKASFVIEGLKEADKDEFCRCELKLQKWYGDLRGKPFAIEAENSILDISGFSKQYNCAFIWQKDGVKKLNLYLIINYFKGGKLRFKKIKPEAFEANRFYTVINKKSGEIVPMEVNFNFDDPNLIILPLAFGKRQGREFIWNDLLSLETGSLKLANGRVIEKTLYNRRTRQDEPALFVALTFERREVLDSSNIKPMNLIGVDRGENIPAVIALTDPEGCPLSRFKDSLGNPTHILRIGESYKEKQRTIQAKKEVEQRRAGGYSRKYASKAKNLADDMVRNTARDLLYYAVTQDAMLIFENLSRGFGRQGKRTFMAERQYTRMEDWLTAKLAYEGLPSKTYLSKTLAQYTSKTCSNCGFTITSADYDRVLEKLKKTATGWMTTINGKELKVEGQITYYNRYKRQNVVKDLSVELDRLSEESVNNDISSWTKGRSGEALSLLKKRFSHRPVQEKFVCLNCGFETHADEQAALNIARSWLFLRSQEYKKYQTNKTTGNTDKRAFVETWQSFYRKKLKEVWKPAV

SEQ ID NO: 43878 - protein, 978 aa, synthetic construct
  REGION 1..978: note = engineered CasX variant
QEIKRINKIRRRLVKDSNTKKAGKTGPMKTLLVRVMTPDLRERLENLRKKPENIPQPISNTSRANLNKLLTDYTEMKKAILHVYWEEFQKDPVGLMSRVAQPASKKIDQNKLKPEMDEKGNLTTAGFACSQCGQPLFVYKLEQVSEKGKAYTNYFGRCNVAEHEKLIKLAQLKPEKDSDEAVTYSLGKFGQRALDFYSIHVTKESTHPVKPLAQIAGNRYASGPVGKALSDACMGTIASFLSKYQDIIIEHQKVVKGNQKRLESLRELAGKENLEYPSVTLPPQPHTKEGVDAYNEVIARVRTWVNLNLWQKLKLSRDDAKPLLRLKGFPSFPLVERQANEVDWWDMVCNVKKLINEKKEDGKVFWQNLAIYKRQEALRPYLSSEEDRKKGKKFARYQLGDLLLHLEKKHGEDWGKVYDEAWERIDKKVEGLSKHIKLEEERRSEDAQSKAALTDWLRAKASFVIEGLKEADKDEFCRCELKLQKWYGDLRGKPFAIEAENSILDISGFSKQYNCAFIWQKDGVKKLNLYLIINYFKGGKLRFKKIKPEAFEANRFYTVINKKSGEIVPMEVNFNFDDPNLIILPLAFGKRQGREFIWNDLLSLETGSLKLANGRVIEKTLYNRRTRQDEPALFVALTFERREVLDSSNIKPMNLIGVDRGENIPAVIALTDPEGCPLSRFKDSLGNPTHILRIGESYKEKQRTIQAKKEVEQRRAGGYSRKYASKAKNLADDMVRNTARDLLYYAVTQDAMLIFENLSRGFGRQGKRTFMAERQYTRMEDWLTAKLAYEGLPSKTYLSKTLAQYTSKTCSNCGFTITSADYDRVLEKLKKTATGWMTTINGKELKVEGQITYYNRYKRQNVVKDLSVELDRLSEESVNNDISSWTKGRSGEALSLLKKRFSHRPVQEKFVCLNCGFETHADEQAALNIARSWLFLRSQEYKKYQTNKTTGNTDKRAFVETWQSFYRKKLKEVWKPAV

SEQ ID NO: 43879 - protein, 977 aa, synthetic construct
  REGION 1..977: note = engineered CasX variant
QEIKRINKIRRRLVKDSNTKKAGKTGPMKTLLVRVMTPDLRERLENLRKKPENIPQPISNTSRANLNKLLTDYTEMKKAILHVYWEEFQKDPVGLMSRVAQPASKKIDQNKLKPEMDEKGNLTTAGFACSQCGQPLFVYKLEQVSEKGKAYTNYFGRCNVAEHEKLILLAQLKPEKDSDEAVTYSLGKFGQRALDFYSIHVTKESTHPVKPLAQIAGNRYASPVGKALSDACMGTIASFLSKYQDIIIEHQKVVKGNQKRLESLRELAGKENLEYPSVTLPPQPHTKEGVDAYNEVIARVRTWVNLNLWQKLKLSRDDAKPLLRLKGFPSFPLVERQANEVDWWDMVCNVKKLINEKKEDGKVFWQNLAIYKRQEALRPYLSSEEDRKKGKKFARYQLGDLLLHLEKKHGEDWGKVYDEAWERIDKKVEGLSKHIKLEEERRSEDAQSKAALTDWLRAKASFVIEGLKEADKDEFCRCELKLQKWYGDLRGKPFAIEAENSILDISGFSKQYNCAFIWQKDGVKKLNLYLIINYFKGGKLRFKKIKPEAFEANRFYTVINKKSGEIVPMEVNFNFDDPNLIILPLAFGKRQGREFIWNDLLSLETGSLKLANGRVIEKTLYNRRTRQDEPALFVALTFERREVLDSSNIKPMNLIGVDRGENIPAVIALTDPEGCPLSRFKDSLGNPTHILRIGESYKEKQRTIQAKKEVEQRRAGGYSRKYASKAKNLADDMVRNTARDLLYYAVTQDAMLIFENLSRGFGRQGKRTFMAERQYTRMEDWLTAKLAYEGLPSKTYLSKTLAQYTSKTCSNCGFTITSADYDRVLEKLKKTATGWMTTINGKELKVEGQITYYNRYKRQNVVKDLSVELDRLSEESVNNDISSWTKGRSGEALSLLKKRFSHRPVQEKFVCLNCGFETHADEQAALNIARSWLFLRSQEYKKYQTNKTTGNTDKRAFVETWQSFYRKKLKEVWKPAV

SEQ ID NO: 43880 - protein, 978 aa, synthetic construct
  REGION 1..978: note = engineered CasX variant
QEIKRINKIRRRLVKDSNTKKAGKTGPMKTLLVRVMTPDLRERLENLRKKPENIPQPISNTSRANLNKLLTDYTEMKKAILHVYWEEFQKDPVGLMSRVAQPASKKIDQNKLKPEMDEKGNLTTAGFACSQCGQPLFVYKLEQVSEKGKAYTNYFGRCNVAEHEKLILLAQLKPEKDSDEAVTYSLGKFGQRALDFYSIHVTKESTHPVKPLAQIAGNRYASYPVGKALSDACMGTIASFLSKYQDIIIEHQKVVKGNQKRLESLRELAGKENLEYPSVTLPPQPHTKEGVDAYNEVIARVRTWVNLNLWQKLKLSRDDAKPLLRLKGFPSFPLVERQANEVDWWDMVCNVKKLINEKKEDGKVFWQNLAGYKRQEALRPYLSSEEDREKGKKFARYQLGDLLLHLEKKHGEDWGKVYDEAWERIDKKVEGLSKHIKLEEERRSEDAQSKAALTDWLRAKASFVIEGLKEADKDEFCRCELKLQKWYGDLRGKPFAIEAENSILDISGFSKQYNCAFIWQKDGVKKLNLYLIINYFKGGKLRFKKIKPEAFEANRFYTVINKKSGEIVPMEVNFNFDDPNLIILPLAFGKRQGREFIWNDLLSLETGSLKLANGRVIEKTLYNRRTRQDEPALFVALTFERREVLDSSNIKPMNLIGVDRGENIPAVIALTDPEGCPLSRFKDSLGNPTHILRIGESYKEKQRTIQAKKEVEQRRAGGYSRKYASKAKNLADDMVRNTARDLLYYAVTQDAMLIFENLSRGFGRQGKRTFMAERQYTRMEDWLTAKLAYEGLPSKTYLSKTLAQYTSKTCSNCGFTITSADYDRVLEKLKKTATGWMTTINGKELKVEGQITYYNRYKRQNVVKDLSVELDRLSEESVNNDISSWTKGRSGEALSLLKKRFSHRPVQEKFVCLNCGFETHADEQAALNIARSWLFLRSQEYKKYQTNKTTGNTDKRAFVETWQSFYRKKLKEVWKPAV

SEQ ID NO: 43881 - protein, 978 aa, synthetic construct
  REGION 1..978: note = engineered CasX variant
QEIKRINKIRRRLVKDSNTKKAGKTGPMKTLLVRVMTPDLRERLENLRKKPENIPQPISNTSRANLNKLLTDYTEMKKAILHVYWEEFQKDPVGLMSRVAQPASKKIDQNKLKPEMDEKGNLTTAGFACSQCGQPLFVYKLEQVSEKGKAYTNYFGRCNVAEHEKLILLAQLKPEKDSDEAVTYSLGKFGQRALDFYSIHVTKESTHPVKPLAQIAGNRYASHPVGKALSDACMGTIASFLSKYQDIIIEHQKVVKGNQKRLESLRELAGKENLEYPSVTLPPQPHTKEGVDAYNEVIARVRTWVNLNLWQKLKLSRDDAKPLLRLKGFPSFPLVERQANEVDWWDMVCNVKKLINEKKEDGKVFWQNLAGYKRQEALRPYLSSEEDREKGKKFARYQLGDLLLHLEKKHGEDWGKVYDEAWERIDKKVEGLSKHIKLEEERRSEDAQSKAALTDWLRAKASFVIEGLKEADKDEFCRCELKLQKWYGDLRGKPFAIEAENSILDISGFSKQYNCAFIWQKDGVKKLNLYLIINYFKGGKLRFKKIKPEAFEANRFYTVINKKSGEIVPMEVNFNFDDPNLIILPLAFGKRQGREFIWNDLLSLETGSLKLANGRVIEKTLYNRRTRQDEPALFVALTFERREVLDSSNIKPMNLIGVDRGENIPAVIALTDPEGCPLSRFKDSLGNPTHILRIGESYKEKQRTIQAKKEVEQRRAGGYSRKYASKAKNLADDMVRNTARDLLYYAVTQDAMLIFENLSRGFGRQGKRTFMAERQYTRMEDWLTAKLAYEGLPSKTYLSKTLAQYTSKTCSNCGFTITSADYDRVLEKLKKTATGWMTTINGKELKVEGQITYYNRYKRQNVVKDLSVELDRLSEESVNNDISSWTKGRSGEALSLLKKRFSHRPVQEKFVCLNCGFETHADEQAALNIARSWLFLRSQEYKKYQTNKTTGNTDKRAFVETWQSFYRKKLKEVWKPAV

SEQ ID NO: 43882 - protein, 978 aa, synthetic construct
  REGION 1..978: note = engineered CasX variant
QEIKRINKIRRRLVKDSNTKKAGKTGPMKTLLVRVMTPDLRERLENLRKKPENIPQPISNTSRANLNKLLTDYTEMKKAILHVYWEEFQKDPVGLMSRVAQPASKKIDQNKLKPEMDEKGNLTTAGFACSQCGQPLFVYKLEQVSEKGKAYTNYFGRCNVAEHEKLILLAQLKPEKDSDEAVTYSLGKFGQRALDFYSIHVTKESTHPVKPLAQIAGNRYASSPVGKALSDACMGTIASFLSKYQDIIIEHQKVVKGNQKRLESLRELAGKENLEYPSVTLPPQPHTKEGVDAYNEVIARVRTWVNLNLWQKLKLSRDDAKPLLRLKGFPSFPLVERQANEVDWWDMVCNVKKLINEKKEDGKVFWQNLAGYKRQEALRPYLSSEEDREKGKKFARYQLGDLLLHLEKKHGEDWGKVYDEAWERIDKKVEGLSKHIKLEEERRSEDAQSKAALTDWLRAKASFVIEGLKEADKDEFCRCELKLQKWYGDLRGKPFAIEAENSILDISGFSKQYNCAFIWQKDGVKKLNLYLIINYFKGGKLRFKKIKPEAFEANRFYTVINKKSGEIVPMEVNFNFDDPNLIILPLAFGKRQGREFIWNDLLSLETGSLKLANGRVIEKTLYNRRTRQDEPALFVALTFERREVLDSSNIKPMNLIGVDRGENIPAVIALTDPEGCPLSRFKDSLGNPTHILRIGESYKEKQRTIQAKKEVEQRRAGGYSRKYASKAKNLADDMVRNTARDLLYYAVTQDAMLIFENLSRGFGRQGKRTFMAERQYTRMEDWLTAKLAYEGLPSKTYLSKTLAQYTSKTCSNCGFTITSADYDRVLEKLKKTATGWMTTINGKELKVEGQITYYNRYKRQNVVKDLSVELDRLSEESVNNDISSWTKGRSGEALSLLKKRFSHRPVQEKFVCLNCGFETHADEQAALNIARSWLFLRSQEYKKYQTNKTTGNTDKRAFVETWQSFYRKKLKEVWKPAV

SEQ ID NO: 43883 - protein, 978 aa, synthetic construct
  REGION 1..978: note = engineered CasX variant
QEIKRINKIRRRLVKDSNTKKAGKTGPMKTLLVRVMTPDLRERLENLRKKPENIPQPISNTSRANLNKLLTDYTEMKKAILHVYWEEFQKDPVGLMSRVAQPASKKIDQNKLKPEMDEKGNLTTAGFACSQCGQPLFVYKLEQVSEKGKAYTNYFGRCNVAEHEKLILLAQLKPEKDSDEAVTYSLGKFGQRALDFYSIHVTKESTHPVKPLAQIAGNRYASTPVGKALSDACMGTIASFLSKYQDIIIEHQKVVKGNQKRLESLRELAGKENLEYPSVTLPPQPHTKEGVDAYNEVIARVRTWVNLNLWQKLKLSRDDAKPLLRLKGFPSFPLVERQANEVDWWDMVCNVKKLINEKKEDGKVFWQNLAGYKRQEALRPYLSSEEDREKGKKFARYQLGDLLLHLEKKHGEDWGKVYDEAWERIDKKVEGLSKHIKLEEERRSEDAQSKAALTDWLRAKASFVIEGLKEADKDEFCRCELKLQKWYGDLRGKPFAIEAENSILDISGFSKQYNCAFIWQKDGVKKLNLYLIINYFKGGKLRFKKIKPEAFEANRFYTVINKKSGEIVPMEVNFNFDDPNLIILPLAFGKRQGREFIWNDLLSLETGSLKLANGRVIEKTLYNRRTRQDEPALFVALTFERREVLDSSNIKPMNLIGVDRGENIPAVIALTDPEGCPLSRFKDSLGNPTHILRIGESYKEKQRTIQAKKEVEQRRAGGYSRKYASKAKNLADDMVRNTARDLLYYAVTQDAMLIFENLSRGFGRQGKRTFMAERQYTRMEDWLTAKLAYEGLPSKTYLSKTLAQYTSKTCSNCGFTITSADYDRVLEKLKKTATGWMTTINGKELKVEGQITYYNRYKRQNVVKDLSVELDRLSEESVNNDISSWTKGRSGEALSLLKKRFSHRPVQEKFVCLNCGFETHADEQAALNIARSWLFLRSQEYKKYQTNKTTGNTDKRAFVETWQSFYRKKLKEVWKPAV

SEQ ID NO: 43884 - protein, 978 aa, synthetic construct
  REGION 1..978: note = engineered CasX variant
QEIKRINKIRRRLVKDSNTKKAGKTGPMKTLLVRVMTPDLRERLENLRKKPENIPQPISNTSRANLNKLLTDYTEMKKAILHVYWEEFQKDPVGLMSRVAQPASKKIDQNKLKPEMDEKGNLTTAGFACSQCGQPLFVYKLEQVSEKGKAYTNYFGRCNVAEHEKLILLAQLKPEKDSDEAVTYSLGKFGQRALDFYSIHVTKESTHPVKPLAQIAGNRYASAPVGKALSDACMGTIASFLSKYQDIIIEHQKVVKGNQKRLESLRELAGKENLEYPSVTLPPQPHTKEGVDAYNEVIARVRTWVNLNLWQKLKLSRDDAKPLLRLKGFPSFPLVERQANEVDWWDMVCNVKKLINEKKEDGKVFWQNLAGYKRQEALRPYLSSEEDREKGKKFARYQLGDLLLHLEKKHGEDWGKVYDEAWERIDKKVEGLSKHIKLEEERRSEDAQSKAALTDWLRAKASFVIEGLKEADKDEFCRCELKLQKWYGDLRGKPFAIEAENSILDISGFSKQYNCAFIWQKDGVKKLNLYLIINYFKGGKLRFKKIKPEAFEANRFYTVINKKSGEIVPMEVNFNFDDPNLIILPLAFGKRQGREFIWNDLLSLETGSLKLANGRVIEKTLYNRRTRQDEPALFVALTFERREVLDSSNIKPMNLIGVDRGENIPAVIALTDPEGCPLSRFKDSLGNPTHILRIGESYKEKQRTIQAKKEVEQRRAGGYSRKYASKAKNLADDMVRNTARDLLYYAVTQDAMLIFENLSRGFGRQGKRTFMAERQYTRMEDWLTAKLAYEGLPSKTYLSKTLAQYTSKTCSNCGFTITSADYDRVLEKLKKTATGWMTTINGKELKVEGQITYYNRYKRQNVVKDLSVELDRLSEESVNNDISSWTKGRSGEALSLLKKRFSHRPVQEKFVCLNCGFETHADEQAALNIARSWLFLRSQEYKKYQTNKTTGNTDKRAFVETWQSFYRKKLKEVWKPAV

SEQ ID NO: 43885 - protein, 978 aa, synthetic construct
  REGION 1..978: note = engineered CasX variant
QEIKRINKIRRRLVKDSNTKKAGKTGPMKTLLVRVMTPDLRERLENLRKKPENIPQPISNTSRANLNKLLTDYTEMKKAILHVYWEEFQKDPVGLMSRVAQPASKKIDQNKLKPEMDEKGNLTTAGFACSQCGQPLFVYKLEQVSEKGKAYTNYFGRCNVAEHEKLILLAQLKPEKDSDEAVTYSLGKFGQRALDFYSIHVTKESTHPVKPLAQIAGNRYASVPVGKALSDACMGTIASFLSKYQDIIIEHQKVVKGNQKRLESLRELAGKENLEYPSVTLPPQPHTKEGVDAYNEVIARVRTWVNLNLWQKLKLSRDDAKPLLRLKGFPSFPLVERQANEVDWWDMVCNVKKLINEKKEDGKVFWQNLAGYKRQEALRPYLSSEEDREKGKKFARYQLGDLLLHLEKKHGEDWGKVYDEAWERIDKKVEGLSKHIKLEEERRSEDAQSKAALTDWLRAKASFVIEGLKEADKDEFCRCELKLQKWYGDLRGKPFAIEAENSILDISGFSKQYNCAFIWQKDGVKKLNLYLIINYFKGGKLRFKKIKPEAFEANRFYTVINKKSGEIVPMEVNFNFDDPNLIILPLAFGKRQGREFIWNDLLSLETGSLKLANGRVIEKTLYNRRTRQDEPALFVALTFERREVLDSSNIKPMNLIGVDRGENIPAVIALTDPEGCPLSRFKDSLGNPTHILRIGESYKEKQRTIQAKKEVEQRRAGGYSRKYASKAKNLADDMVRNTARDLLYYAVTQDAMLIFENLSRGFGRQGKRTFMAERQYTRMEDWLTAKLAYEGLPSKTYLSKTLAQYTSKTCSNCGFTITSADYDRVLEKLKKTATGWMTTINGKELKVEGQITYYNRYKRQNVVKDLSVELDRLSEESVNNDISSWTKGRSGEALSLLKKRFSHRPVQEKFVCLNCGFETHADEQAALNIARSWLFLRSQEYKKYQTNKTTGNTDKRAFVETWQSFYRKKLKEVWKPAV

SEQ ID NO: 43886 - protein, 978 aa, synthetic construct
  REGION 1..978: note = engineered CasX variant
QEIKRINKIRRRLVKDSNTKKAGKTGPMKTLLVRVMTPDLRERLENLRKKPENIPQPISNTSRANLNKLLTDYTEMKKAILHVYWEEFQKDPVGLMSRVAQPASKKIDQNKLKPEMDEKGNLTTAGFACSQCGQPLFVYKLEQVSEKGKAYTNYFGRCNVAEHEKLIKLAQLKPEKDSDEAVTYSLGKFGQRALDFYSIHVTKESTHPVKPLAQIAGNRYASGPVGKALSDACMGTIASFLSKYQDIIIEHQKVVKGNQKRLESLRELAGKENLEYPSVTLPPQPHTKEGVDAYNEVIARVRTWVNLNLWQKLKLSRDDAKPLLRLKGFPSFPLVERQANEVDWWDMVCNVKKLINEKKEDGKVFWQNLAGYKRQEALRPYLSSEEDREKGKKFARYQLGDLLLHLEKKHGEDWGKVYDEAWERIDKKVEGLSKHIKLEEERRSEDAQSKAALTDWLRAKASFVIEGLKEADKDEFCRCELKLQKWYGDLRGKPFAIEAENSILDISGFSKQYNCAFIWQKDGVKKLNLYLIINYFKGGKLRFKKIKPEAFEANRFYTVINKKSGEIVPMEVNFNFDDPNLIILPLAFGKRQGREFIWNDLLSLETGSLKLANGRVIEKTLYNRRTRQDEPALFVALTFERREVLDSSNIKPMNLIGVDRGENIPAVIALTDPEGCPLSRFKDSLGNPTHILRIGESYKEKQRTIQAKKEVEQRRAGGYSRKYASKAKNLADDMVRNTARDLLYYAVTQDAMLIFENLSRGFGRQGKRTFMAERQYTRMEDWLTAKLAYEGLPSKTYLSKTLAQYTSKTCSNCGFTITSADYDRVLEKLKKTATGWMTTINGKELKVEGQITYYNRYKRQNVVKDLSVELDRLSEESVNNDISSWTKGRSGEALSLLKKRFSHRPVQEKFVCLNCGFETHADEQAALNIARSWLFLRSQEYKKYQTNKTTGNTDKRAFVETWQSFYRKKLKEVWKPAV

SEQ ID NO: 43887 - protein, 977 aa, synthetic construct
  REGION 1..977: note = engineered CasX variant
QEIKRINKIRRRLVKDSNTKKAGKTGPMKTLLVRVMTPDLRERLENLRKKPENIPQPISNTSRANLNKLLTDYTEMKKAILHVYWEEFQKDPVGLMSRVAQPASKKIDQNKLKPEMDEKGNLTTAGFACSQCGQPLFVYKLEQVSEKGKAYTNYFGRCNVAEHEKLILLAQLKPEKDSDEAVTYSLGKFGQRALDFYSIHVTKESTHPVKPLAQIAGNRYASPVGKALSDACMGTIASFLSKYQDIIIEHQKVVKGNQKRLESLRELAGKENLEYPSVTLPPQPHTKEGVDAYNEVIARVRTWVNLNLWQKLKLSRDDAKPLLRLKGFPSFPLVERQANEVDWWDMVCNVKKLINEKKEDGKVFWQNLAGYKRQEALRPYLSSEEDREKGKKFARYQLGDLLLHLEKKHGEDWGKVYDEAWERIDKKVEGLSKHIKLEEERRSEDAQSKAALTDWLRAKASFVIEGLKEADKDEFCRCELKLQKWYGDLRGKPFAIEAENSILDISGFSKQYNCAFIWQKDGVKKLNLYLIINYFKGGKLRFKKIKPEAFEANRFYTVINKKSGEIVPMEVNFNFDDPNLIILPLAFGKRQGREFIWNDLLSLETGSLKLANGRVIEKTLYNRRTRQDEPALFVALTFERREVLDSSNIKPMNLIGVDRGENIPAVIALTDPEGCPLSRFKDSLGNPTHILRIGESYKEKQRTIQAKKEVEQRRAGGYSRKYASKAKNLADDMVRNTARDLLYYAVTQDAMLIFENLSRGFGRQGKRTFMAERQYTRMEDWLTAKLAYEGLPSKTYLSKTLAQYTSKTCSNCGFTITSADYDRVLEKLKKTATGWMTTINGKELKVEGQITYYNRYKRQNVVKDLSVELDRLSEESVNNDISSWTKGRSGEALSLLKKRFSHRPVQEKFVCLNCGFETHADEQAALNIARSWLFLRSQEYKKYQTNKTTGNTDKRAFVETWQSFYRKKLKEVWKPAV

SEQ ID NO: 43888 - protein, 978 aa, synthetic construct
  REGION 1..978: note = engineered CasX variant
QEIKRINKIRRRLVKDSNTKKAGKTGPMKTLLVRVMTPDLRERLENLRKKPENIPQPISNTSRANLNKLLTDYTEMKKAILHVYWEEFQKDPVGLMSRVAQPASKKIDQNKLKPEMDEKGNLTTAGFACSQCGQPLFVYKLEQVSEKGKAYTNYFGRCNVAEHEKLILLAQLKPEKDSDEAVTYSLGKFGQRALDFYSIHVTKESTHPVKPLAQIAGNRYASYPVGKALSDACMGTIASFLSKYQDIIIEHQKVVKGNQKRLESLRELAGKENLEYPSVTLPPQPHTKEGVDAYNEVIARVRTWVNLNLWQKLKLSRDDAKPLLRLKGFPSFPLVERQANEVDWWDMVCNVKKLINEKKEDGKVFWQNLAGYKRQEALRPYLSSEEDRKKGKKFARYQLGDLLLHLEKKHGEDWGKVYDEAWERIDKKVEGLSKHIKLEEERRSEDAQSKAALTDWLRAKASFVIEGLKEADKDEFCRCELKLQKWYGDLRGKPFAIEAENSILDISGFSKQYNCAFIWQKDGVKKLNLYLIINYFKGGKLRFKKIKPEAFEANRFYTVINKKSGEIVIMEVNFNFDDPNLIILPLAFGKRQGREFIWNDLLSLETGSLKLANGRVIEKTLYNRRTRQDEPALFVALTFERREVLDSSNIKPMNLIGVDRGENIPAVIALTDPEGCPLSRFKDSLGNPTHILRIGESYKEKQRTIQAKKEVEQRRAGGYSRKYASKAKNLADDMVRNTARDLLYYAVTQDAMLIFENLSRGFGRQGKRTFMAERQYTRMEDWLTAKLAYEGLPSKTYLSKTLAQYTSKTCSNCGFTITSADYDRVLEKLKKTATGWMTTINGKELKVEGQITYYNRYKRQNVVKDLSVELDRLSEESVNNDISSWTKGRSGEALSLLKKRFSHRPVQEKFVCLNCGFETHADEQAALNIARSWLFLRSQEYKKYQTNKTTGNTDKRAFVETWQSFYRKKLKEVWKPAV

SEQ ID NO: 43889 - protein, 978 aa, synthetic construct
  REGION 1..978: note = engineered CasX variant
QEIKRINKIRRRLVKDSNTKKAGKTGPMKTLLVRVMTPDLRERLENLRKKPENIPQPISNTSRANLNKLLTDYTEMKKAILHVYWEEFQKDPVGLMSRVAQPASKKIDQNKLKPEMDEKGNLTTAGFACSQCGQPLFVYKLEQVSEKGKAYTNYFGRCNVAEHEKLILLAQLKPEKDSDEAVTYSLGKFGQRALDFYSIHVTKESTHPVKPLAQIAGNRYASHPVGKALSDACMGTIASFLSKYQDIIIEHQKVVKGNQKRLESLRELAGKENLEYPSVTLPPQPHTKEGVDAYNEVIARVRTWVNLNLWQKLKLSRDDAKPLLRLKGFPSFPLVERQANEVDWWDMVCNVKKLINEKKEDGKVFWQNLAGYKRQEALRPYLSSEEDRKKGKKFARYQLGDLLLHLEKKHGEDWGKVYDEAWERIDKKVEGLSKHIKLEEERRSEDAQSKAALTDWLRAKASFVIEGLKEADKDEFCRCELKLQKWYGDLRGKPFAIEAENSILDISGFSKQYNCAFIWQKDGVKKLNLYLIINYFKGGKLRFKKIKPEAFEANRFYTVINKKSGEIVIMEVNFNFDDPNLIILPLAFGKRQGREFIWNDLLSLETGSLKLANGRVIEKTLYNRRTRQDEPALFVALTFERREVLDSSNIKPMNLIGVDRGENIPAVIALTDPEGCPLSRFKDSLGNPTHILRIGESYKEKQRTIQAKKEVEQRRAGGYSRKYASKAKNLADDMVRNTARDLLYYAVTQDAMLIFENLSRGFGRQGKRTFMAERQYTRMEDWLTAKLAYEGLPSKTYLSKTLAQYTSKTCSNCGFTITSADYDRVLEKLKKTATGWMTTINGKELKVEGQITYYNRYKRQNVVKDLSVELDRLSEESVNNDISSWTKGRSGEALSLLKKRFSHRPVQEKFVCLNCGFETHADEQAALNIARSWLFLRSQEYKKYQTNKTTGNTDKRAFVETWQSFYRKKLKEVWKPAV

SEQ ID NO: 43890 - protein, 978 aa, synthetic construct
  REGION 1..978: note = engineered CasX variant
QEIKRINKIRRRLVKDSNTKKAGKTGPMKTLLVRVMTPDLRERLENLRKKPENIPQPISNTSRANLNKLLTDYTEMKKAILHVYWEEFQKDPVGLMSRVAQPASKKIDQNKLKPEMDEKGNLTTAGFACSQCGQPLFVYKLEQVSEKGKAYTNYFGRCNVAEHEKLILLAQLKPEKDSDEAVTYSLGKFGQRALDFYSIHVTKESTHPVKPLAQIAGNRYASSPVGKALSDACMGTIASFLSKYQDIIIEHQKVVKGNQKRLESLRELAGKENLEYPSVTLPPQPHTKEGVDAYNEVIARVRTWVNLNLWQKLKLSRDDAKPLLRLKGFPSFPLVERQANEVDWWDMVCNVKKLINEKKEDGKVFWQNLAGYKRQEALRPYLSSEEDRKKGKKFARYQLGDLLLHLEKKHGEDWGKVYDEAWERIDKKVEGLSKHIKLEEERRSEDAQSKAALTDWLRAKASFVIEGLKEADKDEFCRCELKLQKWYGDLRGKPFAIEAENSILDISGFSKQYNCAFIWQKDGVKKLNLYLIINYFKGGKLRFKKIKPEAFEANRFYTVINKKSGEIVIMEVNFNFDDPNLIILPLAFGKRQGREFIWNDLLSLETGSLKLANGRVIEKTLYNRRTRQDEPALFVALTFERREVLDSSNIKPMNLIGVDRGENIPAVIALTDPEGCPLSRFKDSLGNPTHILRIGESYKEKQRTIQAKKEVEQRRAGGYSRKYASKAKNLADDMVRNTARDLLYYAVTQDAMLIFENLSRGFGRQGKRTFMAERQYTRMEDWLTAKLAYEGLPSKTYLSKTLAQYTSKTCSNCGFTITSADYDRVLEKLKKTATGWMTTINGKELKVEGQITYYNRYKRQNVVKDLSVELDRLSEESVNNDISSWTKGRSGEALSLLKKRFSHRPVQEKFVCLNCGFETHADEQAALNIARSWLFLRSQEYKKYQTNKTTGNTDKRAFVETWQSFYRKKLKEVWKPAV

SEQ ID NO: 43891 - protein, 978 aa, synthetic construct
  REGION 1..978: note = engineered CasX variant
QEIKRINKIRRRLVKDSNTKKAGKTGPMKTLLVRVMTPDLRERLENLRKKPENIPQPISNTSRANLNKLLTDYTEMKKAILHVYWEEFQKDPVGLMSRVAQPASKKIDQNKLKPEMDEKGNLTTAGFACSQCGQPLFVYKLEQVSEKGKAYTNYFGRCNVAEHEKLILLAQLKPEKDSDEAVTYSLGKFGQRALDFYSIHVTKESTHPVKPLAQIAGNRYASTPVGKALSDACMGTIASFLSKYQDIIIEHQKVVKGNQKRLESLRELAGKENLEYPSVTLPPQPHTKEGVDAYNEVIARVRTWVNLNLWQKLKLSRDDAKPLLRLKGFPSFPLVERQANEVDWWDMVCNVKKLINEKKEDGKVFWQNLAGYKRQEALRPYLSSEEDRKKGKKFARYQLGDLLLHLEKKHGEDWGKVYDEAWERIDKKVEGLSKHIKLEEERRSEDAQSKAALTDWLRAKASFVIEGLKEADKDEFCRCELKLQKWYGDLRGKPFAIEAENSILDISGFSKQYNCAFIWQKDGVKKLNLYLIINYFKGGKLRFKKIKPEAFEANRFYTVINKKSGEIVIMEVNFNFDDPNLIILPLAFGKRQGREFIWNDLLSLETGSLKLANGRVIEKTLYNRRTRQDEPALFVALTFERREVLDSSNIKPMNLIGVDRGENIPAVIALTDPEGCPLSRFKDSLGNPTHILRIGESYKEKQRTIQAKKEVEQRRAGGYSRKYASKAKNLADDMVRNTARDLLYYAVTQDAMLIFENLSRGFGRQGKRTFMAERQYTRMEDWLTAKLAYEGLPSKTYLSKTLAQYTSKTCSNCGFTITSADYDRVLEKLKKTATGWMTTINGKELKVEGQITYYNRYKRQNVVKDLSVELDRLSEESVNNDISSWTKGRSGEALSLLKKRFSHRPVQEKFVCLNCGFETHADEQAALNIARSWLFLRSQEYKKYQTNKTTGNTDKRAFVETWQSFYRKKLKEVWKPAV

SEQ ID NO: 43892 - protein, 978 aa, synthetic construct
  REGION 1..978: note = engineered CasX variant
QEIKRINKIRRRLVKDSNTKKAGKTGPMKTLLVRVMTPDLRERLENLRKKPENIPQPISNTSRANLNKLLTDYTEMKKAILHVYWEEFQKDPVGLMSRVAQPASKKIDQNKLKPEMDEKGNLTTAGFACSQCGQPLFVYKLEQVSEKGKAYTNYFGRCNVAEHEKLILLAQLKPEKDSDEAVTYSLGKFGQRALDFYSIHVTKESTHPVKPLAQIAGNRYASAPVGKALSDACMGTIASFLSKYQDIIIEHQKVVKGNQKRLESLRELAGKENLEYPSVTLPPQPHTKEGVDAYNEVIARVRTWVNLNLWQKLKLSRDDAKPLLRLKGFPSFPLVERQANEVDWWDMVCNVKKLINEKKEDGKVFWQNLAGYKRQEALRPYLSSEEDRKKGKKFARYQLGDLLLHLEKKHGEDWGKVYDEAWERIDKKVEGLSKHIKLEEERRSEDAQSKAALTDWLRAKASFVIEGLKEADKDEFCRCELKLQKWYGDLRGKPFAIEAENSILDISGFSKQYNCAFIWQKDGVKKLNLYLIINYFKGGKLRFKKIKPEAFEANRFYTVINKKSGEIVIMEVNFNFDDPNLIILPLAFGKRQGREFIWNDLLSLETGSLKLANGRVIEKTLYNRRTRQDEPALFVALTFERREVLDSSNIKPMNLIGVDRGENIPAVIALTDPEGCPLSRFKDSLGNPTHILRIGESYKEKQRTIQAKKEVEQRRAGGYSRKYASKAKNLADDMVRNTARDLLYYAVTQDAMLIFENLSRGFGRQGKRTFMAERQYTRMEDWLTAKLAYEGLPSKTYLSKTLAQYTSKTCSNCGFTITSADYDRVLEKLKKTATGWMTTINGKELKVEGQITYYNRYKRQNVVKDLSVELDRLSEESVNNDISSWTKGRSGEALSLLKKRFSHRPVQEKFVCLNCGFETHADEQAALNIARSWLFLRSQEYKKYQTNKTTGNTDKRAFVETWQSFYRKKLKEVWKPAV

SEQ ID NO: 43893 - protein, 978 aa, synthetic construct
  REGION 1..978: note = engineered CasX variant
QEIKRINKIRRRLVKDSNTKKAGKTGPMKTLLVRVMTPDLRERLENLRKKPENIPQPISNTSRANLNKLLTDYTEMKKAILHVYWEEFQKDPVGLMSRVAQPASKKIDQNKLKPEMDEKGNLTTAGFACSQCGQPLFVYKLEQVSEKGKAYTNYFGRCNVAEHEKLILLAQLKPEKDSDEAVTYSLGKFGQRALDFYSIHVTKESTHPVKPLAQIAGNRYASVPVGKALSDACMGTIASFLSKYQDIIIEHQKVVKGNQKRLESLRELAGKENLEYPSVTLPPQPHTKEGVDAYNEVIARVRTWVNLNLWQKLKLSRDDAKPLLRLKGFPSFPLVERQANEVDWWDMVCNVKKLINEKKEDGKVFWQNLAGYKRQEALRPYLSSEEDRKKGKKFARYQLGDLLLHLEKKHGEDWGKVYDEAWERIDKKVEGLSKHIKLEEERRSEDAQSKAALTDWLRAKASFVIEGLKEADKDEFCRCELKLQKWYGDLRGKPFAIEAENSILDISGFSKQYNCAFIWQKDGVKKLNLYLIINYFKGGKLRFKKIKPEAFEANRFYTVINKKSGEIVIMEVNFNFDDPNLIILPLAFGKRQGREFIWNDLLSLETGSLKLANGRVIEKTLYNRRTRQDEPALFVALTFERREVLDSSNIKPMNLIGVDRGENIPAVIALTDPEGCPLSRFKDSLGNPTHILRIGESYKEKQRTIQAKKEVEQRRAGGYSRKYASKAKNLADDMVRNTARDLLYYAVTQDAMLIFENLSRGFGRQGKRTFMAERQYTRMEDWLTAKLAYEGLPSKTYLSKTLAQYTSKTCSNCGFTITSADYDRVLEKLKKTATGWMTTINGKELKVEGQITYYNRYKRQNVVKDLSVELDRLSEESVNNDISSWTKGRSGEALSLLKKRFSHRPVQEKFVCLNCGFETHADEQAALNIARSWLFLRSQEYKKYQTNKTTGNTDKRAFVETWQSFYRKKLKEVWKPAV

SEQ ID NO: 43894 - protein, 978 aa, synthetic construct
  REGION 1..978: note = engineered CasX variant
QEIKRINKIRRRLVKDSNTKKAGKTGPMKTLLVRVMTPDLRERLENLRKKPENIPQPISNTSRANLNKLLTDYTEMKKAILHVYWEEFQKDPVGLMSRVAQPASKKIDQNKLKPEMDEKGNLTTAGFACSQCGQPLFVYKLEQVSEKGKAYTNYFGRCNVAEHEKLIKLAQLKPEKDSDEAVTYSLGKFGQRALDFYSIHVTKESTHPVKPLAQIAGNRYASGPVGKALSDACMGTIASFLSKYQDIIIEHQKVVKGNQKRLESLRELAGKENLEYPSVTLPPQPHTKEGVDAYNEVIARVRTWVNLNLWQKLKLSRDDAKPLLRLKGFPSFPLVERQANEVDWWDMVCNVKKLINEKKEDGKVFWQNLAGYKRQEALRPYLSSEEDRKKGKKFARYQLGDLLLHLEKKHGEDWGKVYDEAWERIDKKVEGLSKHIKLEEERRSEDAQSKAALTDWLRAKASFVIEGLKEADKDEFCRCELKLQKWYGDLRGKPFAIEAENSILDISGFSKQYNCAFIWQKDGVKKLNLYLIINYFKGGKLRFKKIKPEAFEANRFYTVINKKSGEIVIMEVNFNFDDPNLIILPLAFGKRQGREFIWNDLLSLETGSLKLANGRVIEKTLYNRRTRQDEPALFVALTFERREVLDSSNIKPMNLIGVDRGENIPAVIALTDPEGCPLSRFKDSLGNPTHILRIGESYKEKQRTIQAKKEVEQRRAGGYSRKYASKAKNLADDMVRNTARDLLYYAVTQDAMLIFENLSRGFGRQGKRTFMAERQYTRMEDWLTAKLAYEGLPSKTYLSKTLAQYTSKTCSNCGFTITSADYDRVLEKLKKTATGWMTTINGKELKVEGQITYYNRYKRQNVVKDLSVELDRLSEESVNNDISSWTKGRSGEALSLLKKRFSHRPVQEKFVCLNCGFETHADEQAALNIARSWLFLRSQEYKKYQTNKTTGNTDKRAFVETWQSFYRKKLKEVWKPAV

SEQ ID NO: 43895 - protein, 977 aa, synthetic construct
  REGION 1..977: note = engineered CasX variant
QEIKRINKIRRRLVKDSNTKKAGKTGPMKTLLVRVMTPDLRERLENLRKKPENIPQPISNTSRANLNKLLTDYTEMKKAILHVYWEEFQKDPVGLMSRVAQPASKKIDQNKLKPEMDEKGNLTTAGFACSQCGQPLFVYKLEQVSEKGKAYTNYFGRCNVAEHEKLILLAQLKPEKDSDEAVTYSLGKFGQRALDFYSIHVTKESTHPVKPLAQIAGNRYASPVGKALSDACMGTIASFLSKYQDIIIEHQKVVKGNQKRLESLRELAGKENLEYPSVTLPPQPHTKEGVDAYNEVIARVRTWVNLNLWQKLKLSRDDAKPLLRLKGFPSFPLVERQANEVDWWDMVCNVKKLINEKKEDGKVFWQNLAGYKRQEALRPYLSSEEDRKKGKKFARYQLGDLLLHLEKKHGEDWGKVYDEAWERIDKKVEGLSKHIKLEEERRSEDAQSKAALTDWLRAKASFVIEGLKEADKDEFCRCELKLQKWYGDLRGKPFAIEAENSILDISGFSKQYNCAFIWQKDGVKKLNLYLIINYFKGGKLRFKKIKPEAFEANRFYTVINKKSGEIVIMEVNFNFDDPNLIILPLAFGKRQGREFIWNDLLSLETGSLKLANGRVIEKTLYNRRTRQDEPALFVALTFERREVLDSSNIKPMNLIGVDRGENIPAVIALTDPEGCPLSRFKDSLGNPTHILRIGESYKEKQRTIQAKKEVEQRRAGGYSRKYASKAKNLADDMVRNTARDLLYYAVTQDAMLIFENLSRGFGRQGKRTFMAERQYTRMEDWLTAKLAYEGLPSKTYLSKTLAQYTSKTCSNCGFTITSADYDRVLEKLKKTATGWMTTINGKELKVEGQITYYNRYKRQNVVKDLSVELDRLSEESVNNDISSWTKGRSGEALSLLKKRFSHRPVQEKFVCLNCGFETHADEQAALNIARSWLFLRSQEYKKYQTNKTTGNTDKRAFVETWQSFYRKKLKEVWKPAV

SEQ ID NO: 43896 - protein, 978 aa, synthetic construct
  REGION 1..978: note = engineered CasX variant
QEIKRINKIRRRLVKDSNTKKAGKTGPMKTLLVRVMTPDLRERLENLRKKPENIPQPISNTSRANLNKLLTDYTEMKKAILHVYWEEFQKDPVGLMSRVAQPASKKIDQNKLKPEMDEKGNLTTAGFACSQCGQPLFVYKLEQVSEKGKAYTNYFGRCNVAEHEKLILLAQLKPEKDSDEAVTYSLGKFGQRALDFYSIHVTKESTHPVKPLAQIAGNRYASYPVGKALSGACMGTIASFLSKYQDIIIEHQKVVKGNQKRLESLRELAGKENLEYPSVTLPPQPHTKEGVDAYNEVIARVRWWVNLNLWQKLKLSRDDAKPLLRLKGFPSFPLVERQANEVDWWDMVCNVKKLINEKKEDGKVFWQNLAGYKRQEALRPYLSSEEDRKKGKKFARYQLGDLLLHLEKKHGEDWGKVYDEAWERIDKKVEGLSKHIKLEEERRSEDAQSKAALTDWLRAKASFVIEGLKEADKDEFCRCELKLQKWYGDLRGKPFAIEAENSILDISGFSKQYNCAFIWQKDGVKKLNLYLIINYFKGGKLRFKKIKPEAFEANRFYTVINKKSGEIVPMEVNFNFDDPNLIILPLAFGKRQGREFIWNDLLSLETGSLKLANGRVIEKTLYNRRTRQDEPALFVALTFERREVLDSSNIKPMNLIGVDRGENIPAVIALTDPEGCPLSRFKDSLGNPTHILRIGESYKEKQRTIQAKKEVEQRRAGGYSRKYASKAKNLADDMVRNTARDLLYYAVTQDAMLIFENLSRGFGRQGKRTFMAERQYTRMEDWLTAKLAYEGLPSKTYLSKTLAQYTSKTCSNCGFTITSADYDRVLEKLKKTATGWMTTINGKELKVEGQITYYNRYKRQNVVKDLSVELDRLSEESVNNDISSWTKGRSGEALSLLKKRFSHRPVQEKFVCLNCGFETHADEQAALNIARSWLFLRSQEYKKYQTNKTTGNTDKRAFVETWQSFYRKKLKEVWKPAV

SEQ ID NO: 43897 - protein, 978 aa, synthetic construct
  REGION 1..978: note = engineered CasX variant
QEIKRINKIRRRLVKDSNTKKAGKTGPMKTLLVRVMTPDLRERLENLRKKPENIPQPISNTSRANLNKLLTDYTEMKKAILHVYWEEFQKDPVGLMSRVAQPASKKIDQNKLKPEMDEKGNLTTAGFACSQCGQPLFVYKLEQVSEKGKAYTNYFGRCNVAEHEKLILLAQLKPEKDSDEAVTYSLGKFGQRALDFYSIHVTKESTHPVKPLAQIAGNRYASHPVGKALSGACMGTIASFLSKYQDIIIEHQKVVKGNQKRLESLRELAGKENLEYPSVTLPPQPHTKEGVDAYNEVIARVRWWVNLNLWQKLKLSRDDAKPLLRLKGFPSFPLVERQANEVDWWDMVCNVKKLINEKKEDGKVFWQNLAGYKRQEALRPYLSSEEDRKKGKKFARYQLGDLLLHLEKKHGEDWGKVYDEAWERIDKKVEGLSKHIKLEEERRSEDAQSKAALTDWLRAKASFVIEGLKEADKDEFCRCELKLQKWYGDLRGKPFAIEAENSILDISGFSKQYNCAFIWQKDGVKKLNLYLIINYFKGGKLRFKKIKPEAFEANRFYTVINKKSGEIVPMEVNFNFDDPNLIILPLAFGKRQGREFIWNDLLSLETGSLKLANGRVIEKTLYNRRTRQDEPALFVALTFERREVLDSSNIKPMNLIGVDRGENIPAVIALTDPEGCPLSRFKDSLGNPTHILRIGESYKEKQRTIQAKKEVEQRRAGGYSRKYASKAKNLADDMVRNTARDLLYYAVTQDAMLIFENLSRGFGRQGKRTFMAERQYTRMEDWLTAKLAYEGLPSKTYLSKTLAQYTSKTCSNCGFTITSADYDRVLEKLKKTATGWMTTINGKELKVEGQITYYNRYKRQNVVKDLSVELDRLSEESVNNDISSWTKGRSGEALSLLKKRFSHRPVQEKFVCLNCGFETHADEQAALNIARSWLFLRSQEYKKYQTNKTTGNTDKRAFVETWQSFYRKKLKEVWKPAV

SEQ ID NO: 43898 - protein, 978 aa, synthetic construct
  REGION 1..978: note = engineered CasX variant
QEIKRINKIRRRLVKDSNTKKAGKTGPMKTLLVRVMTPDLRERLENLRKKPENIPQPISNTSRANLNKLLTDYTEMKKAILHVYWEEFQKDPVGLMSRVAQPASKKIDQNKLKPEMDEKGNLTTAGFACSQCGQPLFVYKLEQVSEKGKAYTNYFGRCNVAEHEKLILLAQLKPEKDSDEAVTYSLGKFGQRALDFYSIHVTKESTHPVKPLAQIAGNRYASSPVGKALSGACMGTIASFLSKYQDIIIEHQKVVKGNQKRLESLRELAGKENLEYPSVTLPPQPHTKEGVDAYNEVIARVRWWVNLNLWQKLKLSRDDAKPLLRLKGFPSFPLVERQANEVDWWDMVCNVKKLINEKKEDGKVFWQNLAGYKRQEALRPYLSSEEDRKKGKKFARYQLGDLLLHLEKKHGEDWGKVYDEAWERIDKKVEGLSKHIKLEEERRSEDAQSKAALTDWLRAKASFVIEGLKEADKDEFCRCELKLQKWYGDLRGKPFAIEAENSILDISGFSKQYNCAFIWQKDGVKKLNLYLIINYFKGGKLRFKKIKPEAFEANRFYTVINKKSGEIVPMEVNFNFDDPNLIILPLAFGKRQGREFIWNDLLSLETGSLKLANGRVIEKTLYNRRTRQDEPALFVALTFERREVLDSSNIKPMNLIGVDRGENIPAVIALTDPEGCPLSRFKDSLGNPTHILRIGESYKEKQRTIQAKKEVEQRRAGGYSRKYASKAKNLADDMVRNTARDLLYYAVTQDAMLIFENLSRGFGRQGKRTFMAERQYTRMEDWLTAKLAYEGLPSKTYLSKTLAQYTSKTCSNCGFTITSADYDRVLEKLKKTATGWMTTINGKELKVEGQITYYNRYKRQNVVKDLSVELDRLSEESVNNDISSWTKGRSGEALSLLKKRFSHRPVQEKFVCLNCGFETHADEQAALNIARSWLFLRSQEYKKYQTNKTTGNTDKRAFVETWQSFYRKKLKEVWKPAV

SEQ ID NO: 43899 - protein, 978 aa, synthetic construct
  REGION 1..978: note = engineered CasX variant
QEIKRINKIRRRLVKDSNTKKAGKTGPMKTLLVRVMTPDLRERLENLRKKPENIPQPISNTSRANLNKLLTDYTEMKKAILHVYWEEFQKDPVGLMSRVAQPASKKIDQNKLKPEMDEKGNLTTAGFACSQCGQPLFVYKLEQVSEKGKAYTNYFGRCNVAEHEKLILLAQLKPEKDSDEAVTYSLGKFGQRALDFYSIHVTKESTHPVKPLAQIAGNRYASTPVGKALSGACMGTIASFLSKYQDIIIEHQKVVKGNQKRLESLRELAGKENLEYPSVTLPPQPHTKEGVDAYNEVIARVRWWVNLNLWQKLKLSRDDAKPLLRLKGFPSFPLVERQANEVDWWDMVCNVKKLINEKKEDGKVFWQNLAGYKRQEALRPYLSSEEDRKKGKKFARYQLGDLLLHLEKKHGEDWGKVYDEAWERIDKKVEGLSKHIKLEEERRSEDAQSKAALTDWLRAKASFVIEGLKEADKDEFCRCELKLQKWYGDLRGKPFAIEAENSILDISGFSKQYNCAFIWQKDGVKKLNLYLIINYFKGGKLRFKKIKPEAFEANRFYTVINKKSGEIVPMEVNFNFDDPNLIILPLAFGKRQGREFIWNDLLSLETGSLKLANGRVIEKTLYNRRTRQDEPALFVALTFERREVLDSSNIKPMNLIGVDRGENIPAVIALTDPEGCPLSRFKDSLGNPTHILRIGESYKEKQRTIQAKKEVEQRRAGGYSRKYASKAKNLADDMVRNTARDLLYYAVTQDAMLIFENLSRGFGRQGKRTFMAERQYTRMEDWLTAKLAYEGLPSKTYLSKTLAQYTSKTCSNCGFTITSADYDRVLEKLKKTATGWMTTINGKELKVEGQITYYNRYKRQNVVKDLSVELDRLSEESVNNDISSWTKGRSGEALSLLKKRFSHRPVQEKFVCLNCGFETHADEQAALNIARSWLFLRSQEYKKYQTNKTTGNTDKRAFVETWQSFYRKKLKEVWKPAV

SEQ ID NO: 43900 - protein, 978 aa, synthetic construct
  REGION 1..978: note = engineered CasX variant
QEIKRINKIRRRLVKDSNTKKAGKTGPMKTLLVRVMTPDLRERLENLRKKPENIPQPISNTSRANLNKLLTDYTEMKKAILHVYWEEFQKDPVGLMSRVAQPASKKIDQNKLKPEMDEKGNLTTAGFACSQCGQPLFVYKLEQVSEKGKAYTNYFGRCNVAEHEKLILLAQLKPEKDSDEAVTYSLGKFGQRALDFYSIHVTKESTHPVKPLAQIAGNRYASAPVGKALSGACMGTIASFLSKYQDIIIEHQKVVKGNQKRLESLRELAGKENLEYPSVTLPPQPHTKEGVDAYNEVIARVRWWVNLNLWQKLKLSRDDAKPLLRLKGFPSFPLVERQANEVDWWDMVCNVKKLINEKKEDGKVFWQNLAGYKRQEALRPYLSSEEDRKKGKKFARYQLGDLLLHLEKKHGEDWGKVYDEAWERIDKKVEGLSKHIKLEEERRSEDAQSKAALTDWLRAKASFVIEGLKEADKDEFCRCELKLQKWYGDLRGKPFAIEAENSILDISGFSKQYNCAFIWQKDGVKKLNLYLIINYFKGGKLRFKKIKPEAFEANRFYTVINKKSGEIVPMEVNFNFDDPNLIILPLAFGKRQGREFIWNDLLSLETGSLKLANGRVIEKTLYNRRTRQDEPALFVALTFERREVLDSSNIKPMNLIGVDRGENIPAVIALTDPEGCPLSRFKDSLGNPTHILRIGESYKEKQRTIQAKKEVEQRRAGGYSRKYASKAKNLADDMVRNTARDLLYYAVTQDAMLIFENLSRGFGRQGKRTFMAERQYTRMEDWLTAKLAYEGLPSKTYLSKTLAQYTSKTCSNCGFTITSADYDRVLEKLKKTATGWMTTINGKELKVEGQITYYNRYKRQNVVKDLSVELDRLSEESVNNDISSWTKGRSGEALSLLKKRFSHRPVQEKFVCLNCGFETHADEQAALNIARSWLFLRSQEYKKYQTNKTTGNTDKRAFVETWQSFYRKKLKEVWKPAV

SEQ ID NO: 43901 - protein, 978 aa, synthetic construct
  REGION 1..978: note = engineered CasX variant
QEIKRINKIRRRLVKDSNTKKAGKTGPMKTLLVRVMTPDLRERLENLRKKPENIPQPISNTSRANLNKLLTDYTEMKKAILHVYWEEFQKDPVGLMSRVAQPASKKIDQNKLKPEMDEKGNLTTAGFACSQCGQPLFVYKLEQVSEKGKAYTNYFGRCNVAEHEKLILLAQLKPEKDSDEAVTYSLGKFGQRALDFYSIHVTKESTHPVKPLAQIAGNRYASVPVGKALSGACMGTIASFLSKYQDIIIEHQKVVKGNQKRLESLRELAGKENLEYPSVTLPPQPHTKEGVDAYNEVIARVRWWVNLNLWQKLKLSRDDAKPLLRLKGFPSFPLVERQANEVDWWDMVCNVKKLINEKKEDGKVFWQNLAGYKRQEALRPYLSSEEDRKKGKKFARYQLGDLLLHLEKKHGEDWGKVYDEAWERIDKKVEGLSKHIKLEEERRSEDAQSKAALTDWLRAKASFVIEGLKEADKDEFCRCELKLQKWYGDLRGKPFAIEAENSILDISGFSKQYNCAFIWQKDGVKKLNLYLIINYFKGGKLRFKKIKPEAFEANRFYTVINKKSGEIVPMEVNFNFDDPNLIILPLAFGKRQGREFIWNDLLSLETGSLKLANGRVIEKTLYNRRTRQDEPALFVALTFERREVLDSSNIKPMNLIGVDRGENIPAVIALTDPEGCPLSRFKDSLGNPTHILRIGESYKEKQRTIQAKKEVEQRRAGGYSRKYASKAKNLADDMVRNTARDLLYYAVTQDAMLIFENLSRGFGRQGKRTFMAERQYTRMEDWLTAKLAYEGLPSKTYLSKTLAQYTSKTCSNCGFTITSADYDRVLEKLKKTATGWMTTINGKELKVEGQITYYNRYKRQNVVKDLSVELDRLSEESVNNDISSWTKGRSGEALSLLKKRFSHRPVQEKFVCLNCGFETHADEQAALNIARSWLFLRSQEYKKYQTNKTTGNTDKRAFVETWQSFYRKKLKEVWKPAV

SEQ ID NO: 43902 - protein, 978 aa, synthetic construct
  REGION 1..978: note = engineered CasX variant
QEIKRINKIRRRLVKDSNTKKAGKTGPMKTLLVRVMTPDLRERLENLRKKPENIPQPISNTSRANLNKLLTDYTEMKKAILHVYWEEFQKDPVGLMSRVAQPASKKIDQNKLKPEMDEKGNLTTAGFACSQCGQPLFVYKLEQVSEKGKAYTNYFGRCNVAEHEKLIKLAQLKPEKDSDEAVTYSLGKFGQRALDFYSIHVTKESTHPVKPLAQIAGNRYASGPVGKALSGACMGTIASFLSKYQDIIIEHQKVVKGNQKRLESLRELAGKENLEYPSVTLPPQPHTKEGVDAYNEVIARVRWWVNLNLWQKLKLSRDDAKPLLRLKGFPSFPLVERQANEVDWWDMVCNVKKLINEKKEDGKVFWQNLAGYKRQEALRPYLSSEEDRKKGKKFARYQLGDLLLHLEKKHGEDWGKVYDEAWERIDKKVEGLSKHIKLEEERRSEDAQSKAALTDWLRAKASFVIEGLKEADKDEFCRCELKLQKWYGDLRGKPFAIEAENSILDISGFSKQYNCAFIWQKDGVKKLNLYLIINYFKGGKLRFKKIKPEAFEANRFYTVINKKSGEIVPMEVNFNFDDPNLIILPLAFGKRQGREFIWNDLLSLETGSLKLANGRVIEKTLYNRRTRQDEPALFVALTFERREVLDSSNIKPMNLIGVDRGENIPAVIALTDPEGCPLSRFKDSLGNPTHILRIGESYKEKQRTIQAKKEVEQRRAGGYSRKYASKAKNLADDMVRNTARDLLYYAVTQDAMLIFENLSRGFGRQGKRTFMAERQYTRMEDWLTAKLAYEGLPSKTYLSKTLAQYTSKTCSNCGFTITSADYDRVLEKLKKTATGWMTTINGKELKVEGQITYYNRYKRQNVVKDLSVELDRLSEESVNNDISSWTKGRSGEALSLLKKRFSHRPVQEKFVCLNCGFETHADEQAALNIARSWLFLRSQEYKKYQTNKTTGNTDKRAFVETWQSFYRKKLKEVWKPAV

SEQ ID NO: 43903 - protein, 977 aa, synthetic construct
  REGION 1..977: note = engineered CasX variant
QEIKRINKIRRRLVKDSNTKKAGKTGPMKTLLVRVMTPDLRERLENLRKKPENIPQPISNTSRANLNKLLTDYTEMKKAILHVYWEEFQKDPVGLMSRVAQPASKKIDQNKLKPEMDEKGNLTTAGFACSQCGQPLFVYKLEQVSEKGKAYTNYFGRCNVAEHEKLILLAQLKPEKDSDEAVTYSLGKFGQRALDFYSIHVTKESTHPVKPLAQIAGNRYASPVGKALSGACMGTIASFLSKYQDIIIEHQKVVKGNQKRLESLRELAGKENLEYPSVTLPPQPHTKEGVDAYNEVIARVRWWVNLNLWQKLKLSRDDAKPLLRLKGFPSFPLVERQANEVDWWDMVCNVKKLINEKKEDGKVFWQNLAGYKRQEALRPYLSSEEDRKKGKKFARYQLGDLLLHLEKKHGEDWGKVYDEAWERIDKKVEGLSKHIKLEEERRSEDAQSKAALTDWLRAKASFVIEGLKEADKDEFCRCELKLQKWYGDLRGKPFAIEAENSILDISGFSKQYNCAFIWQKDGVKKLNLYLIINYFKGGKLRFKKIKPEAFEANRFYTVINKKSGEIVPMEVNFNFDDPNLIILPLAFGKRQGREFIWNDLLSLETGSLKLANGRVIEKTLYNRRTRQDEPALFVALTFERREVLDSSNIKPMNLIGVDRGENIPAVIALTDPEGCPLSRFKDSLGNPTHILRIGESYKEKQRTIQAKKEVEQRRAGGYSRKYASKAKNLADDMVRNTARDLLYYAVTQDAMLIFENLSRGFGRQGKRTFMAERQYTRMEDWLTAKLAYEGLPSKTYLSKTLAQYTSKTCSNCGFTITSADYDRVLEKLKKTATGWMTTINGKELKVEGQITYYNRYKRQNVVKDLSVELDRLSEESVNNDISSWTKGRSGEALSLLKKRFSHRPVQEKFVCLNCGFETHADEQAALNIARSWLFLRSQEYKKYQTNKTTGNTDKRAFVETWQSFYRKKLKEVWKPAV

SEQ ID NO: 43904 - protein, 978 aa, synthetic construct
  REGION 1..978: note = engineered CasX variant
QEIKRINKIRRRLVKDSNTKKAGKTGPMKTLLVRVMTPDLRERLENLRKKPENIPQPISNTSRANLNKLLTDYTEMKKAILHVYWEEFQKDPVGLMSRVAQPASKKIDQNKLKPEMDEKGNLTTAGFACSQCGQPLFVYKLEQVSEKGKAYTNYFGRCNVAEHEKLILLAQLKPEKDSDEAVTYSLGKFGQRALDFYSIHVTKESTHPVKPLAQIAGNRYASYPVGKALSDACMGTIASFLSKYQDIIIEHQKVVKGNQKRLESLRELAGKENLEYPSVTLPPQPHTKEGVDAYNEVIARVRWWVNLNLWQKLKLSRDDAKPLLRLKNFPSFPLVERQANEVDWWDMVCNVKKLINEKKEDGKVFWQNLAGYKRQEALRPYLSSEEDRKKGKKFARYQLGDLLLHLEKKHGEDWGKVYDEAWERIDKKVEGLSKHIKLEEERRSEDAQSKAALTDWLRAKASFVIEGLKEADKDEFCRCELKLQKWYGDLRGKPFAIEAENSILDISGFSKQYNCAFIWQKDGVKKLNLYLIINYFKGGKLRFKKIKPEAFEANRFYTVINKKSGEIVPMEVNFNFDDPNLIILPLAFGKRQGREFIWNDLLSLETGSLKLANGRVIEKTLYNRRTRQDEPALFVALTFERREVLDSSNIKPMNLIGVDRGENIPAVIALTDPEGCPLSRFKDSLGNPTHILRIGESYKEKQRTIQAKKEVEQRRAGGYSRKYASKAKNLADDMVRNTARDLLYYAVTQDAMLIFENLSRGFGRQGKRTFMAERQYTRMEDWLTAKLAYEGLPSKTYLSKTLAQYTSKTCSNCGFTITSADYDRVLEKLKKTATGWMTTINGKELKVEGQITYYNRYKRQNVVKDLSVELDRLSEESVNNDISSWTKGRSGEALSLLKKRFSHRPVQEKFVCLNCGFETHADEQAALNIARSWLFLRSQEYKKYQTNKTTGNTDKRAFVETWQSFYRKKLKEVWKPAV

SEQ ID NO: 43905 - protein, 978 aa, synthetic construct
  REGION 1..978: note = engineered CasX variant
QEIKRINKIRRRLVKDSNTKKAGKTGPMKTLLVRVMTPDLRERLENLRKKPENIPQPISNTSRANLNKLLTDYTEMKKAILHVYWEEFQKDPVGLMSRVAQPASKKIDQNKLKPEMDEKGNLTTAGFACSQCGQPLFVYKLEQVSEKGKAYTNYFGRCNVAEHEKLILLAQLKPEKDSDEAVTYSLGKFGQRALDFYSIHVTKESTHPVKPLAQIAGNRYASHPVGKALSDACMGTIASFLSKYQDIIIEHQKVVKGNQKRLESLRELAGKENLEYPSVTLPPQPHTKEGVDAYNEVIARVRWWVNLNLWQKLKLSRDDAKPLLRLKNFPSFPLVERQANEVDWWDMVCNVKKLINEKKEDGKVFWQNLAGYKRQEALRPYLSSEEDRKKGKKFARYQLGDLLLHLEKKHGEDWGKVYDEAWERIDKKVEGLSKHIKLEEERRSEDAQSKAALTDWLRAKASFVIEGLKEADKDEFCRCELKLQKWYGDLRGKPFAIEAENSILDISGFSKQYNCAFIWQKDGVKKLNLYLIINYFKGGKLRFKKIKPEAFEANRFYTVINKKSGEIVPMEVNFNFDDPNLIILPLAFGKRQGREFIWNDLLSLETGSLKLANGRVIEKTLYNRRTRQDEPALFVALTFERREVLDSSNIKPMNLIGVDRGENIPAVIALTDPEGCPLSRFKDSLGNPTHILRIGESYKEKQRTIQAKKEVEQRRAGGYSRKYASKAKNLADDMVRNTARDLLYYAVTQDAMLIFENLSRGFGRQGKRTFMAERQYTRMEDWLTAKLAYEGLPSKTYLSKTLAQYTSKTCSNCGFTITSADYDRVLEKLKKTATGWMTTINGKELKVEGQITYYNRYKRQNVVKDLSVELDRLSEESVNNDISSWTKGRSGEALSLLKKRFSHRPVQEKFVCLNCGFETHADEQAALNIARSWLFLRSQEYKKYQTNKTTGNTDKRAFVETWQSFYRKKLKEVWKPAV

SEQ ID NO: 43906 - protein, 978 aa, synthetic construct
  REGION 1..978: note = engineered CasX variant
QEIKRINKIRRRLVKDSNTKKAGKTGPMKTLLVRVMTPDLRERLENLRKKPENIPQPISNTSRANLNKLLTDYTEMKKAILHVYWEEFQKDPVGLMSRVAQPASKKIDQNKLKPEMDEKGNLTTAGFACSQCGQPLFVYKLEQVSEKGKAYTNYFGRCNVAEHEKLILLAQLKPEKDSDEAVTYSLGKFGQRALDFYSIHVTKESTHPVKPLAQIAGNRYASSPVGKALSDACMGTIASFLSKYQDIIIEHQKVVKGNQKRLESLRELAGKENLEYPSVTLPPQPHTKEGVDAYNEVIARVRWWVNLNLWQKLKLSRDDAKPLLRLKNFPSFPLVERQANEVDWWDMVCNVKKLINEKKEDGKVFWQNLAGYKRQEALRPYLSSEEDRKKGKKFARYQLGDLLLHLEKKHGEDWGKVYDEAWERIDKKVEGLSKHIKLEEERRSEDAQSKAALTDWLRAKASFVIEGLKEADKDEFCRCELKLQKWYGDLRGKPFAIEAENSILDISGFSKQYNCAFIWQKDGVKKLNLYLIINYFKGGKLRFKKIKPEAFEANRFYTVINKKSGEIVPMEVNFNFDDPNLIILPLAFGKRQGREFIWNDLLSLETGSLKLANGRVIEKTLYNRRTRQDEPALFVALTFERREVLDSSNIKPMNLIGVDRGENIPAVIALTDPEGCPLSRFKDSLGNPTHILRIGESYKEKQRTIQAKKEVEQRRAGGYSRKYASKAKNLADDMVRNTARDLLYYAVTQDAMLIFENLSRGFGRQGKRTFMAERQYTRMEDWLTAKLAYEGLPSKTYLSKTLAQYTSKTCSNCGFTITSADYDRVLEKLKKTATGWMTTINGKELKVEGQITYYNRYKRQNVVKDLSVELDRLSEESVNNDISSWTKGRSGEALSLLKKRFSHRPVQEKFVCLNCGFETHADEQAALNIARSWLFLRSQEYKKYQTNKTTGNTDKRAFVETWQSFYRKKLKEVWKPAV

SEQ ID NO: 43907 - protein, 978 aa, synthetic construct
  REGION 1..978: note = engineered CasX variant
QEIKRINKIRRRLVKDSNTKKAGKTGPMKTLLVRVMTPDLRERLENLRKKPENIPQPISNTSRANLNKLLTDYTEMKKAILHVYWEEFQKDPVGLMSRVAQPASKKIDQNKLKPEMDEKGNLTTAGFACSQCGQPLFVYKLEQVSEKGKAYTNYFGRCNVAEHEKLILLAQLKPEKDSDEAVTYSLGKFGQRALDFYSIHVTKESTHPVKPLAQIAGNRYASTPVGKALSDACMGTIASFLSKYQDIIIEHQKVVKGNQKRLESLRELAGKENLEYPSVTLPPQPHTKEGVDAYNEVIARVRWWVNLNLWQKLKLSRDDAKPLLRLKNFPSFPLVERQANEVDWWDMVCNVKKLINEKKEDGKVFWQNLAGYKRQEALRPYLSSEEDRKKGKKFARYQLGDLLLHLEKKHGEDWGKVYDEAWERIDKKVEGLSKHIKLEEERRSEDAQSKAALTDWLRAKASFVIEGLKEADKDEFCRCELKLQKWYGDLRGKPFAIEAENSILDISGFSKQYNCAFIWQKDGVKKLNLYLIINYFKGGKLRFKKIKPEAFEANRFYTVINKKSGEIVPMEVNFNFDDPNLIILPLAFGKRQGREFIWNDLLSLETGSLKLANGRVIEKTLYNRRTRQDEPALFVALTFERREVLDSSNIKPMNLIGVDRGENIPAVIALTDPEGCPLSRFKDSLGNPTHILRIGESYKEKQRTIQAKKEVEQRRAGGYSRKYASKAKNLADDMVRNTARDLLYYAVTQDAMLIFENLSRGFGRQGKRTFMAERQYTRMEDWLTAKLAYEGLPSKTYLSKTLAQYTSKTCSNCGFTITSADYDRVLEKLKKTATGWMTTINGKELKVEGQITYYNRYKRQNVVKDLSVELDRLSEESVNNDISSWTKGRSGEALSLLKKRFSHRPVQEKFVCLNCGFETHADEQAALNIARSWLFLRSQEYKKYQTNKTTGNTDKRAFVETWQSFYRKKLKEVWKPAV

SEQ ID NO: 43908 - protein, 978 aa, synthetic construct
  REGION 1..978: note = engineered CasX variant
QEIKRINKIRRRLVKDSNTKKAGKTGPMKTLLVRVMTPDLRERLENLRKKPENIPQPISNTSRANLNKLLTDYTEMKKAILHVYWEEFQKDPVGLMSRVAQPASKKIDQNKLKPEMDEKGNLTTAGFACSQCGQPLFVYKLEQVSEKGKAYTNYFGRCNVAEHEKLILLAQLKPEKDSDEAVTYSLGKFGQRALDFYSIHVTKESTHPVKPLAQIAGNRYASAPVGKALSDACMGTIASFLSKYQDIIIEHQKVVKGNQKRLESLRELAGKENLEYPSVTLPPQPHTKEGVDAYNEVIARVRWWVNLNLWQKLKLSRDDAKPLLRLKNFPSFPLVERQANEVDWWDMVCNVKKLINEKKEDGKVFWQNLAGYKRQEALRPYLSSEEDRKKGKKFARYQLGDLLLHLEKKHGEDWGKVYDEAWERIDKKVEGLSKHIKLEEERRSEDAQSKAALTDWLRAKASFVIEGLKEADKDEFCRCELKLQKWYGDLRGKPFAIEAENSILDISGFSKQYNCAFIWQKDGVKKLNLYLIINYFKGGKLRFKKIKPEAFEANRFYTVINKKSGEIVPMEVNFNFDDPNLIILPLAFGKRQGREFIWNDLLSLETGSLKLANGRVIEKTLYNRRTRQDEPALFVALTFERREVLDSSNIKPMNLIGVDRGENIPAVIALTDPEGCPLSRFKDSLGNPTHILRIGESYKEKQRTIQAKKEVEQRRAGGYSRKYASKAKNLADDMVRNTARDLLYYAVTQDAMLIFENLSRGFGRQGKRTFMAERQYTRMEDWLTAKLAYEGLPSKTYLSKTLAQYTSKTCSNCGFTITSADYDRVLEKLKKTATGWMTTINGKELKVEGQITYYNRYKRQNVVKDLSVELDRLSEESVNNDISSWTKGRSGEALSLLKKRFSHRPVQEKFVCLNCGFETHADEQAALNIARSWLFLRSQEYKKYQTNKTTGNTDKRAFVETWQSFYRKKLKEVWKPAV

SEQ ID NO: 43909 - protein, 978 aa, synthetic construct
  REGION 1..978: note = engineered CasX variant
QEIKRINKIRRRLVKDSNTKKAGKTGPMKTLLVRVMTPDLRERLENLRKKPENIPQPISNTSRANLNKLLTDYTEMKKAILHVYWEEFQKDPVGLMSRVAQPASKKIDQNKLKPEMDEKGNLTTAGFACSQCGQPLFVYKLEQVSEKGKAYTNYFGRCNVAEHEKLILLAQLKPEKDSDEAVTYSLGKFGQRALDFYSIHVTKESTHPVKPLAQIAGNRYASVPVGKALSDACMGTIASFLSKYQDIIIEHQKVVKGNQKRLESLRELAGKENLEYPSVTLPPQPHTKEGVDAYNEVIARVRWWVNLNLWQKLKLSRDDAKPLLRLKNFPSFPLVERQANEVDWWDMVCNVKKLINEKKEDGKVFWQNLAGYKRQEALRPYLSSEEDRKKGKKFARYQLGDLLLHLEKKHGEDWGKVYDEAWERIDKKVEGLSKHIKLEEERRSEDAQSKAALTDWLRAKASFVIEGLKEADKDEFCRCELKLQKWYGDLRGKPFAIEAENSILDISGFSKQYNCAFIWQKDGVKKLNLYLIINYFKGGKLRFKKIKPEAFEANRFYTVINKKSGEIVPMEVNFNFDDPNLIILPLAFGKRQGREFIWNDLLSLETGSLKLANGRVIEKTLYNRRTRQDEPALFVALTFERREVLDSSNIKPMNLIGVDRGENIPAVIALTDPEGCPLSRFKDSLGNPTHILRIGESYKEKQRTIQAKKEVEQRRAGGYSRKYASKAKNLADDMVRNTARDLLYYAVTQDAMLIFENLSRGFGRQGKRTFMAERQYTRMEDWLTAKLAYEGLPSKTYLSKTLAQYTSKTCSNCGFTITSADYDRVLEKLKKTATGWMTTINGKELKVEGQITYYNRYKRQNVVKDLSVELDRLSEESVNNDISSWTKGRSGEALSLLKKRFSHRPVQEKFVCLNCGFETHADEQAALNIARSWLFLRSQEYKKYQTNKTTGNTDKRAFVETWQSFYRKKLKEVWKPAV

SEQ ID NO: 43910 - protein, 978 aa, synthetic construct
  REGION 1..978: note = engineered CasX variant
QEIKRINKIRRRLVKDSNTKKAGKTGPMKTLLVRVMTPDLRERLENLRKKPENIPQPISNTSRANLNKLLTDYTEMKKAILHVYWEEFQKDPVGLMSRVAQPASKKIDQNKLKPEMDEKGNLTTAGFACSQCGQPLFVYKLEQVSEKGKAYTNYFGRCNVAEHEKLIKLAQLKPEKDSDEAVTYSLGKFGQRALDFYSIHVTKESTHPVKPLAQIAGNRYASGPVGKALSDACMGTIASFLSKYQDIIIEHQKVVKGNQKRLESLRELAGKENLEYPSVTLPPQPHTKEGVDAYNEVIARVRWWVNLNLWQKLKLSRDDAKPLLRLKNFPSFPLVERQANEVDWWDMVCNVKKLINEKKEDGKVFWQNLAGYKRQEALRPYLSSEEDRKKGKKFARYQLGDLLLHLEKKHGEDWGKVYDEAWERIDKKVEGLSKHIKLEEERRSEDAQSKAALTDWLRAKASFVIEGLKEADKDEFCRCELKLQKWYGDLRGKPFAIEAENSILDISGFSKQYNCAFIWQKDGVKKLNLYLIINYFKGGKLRFKKIKPEAFEANRFYTVINKKSGEIVPMEVNFNFDDPNLIILPLAFGKRQGREFIWNDLLSLETGSLKLANGRVIEKTLYNRRTRQDEPALFVALTFERREVLDSSNIKPMNLIGVDRGENIPAVIALTDPEGCPLSRFKDSLGNPTHILRIGESYKEKQRTIQAKKEVEQRRAGGYSRKYASKAKNLADDMVRNTARDLLYYAVTQDAMLIFENLSRGFGRQGKRTFMAERQYTRMEDWLTAKLAYEGLPSKTYLSKTLAQYTSKTCSNCGFTITSADYDRVLEKLKKTATGWMTTINGKELKVEGQITYYNRYKRQNVVKDLSVELDRLSEESVNNDISSWTKGRSGEALSLLKKRFSHRPVQEKFVCLNCGFETHADEQAALNIARSWLFLRSQEYKKYQTNKTTGNTDKRAFVETWQSFYRKKLKEVWKPAV

SEQ ID NO: 43911 - protein, 977 aa, synthetic construct
  REGION 1..977: note = engineered CasX variant
QEIKRINKIRRRLVKDSNTKKAGKTGPMKTLLVRVMTPDLRERLENLRKKPENIPQPISNTSRANLNKLLTDYTEMKKAILHVYWEEFQKDPVGLMSRVAQPASKKIDQNKLKPEMDEKGNLTTAGFACSQCGQPLFVYKLEQVSEKGKAYTNYFGRCNVAEHEKLILLAQLKPEKDSDEAVTYSLGKFGQRALDFYSIHVTKESTHPVKPLAQIAGNRYASPVGKALSDACMGTIASFLSKYQDIIIEHQKVVKGNQKRLESLRELAGKENLEYPSVTLPPQPHTKEGVDAYNEVIARVRWWVNLNLWQKLKLSRDDAKPLLRLKNFPSFPLVERQANEVDWWDMVCNVKKLINEKKEDGKVFWQNLAGYKRQEALRPYLSSEEDRKKGKKFARYQLGDLLLHLEKKHGEDWGKVYDEAWERIDKKVEGLSKHIKLEEERRSEDAQSKAALTDWLRAKASFVIEGLKEADKDEFCRCELKLQKWYGDLRGKPFAIEAENSILDISGFSKQYNCAFIWQKDGVKKLNLYLIINYFKGGKLRFKKIKPEAFEANRFYTVINKKSGEIVPMEVNFNFDDPNLIILPLAFGKRQGREFIWNDLLSLETGSLKLANGRVIEKTLYNRRTRQDEPALFVALTFERREVLDSSNIKPMNLIGVDRGENIPAVIALTDPEGCPLSRFKDSLGNPTHILRIGESYKEKQRTIQAKKEVEQRRAGGYSRKYASKAKNLADDMVRNTARDLLYYAVTQDAMLIFENLSRGFGRQGKRTFMAERQYTRMEDWLTAKLAYEGLPSKTYLSKTLAQYTSKTCSNCGFTITSADYDRVLEKLKKTATGWMTTINGKELKVEGQITYYNRYKRQNVVKDLSVELDRLSEESVNNDISSWTKGRSGEALSLLKKRFSHRPVQEKFVCLNCGFETHADEQAALNIARSWLFLRSQEYKKYQTNKTTGNTDKRAFVETWQSFYRKKLKEVWKPAV

SEQ ID NO: 43912 - protein, 978 aa, synthetic construct
  REGION 1..978: note = engineered CasX variant
QEIKRINKIRRRLVKDSNTKKAGKTGPMKTLLVRVMTPDLRERLENLRKKPENIPQPISNTSRANLNKLLTDYTEMKKAILHVYWEEFQKDPVGLMSRVAQPASKKIDQNKLKPEMDEKGNLTTAGFACSQCGQPLFVYKLEQVSEKGKAYTNYFGRCNVAEHEKLILLAQLKPEKDSDEAVTYSLGKFGQRALDFYSIHVTKESTHPVKPLAQIAGNRYASYPVGKALSDACMGTIASFLSKYQDIIIEHQKVVKGNQKRLESLRELAGKENLEYPSVTLPPQPHTKEGVDAYNEVIARVRWWVNLNLWQKLKLSRDDAKPLLRLKGFPSFPLVERQANEVDWWDMVCNVKKLINEKKEDGKVFWQNLAGYKRQEALRPYLSSEEDRKKGKKFARYQLGDLLNHLEKKHGEDWGKVYDEAWERIDKKVEGLSKHIKLEEERRSEDAQSKAALTDWLRAKASFVIEGLKEADKDEFCRCELKLQKWYGDLRGKPFAIEAENSILDISGFSKQYNCAFIWQKDGVKKLNLYLIINYFKGGKLRFKKIKPEAFEANRFYTVINKKSGEIVPMEVNFNFDDPNLIILPLAFGKRQGREFIWNDLLSLETGSLKLANGRVIEKTLYNRRTRQDEPALFVALTFERREVLDSSNIKPMNLIGVDRGENIPAVIALTDPEGCPLSRFKDSLGNPTHILRIGESYKEKQRTIQAKKEVEQRRAGGYSRKYASKAKNLADDMVRNTARDLLYYAVTQDAMLIFENLSRGFGRQGKRTFMAERQYTRMEDWLTAKLAYEGLPSKTYLSKTLAQYTSKTCSNCGFTITSADYDRVLEKLKKTATGWMTTINGKELKVEGQITYYNRYKRQNVVKDLSVELDRLSEESVNNDISSWTKGRSGEALSLLKKRFSHRPVQEKFVCLNCGFETHADEQAALNIARSWLFLRSQEYKKYQTNKTTGNTDKRAFVETWQSFYRKKLKEVWKPAV

SEQ ID NO: 43913 - protein, 978 aa, synthetic construct
  REGION 1..978: note = engineered CasX variant
QEIKRINKIRRRLVKDSNTKKAGKTGPMKTLLVRVMTPDLRERLENLRKKPENIPQPISNTSRANLNKLLTDYTEMKKAILHVYWEEFQKDPVGLMSRVAQPASKKIDQNKLKPEMDEKGNLTTAGFACSQCGQPLFVYKLEQVSEKGKAYTNYFGRCNVAEHEKLILLAQLKPEKDSDEAVTYSLGKFGQRALDFYSIHVTKESTHPVKPLAQIAGNRYASHPVGKALSDACMGTIASFLSKYQDIIIEHQKVVKGNQKRLESLRELAGKENLEYPSVTLPPQPHTKEGVDAYNEVIARVRWWVNLNLWQKLKLSRDDAKPLLRLKGFPSFPLVERQANEVDWWDMVCNVKKLINEKKEDGKVFWQNLAGYKRQEALRPYLSSEEDRKKGKKFARYQLGDLLNHLEKKHGEDWGKVYDEAWERIDKKVEGLSKHIKLEEERRSEDAQSKAALTDWLRAKASFVIEGLKEADKDEFCRCELKLQKWYGDLRGKPFAIEAENSILDISGFSKQYNCAFIWQKDGVKKLNLYLIINYFKGGKLRFKKIKPEAFEANRFYTVINKKSGEIVPMEVNFNFDDPNLIILPLAFGKRQGREFIWNDLLSLETGSLKLANGRVIEKTLYNRRTRQDEPALFVALTFERREVLDSSNIKPMNLIGVDRGENIPAVIALTDPEGCPLSRFKDSLGNPTHILRIGESYKEKQRTIQAKKEVEQRRAGGYSRKYASKAKNLADDMVRNTARDLLYYAVTQDAMLIFENLSRGFGRQGKRTFMAERQYTRMEDWLTAKLAYEGLPSKTYLSKTLAQYTSKTCSNCGFTITSADYDRVLEKLKKTATGWMTTINGKELKVEGQITYYNRYKRQNVVKDLSVELDRLSEESVNNDISSWTKGRSGEALSLLKKRFSHRPVQEKFVCLNCGFETHADEQAALNIARSWLFLRSQEYKKYQTNKTTGNTDKRAFVETWQSFYRKKLKEVWKPAV

SEQ ID NO: 43914 - protein, 978 aa, synthetic construct
  REGION 1..978: note = engineered CasX variant
QEIKRINKIRRRLVKDSNTKKAGKTGPMKTLLVRVMTPDLRERLENLRKKPENIPQPISNTSRANLNKLLTDYTEMKKAILHVYWEEFQKDPVGLMSRVAQPASKKIDQNKLKPEMDEKGNLTTAGFACSQCGQPLFVYKLEQVSEKGKAYTNYFGRCNVAEHEKLILLAQLKPEKDSDEAVTYSLGKFGQRALDFYSIHVTKESTHPVKPLAQIAGNRYASSPVGKALSDACMGTIASFLSKYQDIIIEHQKVVKGNQKRLESLRELAGKENLEYPSVTLPPQPHTKEGVDAYNEVIARVRWWVNLNLWQKLKLSRDDAKPLLRLKGFPSFPLVERQANEVDWWDMVCNVKKLINEKKEDGKVFWQNLAGYKRQEALRPYLSSEEDRKKGKKFARYQLGDLLNHLEKKHGEDWGKVYDEAWERIDKKVEGLSKHIKLEEERRSEDAQSKAALTDWLRAKASFVIEGLKEADKDEFCRCELKLQKWYGDLRGKPFAIEAENSILDISGFSKQYNCAFIWQKDGVKKLNLYLIINYFKGGKLRFKKIKPEAFEANRFYTVINKKSGEIVPMEVNFNFDDPNLIILPLAFGKRQGREFIWNDLLSLETGSLKLANGRVIEKTLYNRRTRQDEPALFVALTFERREVLDSSNIKPMNLIGVDRGENIPAVIALTDPEGCPLSRFKDSLGNPTHILRIGESYKEKQRTIQAKKEVEQRRAGGYSRKYASKAKNLADDMVRNTARDLLYYAVTQDAMLIFENLSRGFGRQGKRTFMAERQYTRMEDWLTAKLAYEGLPSKTYLSKTLAQYTSKTCSNCGFTITSADYDRVLEKLKKTATGWMTTINGKELKVEGQITYYNRYKRQNVVKDLSVELDRLSEESVNNDISSWTKGRSGEALSLLKKRFSHRPVQEKFVCLNCGFETHADEQAALNIARSWLFLRSQEYKKYQTNKTTGNTDKRAFVETWQSFYRKKLKEVWKPAV

SEQ ID NO: 43915 - protein, 978 aa, synthetic construct
  REGION 1..978: note = engineered CasX variant
QEIKRINKIRRRLVKDSNTKKAGKTGPMKTLLVRVMTPDLRERLENLRKKPENIPQPISNTSRANLNKLLTDYTEMKKAILHVYWEEFQKDPVGLMSRVAQPASKKIDQNKLKPEMDEKGNLTTAGFACSQCGQPLFVYKLEQVSEKGKAYTNYFGRCNVAEHEKLILLAQLKPEKDSDEAVTYSLGKFGQRALDFYSIHVTKESTHPVKPLAQIAGNRYASTPVGKALSDACMGTIASFLSKYQDIIIEHQKVVKGNQKRLESLRELAGKENLEYPSVTLPPQPHTKEGVDAYNEVIARVRWWVNLNLWQKLKLSRDDAKPLLRLKGFPSFPLVERQANEVDWWDMVCNVKKLINEKKEDGKVFWQNLAGYKRQEALRPYLSSEEDRKKGKKFARYQLGDLLNHLEKKHGEDWGKVYDEAWERIDKKVEGLSKHIKLEEERRSEDAQSKAALTDWLRAKASFVIEGLKEADKDEFCRCELKLQKWYGDLRGKPFAIEAENSILDISGFSKQYNCAFIWQKDGVKKLNLYLIINYFKGGKLRFKKIKPEAFEANRFYTVINKKSGEIVPMEVNFNFDDPNLIILPLAFGKRQGREFIWNDLLSLETGSLKLANGRVIEKTLYNRRTRQDEPALFVALTFERREVLDSSNIKPMNLIGVDRGENIPAVIALTDPEGCPLSRFKDSLGNPTHILRIGESYKEKQRTIQAKKEVEQRRAGGYSRKYASKAKNLADDMVRNTARDLLYYAVTQDAMLIFENLSRGFGRQGKRTFMAERQYTRMEDWLTAKLAYEGLPSKTYLSKTLAQYTSKTCSNCGFTITSADYDRVLEKLKKTATGWMTTINGKELKVEGQITYYNRYKRQNVVKDLSVELDRLSEESVNNDISSWTKGRSGEALSLLKKRFSHRPVQEKFVCLNCGFETHADEQAALNIARSWLFLRSQEYKKYQTNKTTGNTDKRAFVETWQSFYRKKLKEVWKPAV

SEQ ID NO: 43916 - protein, 978 aa, synthetic construct
  REGION 1..978: note = engineered CasX variant
QEIKRINKIRRRLVKDSNTKKAGKTGPMKTLLVRVMTPDLRERLENLRKKPENIPQPISNTSRANLNKLLTDYTEMKKAILHVYWEEFQKDPVGLMSRVAQPASKKIDQNKLKPEMDEKGNLTTAGFACSQCGQPLFVYKLEQVSEKGKAYTNYFGRCNVAEHEKLILLAQLKPEKDSDEAVTYSLGKFGQRALDFYSIHVTKESTHPVKPLAQIAGNRYASAPVGKALSDACMGTIASFLSKYQDIIIEHQKVVKGNQKRLESLRELAGKENLEYPSVTLPPQPHTKEGVDAYNEVIARVRWWVNLNLWQKLKLSRDDAKPLLRLKGFPSFPLVERQANEVDWWDMVCNVKKLINEKKEDGKVFWQNLAGYKRQEALRPYLSSEEDRKKGKKFARYQLGDLLNHLEKKHGEDWGKVYDEAWERIDKKVEGLSKHIKLEEERRSEDAQSKAALTDWLRAKASFVIEGLKEADKDEFCRCELKLQKWYGDLRGKPFAIEAENSILDISGFSKQYNCAFIWQKDGVKKLNLYLIINYFKGGKLRFKKIKPEAFEANRFYTVINKKSGEIVPMEVNFNFDDPNLIILPLAFGKRQGREFIWNDLLSLETGSLKLANGRVIEKTLYNRRTRQDEPALFVALTFERREVLDSSNIKPMNLIGVDRGENIPAVIALTDPEGCPLSRFKDSLGNPTHILRIGESYKEKQRTIQAKKEVEQRRAGGYSRKYASKAKNLADDMVRNTARDLLYYAVTQDAMLIFENLSRGFGRQGKRTFMAERQYTRMEDWLTAKLAYEGLPSKTYLSKTLAQYTSKTCSNCGFTITSADYDRVLEKLKKTATGWMTTINGKELKVEGQITYYNRYKRQNVVKDLSVELDRLSEESVNNDISSWTKGRSGEALSLLKKRFSHRPVQEKFVCLNCGFETHADEQAALNIARSWLFLRSQEYKKYQTNKTTGNTDKRAFVETWQSFYRKKLKEVWKPAV

SEQ ID NO: 43917 - protein, 978 aa, synthetic construct
  REGION 1..978: note = engineered CasX variant
QEIKRINKIRRRLVKDSNTKKAGKTGPMKTLLVRVMTPDLRERLENLRKKPENIPQPISNTSRANLNKLLTDYTEMKKAILHVYWEEFQKDPVGLMSRVAQPASKKIDQNKLKPEMDEKGNLTTAGFACSQCGQPLFVYKLEQVSEKGKAYTNYFGRCNVAEHEKLILLAQLKPEKDSDEAVTYSLGKFGQRALDFYSIHVTKESTHPVKPLAQIAGNRYASVPVGKALSDACMGTIASFLSKYQDIIIEHQKVVKGNQKRLESLRELAGKENLEYPSVTLPPQPHTKEGVDAYNEVIARVRWWVNLNLWQKLKLSRDDAKPLLRLKGFPSFPLVERQANEVDWWDMVCNVKKLINEKKEDGKVFWQNLAGYKRQEALRPYLSSEEDRKKGKKFARYQLGDLLNHLEKKHGEDWGKVYDEAWERIDKKVEGLSKHIKLEEERRSEDAQSKAALTDWLRAKASFVIEGLKEADKDEFCRCELKLQKWYGDLRGKPFAIEAENSILDISGFSKQYNCAFIWQKDGVKKLNLYLIINYFKGGKLRFKKIKPEAFEANRFYTVINKKSGEIVPMEVNFNFDDPNLIILPLAFGKRQGREFIWNDLLSLETGSLKLANGRVIEKTLYNRRTRQDEPALFVALTFERREVLDSSNIKPMNLIGVDRGENIPAVIALTDPEGCPLSRFKDSLGNPTHILRIGESYKEKQRTIQAKKEVEQRRAGGYSRKYASKAKNLADDMVRNTARDLLYYAVTQDAMLIFENLSRGFGRQGKRTFMAERQYTRMEDWLTAKLAYEGLPSKTYLSKTLAQYTSKTCSNCGFTITSADYDRVLEKLKKTATGWMTTINGKELKVEGQITYYNRYKRQNVVKDLSVELDRLSEESVNNDISSWTKGRSGEALSLLKKRFSHRPVQEKFVCLNCGFETHADEQAALNIARSWLFLRSQEYKKYQTNKTTGNTDKRAFVETWQSFYRKKLKEVWKPAV

SEQ ID NO: 43918 - protein, 978 aa, synthetic construct
  REGION 1..978: note = engineered CasX variant
QEIKRINKIRRRLVKDSNTKKAGKTGPMKTLLVRVMTPDLRERLENLRKKPENIPQPISNTSRANLNKLLTDYTEMKKAILHVYWEEFQKDPVGLMSRVAQPASKKIDQNKLKPEMDEKGNLTTAGFACSQCGQPLFVYKLEQVSEKGKAYTNYFGRCNVAEHEKLIKLAQLKPEKDSDEAVTYSLGKFGQRALDFYSIHVTKESTHPVKPLAQIAGNRYASGPVGKALSDACMGTIASFLSKYQDIIIEHQKVVKGNQKRLESLRELAGKENLEYPSVTLPPQPHTKEGVDAYNEVIARVRWWVNLNLWQKLKLSRDDAKPLLRLKGFPSFPLVERQANEVDWWDMVCNVKKLINEKKEDGKVFWQNLAGYKRQEALRPYLSSEEDRKKGKKFARYQLGDLLNHLEKKHGEDWGKVYDEAWERIDKKVEGLSKHIKLEEERRSEDAQSKAALTDWLRAKASFVIEGLKEADKDEFCRCELKLQKWYGDLRGKPFAIEAENSILDISGFSKQYNCAFIWQKDGVKKLNLYLIINYFKGGKLRFKKIKPEAFEANRFYTVINKKSGEIVPMEVNFNFDDPNLIILPLAFGKRQGREFIWNDLLSLETGSLKLANGRVIEKTLYNRRTRQDEPALFVALTFERREVLDSSNIKPMNLIGVDRGENIPAVIALTDPEGCPLSRFKDSLGNPTHILRIGESYKEKQRTIQAKKEVEQRRAGGYSRKYASKAKNLADDMVRNTARDLLYYAVTQDAMLIFENLSRGFGRQGKRTFMAERQYTRMEDWLTAKLAYEGLPSKTYLSKTLAQYTSKTCSNCGFTITSADYDRVLEKLKKTATGWMTTINGKELKVEGQITYYNRYKRQNVVKDLSVELDRLSEESVNNDISSWTKGRSGEALSLLKKRFSHRPVQEKFVCLNCGFETHADEQAALNIARSWLFLRSQEYKKYQTNKTTGNTDKRAFVETWQSFYRKKLKEVWKPAV

SEQ ID NO: 43919 - protein, 977 aa, synthetic construct
  REGION 1..977: note = engineered CasX variant
QEIKRINKIRRRLVKDSNTKKAGKTGPMKTLLVRVMTPDLRERLENLRKKPENIPQPISNTSRANLNKLLTDYTEMKKAILHVYWEEFQKDPVGLMSRVAQPASKKIDQNKLKPEMDEKGNLTTAGFACSQCGQPLFVYKLEQVSEKGKAYTNYFGRCNVAEHEKLILLAQLKPEKDSDEAVTYSLGKFGQRALDFYSIHVTKESTHPVKPLAQIAGNRYASPVGKALSDACMGTIASFLSKYQDIIIEHQKVVKGNQKRLESLRELAGKENLEYPSVTLPPQPHTKEGVDAYNEVIARVRWWVNLNLWQKLKLSRDDAKPLLRLKGFPSFPLVERQANEVDWWDMVCNVKKLINEKKEDGKVFWQNLAGYKRQEALRPYLSSEEDRKKGKKFARYQLGDLLNHLEKKHGEDWGKVYDEAWERIDKKVEGLSKHIKLEEERRSEDAQSKAALTDWLRAKASFVIEGLKEADKDEFCRCELKLQKWYGDLRGKPFAIEAENSILDISGFSKQYNCAFIWQKDGVKKLNLYLIINYFKGGKLRFKKIKPEAFEANRFYTVINKKSGEIVPMEVNFNFDDPNLIILPLAFGKRQGREFIWNDLLSLETGSLKLANGRVIEKTLYNRRTRQDEPALFVALTFERREVLDSSNIKPMNLIGVDRGENIPAVIALTDPEGCPLSRFKDSLGNPTHILRIGESYKEKQRTIQAKKEVEQRRAGGYSRKYASKAKNLADDMVRNTARDLLYYAVTQDAMLIFENLSRGFGRQGKRTFMAERQYTRMEDWLTAKLAYEGLPSKTYLSKTLAQYTSKTCSNCGFTITSADYDRVLEKLKKTATGWMTTINGKELKVEGQITYYNRYKRQNVVKDLSVELDRLSEESVNNDISSWTKGRSGEALSLLKKRFSHRPVQEKFVCLNCGFETHADEQAALNIARSWLFLRSQEYKKYQTNKTTGNTDKRAFVETWQSFYRKKLKEVWKPAV

SEQ ID NO: 43920 - protein, 978 aa, synthetic construct
  REGION 1..978: note = engineered CasX variant
QEIKRINKIRRRLVKDSNTKKAGKTGPMKTLLVRVMTPDLRERLENLRKKPENIPQPISNTSRANLNKLLTDYTEMKKAILHVYWEEFQKDPVGLMSRVAQPASKKIDQNKLKPEMDEKGNLTTAGFACSQCGQPLFVYKLEQVSEKGKAYTNYFGRCNVAEHEKLILLAQLKPEKDSDEAVTYSLGKFGQRALDFYSIHVTKESTHPVKPLAQIAGNRYASYPVGKALSDACMGTIASFLSKYQDIIIEHQKVVKGNQKRLESLRELAGKENLEYPSVTLPPQPHTKEGVDAYNEVIARVRWWVNLNLWQKLKLSRDDAKPLLRLKGFPSFPLVERQANEVDWWDMVCNVKKLINEKKEDGKVFWQNLAGYKRQEALRPYLSSEEDRKKGKKFARYQLGDLLWHLEKKHGEDWGKVYDEAWERIDKKVEGLSKHIKLEEERRSEDAQSKAALTDWLRAKASFVIEGLKEADKDEFCRCELKLQKWYGDLRGKPFAIEAENSILDISGFSKQYNCAFIWQKDGVKKLNLYLIINYFKGGKLRFKKIKPEAFEANRFYTVINKKSGEIVPMEVNFNFDDPNLIILPLAFGKRQGREFIWNDLLSLETGSLKLANGRVIEKTLYNRRTRQDEPALFVALTFERREVLDSSNIKPMNLIGVDRGENIPAVIALTDPEGCPLSRFKDSLGNPTHILRIGESYKEKQRTIQAKKEVEQRRAGGYSRKYASKAKNLADDMVRNTARDLLYYAVTQDAMLIFENLSRGFGRQGKRTFMAERQYTRMEDWLTAKLAYEGLPSKTYLSKTLAQYTSKTCSNCGFTITSADYDRVLEKLKKTATGWMTTINGKELKVEGQITYYNRYKRQNVVKDLSVELDRLSEESVNNDISSWTKGRSGEALSLLKKRFSHRPVQEKFVCLNCGFETHADEQAALNIARSWLFLRSQEYKKYQTNKTTGNTDKRAFVETWQSFYRKKLKEVWKPAV

SEQ ID NO: 43921 - protein, 978 aa, synthetic construct
  REGION 1..978: note = engineered CasX variant
QEIKRINKIRRRLVKDSNTKKAGKTGPMKTLLVRVMTPDLRERLENLRKKPENIPQPISNTSRANLNKLLTDYTEMKKAILHVYWEEFQKDPVGLMSRVAQPASKKIDQNKLKPEMDEKGNLTTAGFACSQCGQPLFVYKLEQVSEKGKAYTNYFGRCNVAEHEKLILLAQLKPEKDSDEAVTYSLGKFGQRALDFYSIHVTKESTHPVKPLAQIAGNRYASHPVGKALSDACMGTIASFLSKYQDIIIEHQKVVKGNQKRLESLRELAGKENLEYPSVTLPPQPHTKEGVDAYNEVIARVRWWVNLNLWQKLKLSRDDAKPLLRLKGFPSFPLVERQANEVDWWDMVCNVKKLINEKKEDGKVFWQNLAGYKRQEALRPYLSSEEDRKKGKKFARYQLGDLLWHLEKKHGEDWGKVYDEAWERIDKKVEGLSKHIKLEEERRSEDAQSKAALTDWLRAKASFVIEGLKEADKDEFCRCELKLQKWYGDLRGKPFAIEAENSILDISGFSKQYNCAFIWQKDGVKKLNLYLIINYFKGGKLRFKKIKPEAFEANRFYTVINKKSGEIVPMEVNFNFDDPNLIILPLAFGKRQGREFIWNDLLSLETGSLKLANGRVIEKTLYNRRTRQDEPALFVALTFERREVLDSSNIKPMNLIGVDRGENIPAVIALTDPEGCPLSRFKDSLGNPTHILRIGESYKEKQRTIQAKKEVEQRRAGGYSRKYASKAKNLADDMVRNTARDLLYYAVTQDAMLIFENLSRGFGRQGKRTFMAERQYTRMEDWLTAKLAYEGLPSKTYLSKTLAQYTSKTCSNCGFTITSADYDRVLEKLKKTATGWMTTINGKELKVEGQITYYNRYKRQNVVKDLSVELDRLSEESVNNDISSWTKGRSGEALSLLKKRFSHRPVQEKFVCLNCGFETHADEQAALNIARSWLFLRSQEYKKYQTNKTTGNTDKRAFVETWQSFYRKKLKEVWKPAV

SEQ ID NO: 43922 - protein, 978 aa, synthetic construct
  REGION 1..978: note = engineered CasX variant
QEIKRINKIRRRLVKDSNTKKAGKTGPMKTLLVRVMTPDLRERLENLRKKPENIPQPISNTSRANLNKLLTDYTEMKKAILHVYWEEFQKDPVGLMSRVAQPASKKIDQNKLKPEMDEKGNLTTAGFACSQCGQPLFVYKLEQVSEKGKAYTNYFGRCNVAEHEKLILLAQLKPEKDSDEAVTYSLGKFGQRALDFYSIHVTKESTHPVKPLAQIAGNRYASSPVGKALSDACMGTIASFLSKYQDIIIEHQKVVKGNQKRLESLRELAGKENLEYPSVTLPPQPHTKEGVDAYNEVIARVRWWVNLNLWQKLKLSRDDAKPLLRLKGFPSFPLVERQANEVDWWDMVCNVKKLINEKKEDGKVFWQNLAGYKRQEALRPYLSSEEDRKKGKKFARYQLGDLLWHLEKKHGEDWGKVYDEAWERIDKKVEGLSKHIKLEEERRSEDAQSKAALTDWLRAKASFVIEGLKEADKDEFCRCELKLQKWYGDLRGKPFAIEAENSILDISGFSKQYNCAFIWQKDGVKKLNLYLIINYFKGGKLRFKKIKPEAFEANRFYTVINKKSGEIVPMEVNFNFDDPNLIILPLAFGKRQGREFIWNDLLSLETGSLKLANGRVIEKTLYNRRTRQDEPALFVALTFERREVLDSSNIKPMNLIGVDRGENIPAVIALTDPEGCPLSRFKDSLGNPTHILRIGESYKEKQRTIQAKKEVEQRRAGGYSRKYASKAKNLADDMVRNTARDLLYYAVTQDAMLIFENLSRGFGRQGKRTFMAERQYTRMEDWLTAKLAYEGLPSKTYLSKTLAQYTSKTCSNCGFTITSADYDRVLEKLKKTATGWMTTINGKELKVEGQITYYNRYKRQNVVKDLSVELDRLSEESVNNDISSWTKGRSGEALSLLKKRFSHRPVQEKFVCLNCGFETHADEQAALNIARSWLFLRSQEYKKYQTNKTTGNTDKRAFVETWQSFYRKKLKEVWKPAV

SEQ ID NO: 43923 - protein, 978 aa, synthetic construct
  REGION 1..978: note = engineered CasX variant
QEIKRINKIRRRLVKDSNTKKAGKTGPMKTLLVRVMTPDLRERLENLRKKPENIPQPISNTSRANLNKLLTDYTEMKKAILHVYWEEFQKDPVGLMSRVAQPASKKIDQNKLKPEMDEKGNLTTAGFACSQCGQPLFVYKLEQVSEKGKAYTNYFGRCNVAEHEKLILLAQLKPEKDSDEAVTYSLGKFGQRALDFYSIHVTKESTHPVKPLAQIAGNRYASTPVGKALSDACMGTIASFLSKYQDIIIEHQKVVKGNQKRLESLRELAGKENLEYPSVTLPPQPHTKEGVDAYNEVIARVRWWVNLNLWQKLKLSRDDAKPLLRLKGFPSFPLVERQANEVDWWDMVCNVKKLINEKKEDGKVFWQNLAGYKRQEALRPYLSSEEDRKKGKKFARYQLGDLLWHLEKKHGEDWGKVYDEAWERIDKKVEGLSKHIKLEEERRSEDAQSKAALTDWLRAKASFVIEGLKEADKDEFCRCELKLQKWYGDLRGKPFAIEAENSILDISGFSKQYNCAFIWQKDGVKKLNLYLIINYFKGGKLRFKKIKPEAFEANRFYTVINKKSGEIVPMEVNFNFDDPNLIILPLAFGKRQGREFIWNDLLSLETGSLKLANGRVIEKTLYNRRTRQDEPALFVALTFERREVLDSSNIKPMNLIGVDRGENIPAVIALTDPEGCPLSRFKDSLGNPTHILRIGESYKEKQRTIQAKKEVEQRRAGGYSRKYASKAKNLADDMVRNTARDLLYYAVTQDAMLIFENLSRGFGRQGKRTFMAERQYTRMEDWLTAKLAYEGLPSKTYLSKTLAQYTSKTCSNCGFTITSADYDRVLEKLKKTATGWMTTINGKELKVEGQITYYNRYKRQNVVKDLSVELDRLSEESVNNDISSWTKGRSGEALSLLKKRFSHRPVQEKFVCLNCGFETHADEQAALNIARSWLFLRSQEYKKYQTNKTTGNTDKRAFVETWQSFYRKKLKEVWKPAV

SEQ ID NO: 43924 - protein, 978 aa, synthetic construct
  REGION 1..978: note = engineered CasX variant
QEIKRINKIRRRLVKDSNTKKAGKTGPMKTLLVRVMTPDLRERLENLRKKPENIPQPISNTSRANLNKLLTDYTEMKKAILHVYWEEFQKDPVGLMSRVAQPASKKIDQNKLKPEMDEKGNLTTAGFACSQCGQPLFVYKLEQVSEKGKAYTNYFGRCNVAEHEKLILLAQLKPEKDSDEAVTYSLGKFGQRALDFYSIHVTKESTHPVKPLAQIAGNRYASAPVGKALSDACMGTIASFLSKYQDIIIEHQKVVKGNQKRLESLRELAGKENLEYPSVTLPPQPHTKEGVDAYNEVIARVRWWVNLNLWQKLKLSRDDAKPLLRLKGFPSFPLVERQANEVDWWDMVCNVKKLINEKKEDGKVFWQNLAGYKRQEALRPYLSSEEDRKKGKKFARYQLGDLLWHLEKKHGEDWGKVYDEAWERIDKKVEGLSKHIKLEEERRSEDAQSKAALTDWLRAKASFVIEGLKEADKDEFCRCELKLQKWYGDLRGKPFAIEAENSILDISGFSKQYNCAFIWQKDGVKKLNLYLIINYFKGGKLRFKKIKPEAFEANRFYTVINKKSGEIVPMEVNFNFDDPNLIILPLAFGKRQGREFIWNDLLSLETGSLKLANGRVIEKTLYNRRTRQDEPALFVALTFERREVLDSSNIKPMNLIGVDRGENIPAVIALTDPEGCPLSRFKDSLGNPTHILRIGESYKEKQRTIQAKKEVEQRRAGGYSRKYASKAKNLADDMVRNTARDLLYYAVTQDAMLIFENLSRGFGRQGKRTFMAERQYTRMEDWLTAKLAYEGLPSKTYLSKTLAQYTSKTCSNCGFTITSADYDRVLEKLKKTATGWMTTINGKELKVEGQITYYNRYKRQNVVKDLSVELDRLSEESVNNDISSWTKGRSGEALSLLKKRFSHRPVQEKFVCLNCGFETHADEQAALNIARSWLFLRSQEYKKYQTNKTTGNTDKRAFVETWQSFYRKKLKEVWKPAV

SEQ ID NO: 43925 - protein, 978 aa, synthetic construct
  REGION 1..978: note = engineered CasX variant
QEIKRINKIRRRLVKDSNTKKAGKTGPMKTLLVRVMTPDLRERLENLRKKPENIPQPISNTSRANLNKLLTDYTEMKKAILHVYWEEFQKDPVGLMSRVAQPASKKIDQNKLKPEMDEKGNLTTAGFACSQCGQPLFVYKLEQVSEKGKAYTNYFGRCNVAEHEKLILLAQLKPEKDSDEAVTYSLGKFGQRALDFYSIHVTKESTHPVKPLAQIAGNRYASVPVGKALSDACMGTIASFLSKYQDIIIEHQKVVKGNQKRLESLRELAGKENLEYPSVTLPPQPHTKEGVDAYNEVIARVRWWVNLNLWQKLKLSRDDAKPLLRLKGFPSFPLVERQANEVDWWDMVCNVKKLINEKKEDGKVFWQNLAGYKRQEALRPYLSSEEDRKKGKKFARYQLGDLLWHLEKKHGEDWGKVYDEAWERIDKKVEGLSKHIKLEEERRSEDAQSKAALTDWLRAKASFVIEGLKEADKDEFCRCELKLQKWYGDLRGKPFAIEAENSILDISGFSKQYNCAFIWQKDGVKKLNLYLIINYFKGGKLRFKKIKPEAFEANRFYTVINKKSGEIVPMEVNFNFDDPNLIILPLAFGKRQGREFIWNDLLSLETGSLKLANGRVIEKTLYNRRTRQDEPALFVALTFERREVLDSSNIKPMNLIGVDRGENIPAVIALTDPEGCPLSRFKDSLGNPTHILRIGESYKEKQRTIQAKKEVEQRRAGGYSRKYASKAKNLADDMVRNTARDLLYYAVTQDAMLIFENLSRGFGRQGKRTFMAERQYTRMEDWLTAKLAYEGLPSKTYLSKTLAQYTSKTCSNCGFTITSADYDRVLEKLKKTATGWMTTINGKELKVEGQITYYNRYKRQNVVKDLSVELDRLSEESVNNDISSWTKGRSGEALSLLKKRFSHRPVQEKFVCLNCGFETHADEQAALNIARSWLFLRSQEYKKYQTNKTTGNTDKRAFVETWQSFYRKKLKEVWKPAV

SEQ ID NO: 43926 - protein, 978 aa, synthetic construct
  REGION 1..978: note = engineered CasX variant
QEIKRINKIRRRLVKDSNTKKAGKTGPMKTLLVRVMTPDLRERLENLRKKPENIPQPISNTSRANLNKLLTDYTEMKKAILHVYWEEFQKDPVGLMSRVAQPASKKIDQNKLKPEMDEKGNLTTAGFACSQCGQPLFVYKLEQVSEKGKAYTNYFGRCNVAEHEKLIKLAQLKPEKDSDEAVTYSLGKFGQRALDFYSIHVTKESTHPVKPLAQIAGNRYASGPVGKALSDACMGTIASFLSKYQDIIIEHQKVVKGNQKRLESLRELAGKENLEYPSVTLPPQPHTKEGVDAYNEVIARVRWWVNLNLWQKLKLSRDDAKPLLRLKGFPSFPLVERQANEVDWWDMVCNVKKLINEKKEDGKVFWQNLAGYKRQEALRPYLSSEEDRKKGKKFARYQLGDLLWHLEKKHGEDWGKVYDEAWERIDKKVEGLSKHIKLEEERRSEDAQSKAALTDWLRAKASFVIEGLKEADKDEFCRCELKLQKWYGDLRGKPFAIEAENSILDISGFSKQYNCAFIWQKDGVKKLNLYLIINYFKGGKLRFKKIKPEAFEANRFYTVINKKSGEIVPMEVNFNFDDPNLIILPLAFGKRQGREFIWNDLLSLETGSLKLANGRVIEKTLYNRRTRQDEPALFVALTFERREVLDSSNIKPMNLIGVDRGENIPAVIALTDPEGCPLSRFKDSLGNPTHILRIGESYKEKQRTIQAKKEVEQRRAGGYSRKYASKAKNLADDMVRNTARDLLYYAVTQDAMLIFENLSRGFGRQGKRTFMAERQYTRMEDWLTAKLAYEGLPSKTYLSKTLAQYTSKTCSNCGFTITSADYDRVLEKLKKTATGWMTTINGKELKVEGQITYYNRYKRQNVVKDLSVELDRLSEESVNNDISSWTKGRSGEALSLLKKRFSHRPVQEKFVCLNCGFETHADEQAALNIARSWLFLRSQEYKKYQTNKTTGNTDKRAFVETWQSFYRKKLKEVWKPAV

SEQ ID NO: 43927 - protein, 977 aa, synthetic construct
  REGION 1..977: note = engineered CasX variant
QEIKRINKIRRRLVKDSNTKKAGKTGPMKTLLVRVMTPDLRERLENLRKKPENIPQPISNTSRANLNKLLTDYTEMKKAILHVYWEEFQKDPVGLMSRVAQPASKKIDQNKLKPEMDEKGNLTTAGFACSQCGQPLFVYKLEQVSEKGKAYTNYFGRCNVAEHEKLILLAQLKPEKDSDEAVTYSLGKFGQRALDFYSIHVTKESTHPVKPLAQIAGNRYASPVGKALSDACMGTIASFLSKYQDIIIEHQKVVKGNQKRLESLRELAGKENLEYPSVTLPPQPHTKEGVDAYNEVIARVRWWVNLNLWQKLKLSRDDAKPLLRLKGFPSFPLVERQANEVDWWDMVCNVKKLINEKKEDGKVFWQNLAGYKRQEALRPYLSSEEDRKKGKKFARYQLGDLLWHLEKKHGEDWGKVYDEAWERIDKKVEGLSKHIKLEEERRSEDAQSKAALTDWLRAKASFVIEGLKEADKDEFCRCELKLQKWYGDLRGKPFAIEAENSILDISGFSKQYNCAFIWQKDGVKKLNLYLIINYFKGGKLRFKKIKPEAFEANRFYTVINKKSGEIVPMEVNFNFDDPNLIILPLAFGKRQGREFIWNDLLSLETGSLKLANGRVIEKTLYNRRTRQDEPALFVALTFERREVLDSSNIKPMNLIGVDRGENIPAVIALTDPEGCPLSRFKDSLGNPTHILRIGESYKEKQRTIQAKKEVEQRRAGGYSRKYASKAKNLADDMVRNTARDLLYYAVTQDAMLIFENLSRGFGRQGKRTFMAERQYTRMEDWLTAKLAYEGLPSKTYLSKTLAQYTSKTCSNCGFTITSADYDRVLEKLKKTATGWMTTINGKELKVEGQITYYNRYKRQNVVKDLSVELDRLSEESVNNDISSWTKGRSGEALSLLKKRFSHRPVQEKFVCLNCGFETHADEQAALNIARSWLFLRSQEYKKYQTNKTTGNTDKRAFVETWQSFYRKKLKEVWKPAV

SEQ ID NO: 43928 - protein, 978 aa, synthetic construct
  REGION 1..978: note = engineered CasX variant
QEIKRINKIRRRLVKDSNTKKAGKTGPMKTLLVRVMTPDLRERLENLRKKPENIPQPISNTSRANLNKLLTDYTEMKKAILHVYWEEFQKDPVGLMSRVAQPASKKIDQNKLKPEMDEKGNLTTAGFACSQCGQPLFVYKLEQVSEKGKAYTNYFGRCNVAEHEKLILLAQLKPEKDSDEAVTYSLGKFGQRALDFYSIHVTKESTHPVKPLAQIAGNRYASYPVGKALSDACMGTIASFLSKYQDIIIEHQKVVKGNQKRLESLRELAGKENLEYPSVTLPPQPHTKEGVDAYNEVIARVRWWVNLNLWQKLKLSRDDAKPLLRLKGFPSFPLVERQANEVDWWDMVCNVKKLINEKKEDGKVFWQNLAGYKRQEALRPYLSSEEDRKKGKKFARYQLGDLLLHLYKKHGEDWGKVYDEAWERIDKKVEGLSKHIKLEEERRSEDAQSKAALTDWLRAKASFVIEGLKEADKDEFCRCELKLQKWYGDLRGKPFAIEAENSILDISGFSKQYNCAFIWQKDGVKKLNLYLIINYFKGGKLRFKKIKPEAFEANRFYTVINKKSGEIVPMEVNFNFDDPNLIILPLAFGKRQGREFIWNDLLSLETGSLKLANGRVIEKTLYNRRTRQDEPALFVALTFERREVLDSSNIKPMNLIGVDRGENIPAVIALTDPEGCPLSRFKDSLGNPTHILRIGESYKEKQRTIQAKKEVEQRRAGGYSRKYASKAKNLADDMVRNTARDLLYYAVTQDAMLIFENLSRGFGRQGKRTFMAERQYTRMEDWLTAKLAYEGLPSKTYLSKTLAQYTSKTCSNCGFTITSADYDRVLEKLKKTATGWMTTINGKELKVEGQITYYNRYKRQNVVKDLSVELDRLSEESVNNDISSWTKGRSGEALSLLKKRFSHRPVQEKFVCLNCGFETHADEQAALNIARSWLFLRSQEYKKYQTNKTTGNTDKRAFVETWQSFYRKKLKEVWKPAV

SEQ ID NO: 43929 - protein, 978 aa, synthetic construct
  REGION 1..978: note = engineered CasX variant
QEIKRINKIRRRLVKDSNTKKAGKTGPMKTLLVRVMTPDLRERLENLRKKPENIPQPISNTSRANLNKLLTDYTEMKKAILHVYWEEFQKDPVGLMSRVAQPASKKIDQNKLKPEMDEKGNLTTAGFACSQCGQPLFVYKLEQVSEKGKAYTNYFGRCNVAEHEKLILLAQLKPEKDSDEAVTYSLGKFGQRALDFYSIHVTKESTHPVKPLAQIAGNRYASHPVGKALSDACMGTIASFLSKYQDIIIEHQKVVKGNQKRLESLRELAGKENLEYPSVTLPPQPHTKEGVDAYNEVIARVRWWVNLNLWQKLKLSRDDAKPLLRLKGFPSFPLVERQANEVDWWDMVCNVKKLINEKKEDGKVFWQNLAGYKRQEALRPYLSSEEDRKKGKKFARYQLGDLLLHLYKKHGEDWGKVYDEAWERIDKKVEGLSKHIKLEEERRSEDAQSKAALTDWLRAKASFVIEGLKEADKDEFCRCELKLQKWYGDLRGKPFAIEAENSILDISGFSKQYNCAFIWQKDGVKKLNLYLIINYFKGGKLRFKKIKPEAFEANRFYTVINKKSGEIVPMEVNFNFDDPNLIILPLAFGKRQGREFIWNDLLSLETGSLKLANGRVIEKTLYNRRTRQDEPALFVALTFERREVLDSSNIKPMNLIGVDRGENIPAVIALTDPEGCPLSRFKDSLGNPTHILRIGESYKEKQRTIQAKKEVEQRRAGGYSRKYASKAKNLADDMVRNTARDLLYYAVTQDAMLIFENLSRGFGRQGKRTFMAERQYTRMEDWLTAKLAYEGLPSKTYLSKTLAQYTSKTCSNCGFTITSADYDRVLEKLKKTATGWMTTINGKELKVEGQITYYNRYKRQNVVKDLSVELDRLSEESVNNDISSWTKGRSGEALSLLKKRFSHRPVQEKFVCLNCGFETHADEQAALNIARSWLFLRSQEYKKYQTNKTTGNTDKRAFVETWQSFYRKKLKEVWKPAV

SEQ ID NO: 43930 - protein, 978 aa, synthetic construct
  REGION 1..978: note = engineered CasX variant
QEIKRINKIRRRLVKDSNTKKAGKTGPMKTLLVRVMTPDLRERLENLRKKPENIPQPISNTSRANLNKLLTDYTEMKKAILHVYWEEFQKDPVGLMSRVAQPASKKIDQNKLKPEMDEKGNLTTAGFACSQCGQPLFVYKLEQVSEKGKAYTNYFGRCNVAEHEKLILLAQLKPEKDSDEAVTYSLGKFGQRALDFYSIHVTKESTHPVKPLAQIAGNRYASSPVGKALSDACMGTIASFLSKYQDIIIEHQKVVKGNQKRLESLRELAGKENLEYPSVTLPPQPHTKEGVDAYNEVIARVRWWVNLNLWQKLKLSRDDAKPLLRLKGFPSFPLVERQANEVDWWDMVCNVKKLINEKKEDGKVFWQNLAGYKRQEALRPYLSSEEDRKKGKKFARYQLGDLLLHLYKKHGEDWGKVYDEAWERIDKKVEGLSKHIKLEEERRSEDAQSKAALTDWLRAKASFVIEGLKEADKDEFCRCELKLQKWYGDLRGKPFAIEAENSILDISGFSKQYNCAFIWQKDGVKKLNLYLIINYFKGGKLRFKKIKPEAFEANRFYTVINKKSGEIVPMEVNFNFDDPNLIILPLAFGKRQGREFIWNDLLSLETGSLKLANGRVIEKTLYNRRTRQDEPALFVALTFERREVLDSSNIKPMNLIGVDRGENIPAVIALTDPEGCPLSRFKDSLGNPTHILRIGESYKEKQRTIQAKKEVEQRRAGGYSRKYASKAKNLADDMVRNTARDLLYYAVTQDAMLIFENLSRGFGRQGKRTFMAERQYTRMEDWLTAKLAYEGLPSKTYLSKTLAQYTSKTCSNCGFTITSADYDRVLEKLKKTATGWMTTINGKELKVEGQITYYNRYKRQNVVKDLSVELDRLSEESVNNDISSWTKGRSGEALSLLKKRFSHRPVQEKFVCLNCGFETHADEQAALNIARSWLFLRSQEYKKYQTNKTTGNTDKRAFVETWQSFYRKKLKEVWKPAV

SEQ ID NO: 43931 - protein, 978 aa, synthetic construct
  REGION 1..978: note = engineered CasX variant
QEIKRINKIRRRLVKDSNTKKAGKTGPMKTLLVRVMTPDLRERLENLRKKPENIPQPISNTSRANLNKLLTDYTEMKKAILHVYWEEFQKDPVGLMSRVAQPASKKIDQNKLKPEMDEKGNLTTAGFACSQCGQPLFVYKLEQVSEKGKAYTNYFGRCNVAEHEKLILLAQLKPEKDSDEAVTYSLGKFGQRALDFYSIHVTKESTHPVKPLAQIAGNRYASTPVGKALSDACMGTIASFLSKYQDIIIEHQKVVKGNQKRLESLRELAGKENLEYPSVTLPPQPHTKEGVDAYNEVIARVRWWVNLNLWQKLKLSRDDAKPLLRLKGFPSFPLVERQANEVDWWDMVCNVKKLINEKKEDGKVFWQNLAGYKRQEALRPYLSSEEDRKKGKKFARYQLGDLLLHLYKKHGEDWGKVYDEAWERIDKKVEGLSKHIKLEEERRSEDAQSKAALTDWLRAKASFVIEGLKEADKDEFCRCELKLQKWYGDLRGKPFAIEAENSILDISGFSKQYNCAFIWQKDGVKKLNLYLIINYFKGGKLRFKKIKPEAFEANRFYTVINKKSGEIVPMEVNFNFDDPNLIILPLAFGKRQGREFIWNDLLSLETGSLKLANGRVIEKTLYNRRTRQDEPALFVALTFERREVLDSSNIKPMNLIGVDRGENIPAVIALTDPEGCPLSRFKDSLGNPTHILRIGESYKEKQRTIQAKKEVEQRRAGGYSRKYASKAKNLADDMVRNTARDLLYYAVTQDAMLIFENLSRGFGRQGKRTFMAERQYTRMEDWLTAKLAYEGLPSKTYLSKTLAQYTSKTCSNCGFTITSADYDRVLEKLKKTATGWMTTINGKELKVEGQITYYNRYKRQNVVKDLSVELDRLSEESVNNDISSWTKGRSGEALSLLKKRFSHRPVQEKFVCLNCGFETHADEQAALNIARSWLFLRSQEYKKYQTNKTTGNTDKRAFVETWQSFYRKKLKEVWKPAV

SEQ ID NO: 43932 - protein, 978 aa, synthetic construct
  REGION 1..978: note = engineered CasX variant
QEIKRINKIRRRLVKDSNTKKAGKTGPMKTLLVRVMTPDLRERLENLRKKPENIPQPISNTSRANLNKLLTDYTEMKKAILHVYWEEFQKDPVGLMSRVAQPASKKIDQNKLKPEMDEKGNLTTAGFACSQCGQPLFVYKLEQVSEKGKAYTNYFGRCNVAEHEKLILLAQLKPEKDSDEAVTYSLGKFGQRALDFYSIHVTKESTHPVKPLAQIAGNRYASAPVGKALSDACMGTIASFLSKYQDIIIEHQKVVKGNQKRLESLRELAGKENLEYPSVTLPPQPHTKEGVDAYNEVIARVRWWVNLNLWQKLKLSRDDAKPLLRLKGFPSFPLVERQANEVDWWDMVCNVKKLINEKKEDGKVFWQNLAGYKRQEALRPYLSSEEDRKKGKKFARYQLGDLLLHLYKKHGEDWGKVYDEAWERIDKKVEGLSKHIKLEEERRSEDAQSKAALTDWLRAKASFVIEGLKEADKDEFCRCELKLQKWYGDLRGKPFAIEAENSILDISGFSKQYNCAFIWQKDGVKKLNLYLIINYFKGGKLRFKKIKPEAFEANRFYTVINKKSGEIVPMEVNFNFDDPNLIILPLAFGKRQGREFIWNDLLSLETGSLKLANGRVIEKTLYNRRTRQDEPALFVALTFERREVLDSSNIKPMNLIGVDRGENIPAVIALTDPEGCPLSRFKDSLGNPTHILRIGESYKEKQRTIQAKKEVEQRRAGGYSRKYASKAKNLADDMVRNTARDLLYYAVTQDAMLIFENLSRGFGRQGKRTFMAERQYTRMEDWLTAKLAYEGLPSKTYLSKTLAQYTSKTCSNCGFTITSADYDRVLEKLKKTATGWMTTINGKELKVEGQITYYNRYKRQNVVKDLSVELDRLSEESVNNDISSWTKGRSGEALSLLKKRFSHRPVQEKFVCLNCGFETHADEQAALNIARSWLFLRSQEYKKYQTNKTTGNTDKRAFVETWQSFYRKKLKEVWKPAV

SEQ ID NO: 43933 - protein, 978 aa, synthetic construct
  REGION 1..978: note = engineered CasX variant
QEIKRINKIRRRLVKDSNTKKAGKTGPMKTLLVRVMTPDLRERLENLRKKPENIPQPISNTSRANLNKLLTDYTEMKKAILHVYWEEFQKDPVGLMSRVAQPASKKIDQNKLKPEMDEKGNLTTAGFACSQCGQPLFVYKLEQVSEKGKAYTNYFGRCNVAEHEKLILLAQLKPEKDSDEAVTYSLGKFGQRALDFYSIHVTKESTHPVKPLAQIAGNRYASVPVGKALSDACMGTIASFLSKYQDIIIEHQKVVKGNQKRLESLRELAGKENLEYPSVTLPPQPHTKEGVDAYNEVIARVRWWVNLNLWQKLKLSRDDAKPLLRLKGFPSFPLVERQANEVDWWDMVCNVKKLINEKKEDGKVFWQNLAGYKRQEALRPYLSSEEDRKKGKKFARYQLGDLLLHLYKKHGEDWGKVYDEAWERIDKKVEGLSKHIKLEEERRSEDAQSKAALTDWLRAKASFVIEGLKEADKDEFCRCELKLQKWYGDLRGKPFAIEAENSILDISGFSKQYNCAFIWQKDGVKKLNLYLIINYFKGGKLRFKKIKPEAFEANRFYTVINKKSGEIVPMEVNFNFDDPNLIILPLAFGKRQGREFIWNDLLSLETGSLKLANGRVIEKTLYNRRTRQDEPALFVALTFERREVLDSSNIKPMNLIGVDRGENIPAVIALTDPEGCPLSRFKDSLGNPTHILRIGESYKEKQRTIQAKKEVEQRRAGGYSRKYASKAKNLADDMVRNTARDLLYYAVTQDAMLIFENLSRGFGRQGKRTFMAERQYTRMEDWLTAKLAYEGLPSKTYLSKTLAQYTSKTCSNCGFTITSADYDRVLEKLKKTATGWMTTINGKELKVEGQITYYNRYKRQNVVKDLSVELDRLSEESVNNDISSWTKGRSGEALSLLKKRFSHRPVQEKFVCLNCGFETHADEQAALNIARSWLFLRSQEYKKYQTNKTTGNTDKRAFVETWQSFYRKKLKEVWKPAV

SEQ ID NO: 43934 - protein, 978 aa, synthetic construct
  REGION 1..978: note = engineered CasX variant
QEIKRINKIRRRLVKDSNTKKAGKTGPMKTLLVRVMTPDLRERLENLRKKPENIPQPISNTSRANLNKLLTDYTEMKKAILHVYWEEFQKDPVGLMSRVAQPASKKIDQNKLKPEMDEKGNLTTAGFACSQCGQPLFVYKLEQVSEKGKAYTNYFGRCNVAEHEKLIKLAQLKPEKDSDEAVTYSLGKFGQRALDFYSIHVTKESTHPVKPLAQIAGNRYASGPVGKALSDACMGTIASFLSKYQDIIIEHQKVVKGNQKRLESLRELAGKENLEYPSVTLPPQPHTKEGVDAYNEVIARVRWWVNLNLWQKLKLSRDDAKPLLRLKGFPSFPLVERQANEVDWWDMVCNVKKLINEKKEDGKVFWQNLAGYKRQEALRPYLSSEEDRKKGKKFARYQLGDLLLHLYKKHGEDWGKVYDEAWERIDKKVEGLSKHIKLEEERRSEDAQSKAALTDWLRAKASFVIEGLKEADKDEFCRCELKLQKWYGDLRGKPFAIEAENSILDISGFSKQYNCAFIWQKDGVKKLNLYLIINYFKGGKLRFKKIKPEAFEANRFYTVINKKSGEIVPMEVNFNFDDPNLIILPLAFGKRQGREFIWNDLLSLETGSLKLANGRVIEKTLYNRRTRQDEPALFVALTFERREVLDSSNIKPMNLIGVDRGENIPAVIALTDPEGCPLSRFKDSLGNPTHILRIGESYKEKQRTIQAKKEVEQRRAGGYSRKYASKAKNLADDMVRNTARDLLYYAVTQDAMLIFENLSRGFGRQGKRTFMAERQYTRMEDWLTAKLAYEGLPSKTYLSKTLAQYTSKTCSNCGFTITSADYDRVLEKLKKTATGWMTTINGKELKVEGQITYYNRYKRQNVVKDLSVELDRLSEESVNNDISSWTKGRSGEALSLLKKRFSHRPVQEKFVCLNCGFETHADEQAALNIARSWLFLRSQEYKKYQTNKTTGNTDKRAFVETWQSFYRKKLKEVWKPAV

SEQ ID NO: 43935 - protein, 977 aa, synthetic construct
  REGION 1..977: note = engineered CasX variant
QEIKRINKIRRRLVKDSNTKKAGKTGPMKTLLVRVMTPDLRERLENLRKKPENIPQPISNTSRANLNKLLTDYTEMKKAILHVYWEEFQKDPVGLMSRVAQPASKKIDQNKLKPEMDEKGNLTTAGFACSQCGQPLFVYKLEQVSEKGKAYTNYFGRCNVAEHEKLILLAQLKPEKDSDEAVTYSLGKFGQRALDFYSIHVTKESTHPVKPLAQIAGNRYASPVGKALSDACMGTIASFLSKYQDIIIEHQKVVKGNQKRLESLRELAGKENLEYPSVTLPPQPHTKEGVDAYNEVIARVRWWVNLNLWQKLKLSRDDAKPLLRLKGFPSFPLVERQANEVDWWDMVCNVKKLINEKKEDGKVFWQNLAGYKRQEALRPYLSSEEDRKKGKKFARYQLGDLLLHLYKKHGEDWGKVYDEAWERIDKKVEGLSKHIKLEEERRSEDAQSKAALTDWLRAKASFVIEGLKEADKDEFCRCELKLQKWYGDLRGKPFAIEAENSILDISGFSKQYNCAFIWQKDGVKKLNLYLIINYFKGGKLRFKKIKPEAFEANRFYTVINKKSGEIVPMEVNFNFDDPNLIILPLAFGKRQGREFIWNDLLSLETGSLKLANGRVIEKTLYNRRTRQDEPALFVALTFERREVLDSSNIKPMNLIGVDRGENIPAVIALTDPEGCPLSRFKDSLGNPTHILRIGESYKEKQRTIQAKKEVEQRRAGGYSRKYASKAKNLADDMVRNTARDLLYYAVTQDAMLIFENLSRGFGRQGKRTFMAERQYTRMEDWLTAKLAYEGLPSKTYLSKTLAQYTSKTCSNCGFTITSADYDRVLEKLKKTATGWMTTINGKELKVEGQITYYNRYKRQNVVKDLSVELDRLSEESVNNDISSWTKGRSGEALSLLKKRFSHRPVQEKFVCLNCGFETHADEQAALNIARSWLFLRSQEYKKYQTNKTTGNTDKRAFVETWQSFYRKKLKEVWKPAV

SEQ ID NO: 43936 - protein, 978 aa, synthetic construct
  REGION 1..978: note = engineered CasX variant
QEIKRINKIRRRLVKDSNTKKAGKTGPMKTLLVRVMTPDLRERLENLRKKPENIPQPISNTSRANLNKLLTDYTEMKKAILHVYWEEFQKDPVGLMSRVAQPASKKIDQNKLKPEMDEKGNLTTAGFACSQCGQPLFVYKLEQVSEKGKAYTNYFGRCNVAEHEKLILLAQLKPEKDSDEAVTYSLGKFGQRALDFYSIHVTKESTHPVKPLAQIAGNRYASYPVGKALSDACMGTIASFLSKYQDIIIEHQKVVKGNQKRLESLRELAGKENLEYPSVTLPPQPHTKEGVDAYNEVIARVRWWVNLNLWQKLKLSRDDAKPLLRLKGFPSFPLVERQANEVDWWDMVCNVKKLINEKKEDGKVFWQNLAGYKRQEALRPYLSSEEDRKKGKKFARYQLGDLLLHLEKKHPEDWGKVYDEAWERIDKKVEGLSKHIKLEEERRSEDAQSKAALTDWLRAKASFVIEGLKEADKDEFCRCELKLQKWYGDLRGKPFAIEAENSILDISGFSKQYNCAFIWQKDGVKKLNLYLIINYFKGGKLRFKKIKPEAFEANRFYTVINKKSGEIVPMEVNFNFDDPNLIILPLAFGKRQGREFIWNDLLSLETGSLKLANGRVIEKTLYNRRTRQDEPALFVALTFERREVLDSSNIKPMNLIGVDRGENIPAVIALTDPEGCPLSRFKDSLGNPTHILRIGESYKEKQRTIQAKKEVEQRRAGGYSRKYASKAKNLADDMVRNTARDLLYYAVTQDAMLIFENLSRGFGRQGKRTFMAERQYTRMEDWLTAKLAYEGLPSKTYLSKTLAQYTSKTCSNCGFTITSADYDRVLEKLKKTATGWMTTINGKELKVEGQITYYNRYKRQNVVKDLSVELDRLSEESVNNDISSWTKGRSGEALSLLKKRFSHRPVQEKFVCLNCGFETHADEQAALNIARSWLFLRSQEYKKYQTNKTTGNTDKRAFVETWQSFYRKKLKEVWKPAV

SEQ ID NO: 43937 - protein, 978 aa, synthetic construct
  REGION 1..978: note = engineered CasX variant
QEIKRINKIRRRLVKDSNTKKAGKTGPMKTLLVRVMTPDLRERLENLRKKPENIPQPISNTSRANLNKLLTDYTEMKKAILHVYWEEFQKDPVGLMSRVAQPASKKIDQNKLKPEMDEKGNLTTAGFACSQCGQPLFVYKLEQVSEKGKAYTNYFGRCNVAEHEKLILLAQLKPEKDSDEAVTYSLGKFGQRALDFYSIHVTKESTHPVKPLAQIAGNRYASHPVGKALSDACMGTIASFLSKYQDIIIEHQKVVKGNQKRLESLRELAGKENLEYPSVTLPPQPHTKEGVDAYNEVIARVRWWVNLNLWQKLKLSRDDAKPLLRLKGFPSFPLVERQANEVDWWDMVCNVKKLINEKKEDGKVFWQNLAGYKRQEALRPYLSSEEDRKKGKKFARYQLGDLLLHLEKKHPEDWGKVYDEAWERIDKKVEGLSKHIKLEEERRSEDAQSKAALTDWLRAKASFVIEGLKEADKDEFCRCELKLQKWYGDLRGKPFAIEAENSILDISGFSKQYNCAFIWQKDGVKKLNLYLIINYFKGGKLRFKKIKPEAFEANRFYTVINKKSGEIVPMEVNFNFDDPNLIILPLAFGKRQGREFIWNDLLSLETGSLKLANGRVIEKTLYNRRTRQDEPALFVALTFERREVLDSSNIKPMNLIGVDRGENIPAVIALTDPEGCPLSRFKDSLGNPTHILRIGESYKEKQRTIQAKKEVEQRRAGGYSRKYASKAKNLADDMVRNTARDLLYYAVTQDAMLIFENLSRGFGRQGKRTFMAERQYTRMEDWLTAKLAYEGLPSKTYLSKTLAQYTSKTCSNCGFTITSADYDRVLEKLKKTATGWMTTINGKELKVEGQITYYNRYKRQNVVKDLSVELDRLSEESVNNDISSWTKGRSGEALSLLKKRFSHRPVQEKFVCLNCGFETHADEQAALNIARSWLFLRSQEYKKYQTNKTTGNTDKRAFVETWQSFYRKKLKEVWKPAV

SEQ ID NO: 43938 - protein, 978 aa, synthetic construct
  REGION 1..978: note = engineered CasX variant
QEIKRINKIRRRLVKDSNTKKAGKTGPMKTLLVRVMTPDLRERLENLRKKPENIPQPISNTSRANLNKLLTDYTEMKKAILHVYWEEFQKDPVGLMSRVAQPASKKIDQNKLKPEMDEKGNLTTAGFACSQCGQPLFVYKLEQVSEKGKAYTNYFGRCNVAEHEKLILLAQLKPEKDSDEAVTYSLGKFGQRALDFYSIHVTKESTHPVKPLAQIAGNRYASSPVGKALSDACMGTIASFLSKYQDIIIEHQKVVKGNQKRLESLRELAGKENLEYPSVTLPPQPHTKEGVDAYNEVIARVRWWVNLNLWQKLKLSRDDAKPLLRLKGFPSFPLVERQANEVDWWDMVCNVKKLINEKKEDGKVFWQNLAGYKRQEALRPYLSSEEDRKKGKKFARYQLGDLLLHLEKKHPEDWGKVYDEAWERIDKKVEGLSKHIKLEEERRSEDAQSKAALTDWLRAKASFVIEGLKEADKDEFCRCELKLQKWYGDLRGKPFAIEAENSILDISGFSKQYNCAFIWQKDGVKKLNLYLIINYFKGGKLRFKKIKPEAFEANRFYTVINKKSGEIVPMEVNFNFDDPNLIILPLAFGKRQGREFIWNDLLSLETGSLKLANGRVIEKTLYNRRTRQDEPALFVALTFERREVLDSSNIKPMNLIGVDRGENIPAVIALTDPEGCPLSRFKDSLGNPTHILRIGESYKEKQRTIQAKKEVEQRRAGGYSRKYASKAKNLADDMVRNTARDLLYYAVTQDAMLIFENLSRGFGRQGKRTFMAERQYTRMEDWLTAKLAYEGLPSKTYLSKTLAQYTSKTCSNCGFTITSADYDRVLEKLKKTATGWMTTINGKELKVEGQITYYNRYKRQNVVKDLSVELDRLSEESVNNDISSWTKGRSGEALSLLKKRFSHRPVQEKFVCLNCGFETHADEQAALNIARSWLFLRSQEYKKYQTNKTTGNTDKRAFVETWQSFYRKKLKEVWKPAV

SEQ ID NO: 43939 - protein, 978 aa, synthetic construct
  REGION 1..978: note = engineered CasX variant
QEIKRINKIRRRLVKDSNTKKAGKTGPMKTLLVRVMTPDLRERLENLRKKPENIPQPISNTSRANLNKLLTDYTEMKKAILHVYWEEFQKDPVGLMSRVAQPASKKIDQNKLKPEMDEKGNLTTAGFACSQCGQPLFVYKLEQVSEKGKAYTNYFGRCNVAEHEKLILLAQLKPEKDSDEAVTYSLGKFGQRALDFYSIHVTKESTHPVKPLAQIAGNRYASTPVGKALSDACMGTIASFLSKYQDIIIEHQKVVKGNQKRLESLRELAGKENLEYPSVTLPPQPHTKEGVDAYNEVIARVRWWVNLNLWQKLKLSRDDAKPLLRLKGFPSFPLVERQANEVDWWDMVCNVKKLINEKKEDGKVFWQNLAGYKRQEALRPYLSSEEDRKKGKKFARYQLGDLLLHLEKKHPEDWGKVYDEAWERIDKKVEGLSKHIKLEEERRSEDAQSKAALTDWLRAKASFVIEGLKEADKDEFCRCELKLQKWYGDLRGKPFAIEAENSILDISGFSKQYNCAFIWQKDGVKKLNLYLIINYFKGGKLRFKKIKPEAFEANRFYTVINKKSGEIVPMEVNFNFDDPNLIILPLAFGKRQGREFIWNDLLSLETGSLKLANGRVIEKTLYNRRTRQDEPALFVALTFERREVLDSSNIKPMNLIGVDRGENIPAVIALTDPEGCPLSRFKDSLGNPTHILRIGESYKEKQRTIQAKKEVEQRRAGGYSRKYASKAKNLADDMVRNTARDLLYYAVTQDAMLIFENLSRGFGRQGKRTFMAERQYTRMEDWLTAKLAYEGLPSKTYLSKTLAQYTSKTCSNCGFTITSADYDRVLEKLKKTATGWMTTINGKELKVEGQITYYNRYKRQNVVKDLSVELDRLSEESVNNDISSWTKGRSGEALSLLKKRFSHRPVQEKFVCLNCGFETHADEQAALNIARSWLFLRSQEYKKYQTNKTTGNTDKRAFVETWQSFYRKKLKEVWKPAV

SEQ ID NO: 43940 - protein, 978 aa, synthetic construct
  REGION 1..978: note = engineered CasX variant
QEIKRINKIRRRLVKDSNTKKAGKTGPMKTLLVRVMTPDLRERLENLRKKPENIPQPISNTSRANLNKLLTDYTEMKKAILHVYWEEFQKDPVGLMSRVAQPASKKIDQNKLKPEMDEKGNLTTAGFACSQCGQPLFVYKLEQVSEKGKAYTNYFGRCNVAEHEKLILLAQLKPEKDSDEAVTYSLGKFGQRALDFYSIHVTKESTHPVKPLAQIAGNRYASAPVGKALSDACMGTIASFLSKYQDIIIEHQKVVKGNQKRLESLRELAGKENLEYPSVTLPPQPHTKEGVDAYNEVIARVRWWVNLNLWQKLKLSRDDAKPLLRLKGFPSFPLVERQANEVDWWDMVCNVKKLINEKKEDGKVFWQNLAGYKRQEALRPYLSSEEDRKKGKKFARYQLGDLLLHLEKKHPEDWGKVYDEAWERIDKKVEGLSKHIKLEEERRSEDAQSKAALTDWLRAKASFVIEGLKEADKDEFCRCELKLQKWYGDLRGKPFAIEAENSILDISGFSKQYNCAFIWQKDGVKKLNLYLIINYFKGGKLRFKKIKPEAFEANRFYTVINKKSGEIVPMEVNFNFDDPNLIILPLAFGKRQGREFIWNDLLSLETGSLKLANGRVIEKTLYNRRTRQDEPALFVALTFERREVLDSSNIKPMNLIGVDRGENIPAVIALTDPEGCPLSRFKDSLGNPTHILRIGESYKEKQRTIQAKKEVEQRRAGGYSRKYASKAKNLADDMVRNTARDLLYYAVTQDAMLIFENLSRGFGRQGKRTFMAERQYTRMEDWLTAKLAYEGLPSKTYLSKTLAQYTSKTCSNCGFTITSADYDRVLEKLKKTATGWMTTINGKELKVEGQITYYNRYKRQNVVKDLSVELDRLSEESVNNDISSWTKGRSGEALSLLKKRFSHRPVQEKFVCLNCGFETHADEQAALNIARSWLFLRSQEYKKYQTNKTTGNTDKRAFVETWQSFYRKKLKEVWKPAV

SEQ ID NO: 43941 - protein, 978 aa, synthetic construct
  REGION 1..978: note = engineered CasX variant
QEIKRINKIRRRLVKDSNTKKAGKTGPMKTLLVRVMTPDLRERLENLRKKPENIPQPISNTSRANLNKLLTDYTEMKKAILHVYWEEFQKDPVGLMSRVAQPASKKIDQNKLKPEMDEKGNLTTAGFACSQCGQPLFVYKLEQVSEKGKAYTNYFGRCNVAEHEKLILLAQLKPEKDSDEAVTYSLGKFGQRALDFYSIHVTKESTHPVKPLAQIAGNRYASVPVGKALSDACMGTIASFLSKYQDIIIEHQKVVKGNQKRLESLRELAGKENLEYPSVTLPPQPHTKEGVDAYNEVIARVRWWVNLNLWQKLKLSRDDAKPLLRLKGFPSFPLVERQANEVDWWDMVCNVKKLINEKKEDGKVFWQNLAGYKRQEALRPYLSSEEDRKKGKKFARYQLGDLLLHLEKKHPEDWGKVYDEAWERIDKKVEGLSKHIKLEEERRSEDAQSKAALTDWLRAKASFVIEGLKEADKDEFCRCELKLQKWYGDLRGKPFAIEAENSILDISGFSKQYNCAFIWQKDGVKKLNLYLIINYFKGGKLRFKKIKPEAFEANRFYTVINKKSGEIVPMEVNFNFDDPNLIILPLAFGKRQGREFIWNDLLSLETGSLKLANGRVIEKTLYNRRTRQDEPALFVALTFERREVLDSSNIKPMNLIGVDRGENIPAVIALTDPEGCPLSRFKDSLGNPTHILRIGESYKEKQRTIQAKKEVEQRRAGGYSRKYASKAKNLADDMVRNTARDLLYYAVTQDAMLIFENLSRGFGRQGKRTFMAERQYTRMEDWLTAKLAYEGLPSKTYLSKTLAQYTSKTCSNCGFTITSADYDRVLEKLKKTATGWMTTINGKELKVEGQITYYNRYKRQNVVKDLSVELDRLSEESVNNDISSWTKGRSGEALSLLKKRFSHRPVQEKFVCLNCGFETHADEQAALNIARSWLFLRSQEYKKYQTNKTTGNTDKRAFVETWQSFYRKKLKEVWKPAV

SEQ ID NO: 43942 - protein, 978 aa, synthetic construct
  REGION 1..978: note = engineered CasX variant
QEIKRINKIRRRLVKDSNTKKAGKTGPMKTLLVRVMTPDLRERLENLRKKPENIPQPISNTSRANLNKLLTDYTEMKKAILHVYWEEFQKDPVGLMSRVAQPASKKIDQNKLKPEMDEKGNLTTAGFACSQCGQPLFVYKLEQVSEKGKAYTNYFGRCNVAEHEKLIKLAQLKPEKDSDEAVTYSLGKFGQRALDFYSIHVTKESTHPVKPLAQIAGNRYASGPVGKALSDACMGTIASFLSKYQDIIIEHQKVVKGNQKRLESLRELAGKENLEYPSVTLPPQPHTKEGVDAYNEVIARVRWWVNLNLWQKLKLSRDDAKPLLRLKGFPSFPLVERQANEVDWWDMVCNVKKLINEKKEDGKVFWQNLAGYKRQEALRPYLSSEEDRKKGKKFARYQLGDLLLHLEKKHPEDWGKVYDEAWERIDKKVEGLSKHIKLEEERRSEDAQSKAALTDWLRAKASFVIEGLKEADKDEFCRCELKLQKWYGDLRGKPFAIEAENSILDISGFSKQYNCAFIWQKDGVKKLNLYLIINYFKGGKLRFKKIKPEAFEANRFYTVINKKSGEIVPMEVNFNFDDPNLIILPLAFGKRQGREFIWNDLLSLETGSLKLANGRVIEKTLYNRRTRQDEPALFVALTFERREVLDSSNIKPMNLIGVDRGENIPAVIALTDPEGCPLSRFKDSLGNPTHILRIGESYKEKQRTIQAKKEVEQRRAGGYSRKYASKAKNLADDMVRNTARDLLYYAVTQDAMLIFENLSRGFGRQGKRTFMAERQYTRMEDWLTAKLAYEGLPSKTYLSKTLAQYTSKTCSNCGFTITSADYDRVLEKLKKTATGWMTTINGKELKVEGQITYYNRYKRQNVVKDLSVELDRLSEESVNNDISSWTKGRSGEALSLLKKRFSHRPVQEKFVCLNCGFETHADEQAALNIARSWLFLRSQEYKKYQTNKTTGNTDKRAFVETWQSFYRKKLKEVWKPAV

SEQ ID NO: 43943 - protein, 977 aa, synthetic construct
  REGION 1..977: note = engineered CasX variant
QEIKRINKIRRRLVKDSNTKKAGKTGPMKTLLVRVMTPDLRERLENLRKKPENIPQPISNTSRANLNKLLTDYTEMKKAILHVYWEEFQKDPVGLMSRVAQPASKKIDQNKLKPEMDEKGNLTTAGFACSQCGQPLFVYKLEQVSEKGKAYTNYFGRCNVAEHEKLILLAQLKPEKDSDEAVTYSLGKFGQRALDFYSIHVTKESTHPVKPLAQIAGNRYASPVGKALSDACMGTIASFLSKYQDIIIEHQKVVKGNQKRLESLRELAGKENLEYPSVTLPPQPHTKEGVDAYNEVIARVRWWVNLNLWQKLKLSRDDAKPLLRLKGFPSFPLVERQANEVDWWDMVCNVKKLINEKKEDGKVFWQNLAGYKRQEALRPYLSSEEDRKKGKKFARYQLGDLLLHLEKKHPEDWGKVYDEAWERIDKKVEGLSKHIKLEEERRSEDAQSKAALTDWLRAKASFVIEGLKEADKDEFCRCELKLQKWYGDLRGKPFAIEAENSILDISGFSKQYNCAFIWQKDGVKKLNLYLIINYFKGGKLRFKKIKPEAFEANRFYTVINKKSGEIVPMEVNFNFDDPNLIILPLAFGKRQGREFIWNDLLSLETGSLKLANGRVIEKTLYNRRTRQDEPALFVALTFERREVLDSSNIKPMNLIGVDRGENIPAVIALTDPEGCPLSRFKDSLGNPTHILRIGESYKEKQRTIQAKKEVEQRRAGGYSRKYASKAKNLADDMVRNTARDLLYYAVTQDAMLIFENLSRGFGRQGKRTFMAERQYTRMEDWLTAKLAYEGLPSKTYLSKTLAQYTSKTCSNCGFTITSADYDRVLEKLKKTATGWMTTINGKELKVEGQITYYNRYKRQNVVKDLSVELDRLSEESVNNDISSWTKGRSGEALSLLKKRFSHRPVQEKFVCLNCGFETHADEQAALNIARSWLFLRSQEYKKYQTNKTTGNTDKRAFVETWQSFYRKKLKEVWKPAV

SEQ ID NO: 43944 - protein, 979 aa, synthetic construct
  REGION 1..979: note = engineered CasX variant
QEIKRINKIRRRLVKDSNTKKAGKTGPMKTLLVRVMTPDLRERLENLRKKPENIPQPISNTSRANLNKLLTDYTEMKKAILHVYWEEFQKDPVGLMSRVAQPASKKIDQNKLKPEMDEKGNLTTAGFACSQCGQPLFVYKLEQVSEKGKAYTNYFGRCNVAEHEKLILLAQLKPEKDSDEAVTYSLGKFGQRALDFYSIHVTKESTHPVKPLAQIAGNRYASYPVGKALSDACMGTIASFLSKYQDIIIEHQKVVKGNQKRLESLRELAGKENLEYPSVTLPPQPHTKEGVDAYNEVIARVRWWVNLNLWQKLKLSRDDAKPLLRLKGFPSFPLVERQANEVDWWDMVCNVKKLINEKKEDGKVFWQNLAGYKRQEALRPYLSSEEDRKKGKKFARYQLGDLLLHLEKKHGERDWGKVYDEAWERIDKKVEGLSKHIKLEEERRSEDAQSKAALTDWLRAKASFVIEGLKEADKDEFCRCELKLQKWYGDLRGKPFAIEAENSILDISGFSKQYNCAFIWQKDGVKKLNLYLIINYFKGGKLRFKKIKPEAFEANRFYTVINKKSGEIVPMEVNFNFDDPNLIILPLAFGKRQGREFIWNDLLSLETGSLKLANGRVIEKTLYNRRTRQDEPALFVALTFERREVLDSSNIKPMNLIGVDRGENIPAVIALTDPEGCPLSRFKDSLGNPTHILRIGESYKEKQRTIQAKKEVEQRRAGGYSRKYASKAKNLADDMVRNTARDLLYYAVTQDAMLIFENLSRGFGRQGKRTFMAERQYTRMEDWLTAKLAYEGLPSKTYLSKTLAQYTSKTCSNCGFTITSADYDRVLEKLKKTATGWMTTINGKELKVEGQITYYNRYKRQNVVKDLSVELDRLSEESVNNDISSWTKGRSGEALSLLKKRFSHRPVQEKFVCLNCGFETHADEQAALNIARSWLFLRSQEYKKYQTNKTTGNTDKRAFVETWQSFYRKKLKEVWKPAV

SEQ ID NO: 43945 - protein, 979 aa, synthetic construct
  REGION 1..979: note = engineered CasX variant
QEIKRINKIRRRLVKDSNTKKAGKTGPMKTLLVRVMTPDLRERLENLRKKPENIPQPISNTSRANLNKLLTDYTEMKKAILHVYWEEFQKDPVGLMSRVAQPASKKIDQNKLKPEMDEKGNLTTAGFACSQCGQPLFVYKLEQVSEKGKAYTNYFGRCNVAEHEKLILLAQLKPEKDSDEAVTYSLGKFGQRALDFYSIHVTKESTHPVKPLAQIAGNRYASHPVGKALSDACMGTIASFLSKYQDIIIEHQKVVKGNQKRLESLRELAGKENLEYPSVTLPPQPHTKEGVDAYNEVIARVRWWVNLNLWQKLKLSRDDAKPLLRLKGFPSFPLVERQANEVDWWDMVCNVKKLINEKKEDGKVFWQNLAGYKRQEALRPYLSSEEDRKKGKKFARYQLGDLLLHLEKKHGERDWGKVYDEAWERIDKKVEGLSKHIKLEEERRSEDAQSKAALTDWLRAKASFVIEGLKEADKDEFCRCELKLQKWYGDLRGKPFAIEAENSILDISGFSKQYNCAFIWQKDGVKKLNLYLIINYFKGGKLRFKKIKPEAFEANRFYTVINKKSGEIVPMEVNFNFDDPNLIILPLAFGKRQGREFIWNDLLSLETGSLKLANGRVIEKTLYNRRTRQDEPALFVALTFERREVLDSSNIKPMNLIGVDRGENIPAVIALTDPEGCPLSRFKDSLGNPTHILRIGESYKEKQRTIQAKKEVEQRRAGGYSRKYASKAKNLADDMVRNTARDLLYYAVTQDAMLIFENLSRGFGRQGKRTFMAERQYTRMEDWLTAKLAYEGLPSKTYLSKTLAQYTSKTCSNCGFTITSADYDRVLEKLKKTATGWMTTINGKELKVEGQITYYNRYKRQNVVKDLSVELDRLSEESVNNDISSWTKGRSGEALSLLKKRFSHRPVQEKFVCLNCGFETHADEQAALNIARSWLFLRSQEYKKYQTNKTTGNTDKRAFVETWQSFYRKKLKEVWKPAV

SEQ ID NO: 43946 - protein, 979 aa, synthetic construct
  REGION 1..979: note = engineered CasX variant
QEIKRINKIRRRLVKDSNTKKAGKTGPMKTLLVRVMTPDLRERLENLRKKPENIPQPISNTSRANLNKLLTDYTEMKKAILHVYWEEFQKDPVGLMSRVAQPASKKIDQNKLKPEMDEKGNLTTAGFACSQCGQPLFVYKLEQVSEKGKAYTNYFGRCNVAEHEKLILLAQLKPEKDSDEAVTYSLGKFGQRALDFYSIHVTKESTHPVKPLAQIAGNRYASSPVGKALSDACMGTIASFLSKYQDIIIEHQKVVKGNQKRLESLRELAGKENLEYPSVTLPPQPHTKEGVDAYNEVIARVRWWVNLNLWQKLKLSRDDAKPLLRLKGFPSFPLVERQANEVDWWDMVCNVKKLINEKKEDGKVFWQNLAGYKRQEALRPYLSSEEDRKKGKKFARYQLGDLLLHLEKKHGERDWGKVYDEAWERIDKKVEGLSKHIKLEEERRSEDAQSKAALTDWLRAKASFVIEGLKEADKDEFCRCELKLQKWYGDLRGKPFAIEAENSILDISGFSKQYNCAFIWQKDGVKKLNLYLIINYFKGGKLRFKKIKPEAFEANRFYTVINKKSGEIVPMEVNFNFDDPNLIILPLAFGKRQGREFIWNDLLSLETGSLKLANGRVIEKTLYNRRTRQDEPALFVALTFERREVLDSSNIKPMNLIGVDRGENIPAVIALTDPEGCPLSRFKDSLGNPTHILRIGESYKEKQRTIQAKKEVEQRRAGGYSRKYASKAKNLADDMVRNTARDLLYYAVTQDAMLIFENLSRGFGRQGKRTFMAERQYTRMEDWLTAKLAYEGLPSKTYLSKTLAQYTSKTCSNCGFTITSADYDRVLEKLKKTATGWMTTINGKELKVEGQITYYNRYKRQNVVKDLSVELDRLSEESVNNDISSWTKGRSGEALSLLKKRFSHRPVQEKFVCLNCGFETHADEQAALNIARSWLFLRSQEYKKYQTNKTTGNTDKRAFVETWQSFYRKKLKEVWKPAV

SEQ ID NO: 43947 - protein, 979 aa, synthetic construct
  REGION 1..979: note = engineered CasX variant
QEIKRINKIRRRLVKDSNTKKAGKTGPMKTLLVRVMTPDLRERLENLRKKPENIPQPISNTSRANLNKLLTDYTEMKKAILHVYWEEFQKDPVGLMSRVAQPASKKIDQNKLKPEMDEKGNLTTAGFACSQCGQPLFVYKLEQVSEKGKAYTNYFGRCNVAEHEKLILLAQLKPEKDSDEAVTYSLGKFGQRALDFYSIHVTKESTHPVKPLAQIAGNRYASTPVGKALSDACMGTIASFLSKYQDIIIEHQKVVKGNQKRLESLRELAGKENLEYPSVTLPPQPHTKEGVDAYNEVIARVRWWVNLNLWQKLKLSRDDAKPLLRLKGFPSFPLVERQANEVDWWDMVCNVKKLINEKKEDGKVFWQNLAGYKRQEALRPYLSSEEDRKKGKKFARYQLGDLLLHLEKKHGERDWGKVYDEAWERIDKKVEGLSKHIKLEEERRSEDAQSKAALTDWLRAKASFVIEGLKEADKDEFCRCELKLQKWYGDLRGKPFAIEAENSILDISGFSKQYNCAFIWQKDGVKKLNLYLIINYFKGGKLRFKKIKPEAFEANRFYTVINKKSGEIVPMEVNFNFDDPNLIILPLAFGKRQGREFIWNDLLSLETGSLKLANGRVIEKTLYNRRTRQDEPALFVALTFERREVLDSSNIKPMNLIGVDRGENIPAVIALTDPEGCPLSRFKDSLGNPTHILRIGESYKEKQRTIQAKKEVEQRRAGGYSRKYASKAKNLADDMVRNTARDLLYYAVTQDAMLIFENLSRGFGRQGKRTFMAERQYTRMEDWLTAKLAYEGLPSKTYLSKTLAQYTSKTCSNCGFTITSADYDRVLEKLKKTATGWMTTINGKELKVEGQITYYNRYKRQNVVKDLSVELDRLSEESVNNDISSWTKGRSGEALSLLKKRFSHRPVQEKFVCLNCGFETHADEQAALNIARSWLFLRSQEYKKYQTNKTTGNTDKRAFVETWQSFYRKKLKEVWKPAV

SEQ ID NO: 43948 - protein, 979 aa, synthetic construct
  REGION 1..979: note = engineered CasX variant
QEIKRINKIRRRLVKDSNTKKAGKTGPMKTLLVRVMTPDLRERLENLRKKPENIPQPISNTSRANLNKLLTDYTEMKKAILHVYWEEFQKDPVGLMSRVAQPASKKIDQNKLKPEMDEKGNLTTAGFACSQCGQPLFVYKLEQVSEKGKAYTNYFGRCNVAEHEKLILLAQLKPEKDSDEAVTYSLGKFGQRALDFYSIHVTKESTHPVKPLAQIAGNRYASAPVGKALSDACMGTIASFLSKYQDIIIEHQKVVKGNQKRLESLRELAGKENLEYPSVTLPPQPHTKEGVDAYNEVIARVRWWVNLNLWQKLKLSRDDAKPLLRLKGFPSFPLVERQANEVDWWDMVCNVKKLINEKKEDGKVFWQNLAGYKRQEALRPYLSSEEDRKKGKKFARYQLGDLLLHLEKKHGERDWGKVYDEAWERIDKKVEGLSKHIKLEEERRSEDAQSKAALTDWLRAKASFVIEGLKEADKDEFCRCELKLQKWYGDLRGKPFAIEAENSILDISGFSKQYNCAFIWQKDGVKKLNLYLIINYFKGGKLRFKKIKPEAFEANRFYTVINKKSGEIVPMEVNFNFDDPNLIILPLAFGKRQGREFIWNDLLSLETGSLKLANGRVIEKTLYNRRTRQDEPALFVALTFERREVLDSSNIKPMNLIGVDRGENIPAVIALTDPEGCPLSRFKDSLGNPTHILRIGESYKEKQRTIQAKKEVEQRRAGGYSRKYASKAKNLADDMVRNTARDLLYYAVTQDAMLIFENLSRGFGRQGKRTFMAERQYTRMEDWLTAKLAYEGLPSKTYLSKTLAQYTSKTCSNCGFTITSADYDRVLEKLKKTATGWMTTINGKELKVEGQITYYNRYKRQNVVKDLSVELDRLSEESVNNDISSWTKGRSGEALSLLKKRFSHRPVQEKFVCLNCGFETHADEQAALNIARSWLFLRSQEYKKYQTNKTTGNTDKRAFVETWQSFYRKKLKEVWKPAV

SEQ ID NO: 43949 - protein, 979 aa, synthetic construct
  REGION 1..979: note = engineered CasX variant
QEIKRINKIRRRLVKDSNTKKAGKTGPMKTLLVRVMTPDLRERLENLRKKPENIPQPISNTSRANLNKLLTDYTEMKKAILHVYWEEFQKDPVGLMSRVAQPASKKIDQNKLKPEMDEKGNLTTAGFACSQCGQPLFVYKLEQVSEKGKAYTNYFGRCNVAEHEKLILLAQLKPEKDSDEAVTYSLGKFGQRALDFYSIHVTKESTHPVKPLAQIAGNRYASVPVGKALSDACMGTIASFLSKYQDIIIEHQKVVKGNQKRLESLRELAGKENLEYPSVTLPPQPHTKEGVDAYNEVIARVRWWVNLNLWQKLKLSRDDAKPLLRLKGFPSFPLVERQANEVDWWDMVCNVKKLINEKKEDGKVFWQNLAGYKRQEALRPYLSSEEDRKKGKKFARYQLGDLLLHLEKKHGERDWGKVYDEAWERIDKKVEGLSKHIKLEEERRSEDAQSKAALTDWLRAKASFVIEGLKEADKDEFCRCELKLQKWYGDLRGKPFAIEAENSILDISGFSKQYNCAFIWQKDGVKKLNLYLIINYFKGGKLRFKKIKPEAFEANRFYTVINKKSGEIVPMEVNFNFDDPNLIILPLAFGKRQGREFIWNDLLSLETGSLKLANGRVIEKTLYNRRTRQDEPALFVALTFERREVLDSSNIKPMNLIGVDRGENIPAVIALTDPEGCPLSRFKDSLGNPTHILRIGESYKEKQRTIQAKKEVEQRRAGGYSRKYASKAKNLADDMVRNTARDLLYYAVTQDAMLIFENLSRGFGRQGKRTFMAERQYTRMEDWLTAKLAYEGLPSKTYLSKTLAQYTSKTCSNCGFTITSADYDRVLEKLKKTATGWMTTINGKELKVEGQITYYNRYKRQNVVKDLSVELDRLSEESVNNDISSWTKGRSGEALSLLKKRFSHRPVQEKFVCLNCGFETHADEQAALNIARSWLFLRSQEYKKYQTNKTTGNTDKRAFVETWQSFYRKKLKEVWKPAV

SEQ ID NO: 43950 - protein, 979 aa, synthetic construct
  REGION 1..979: note = engineered CasX variant
QEIKRINKIRRRLVKDSNTKKAGKTGPMKTLLVRVMTPDLRERLENLRKKPENIPQPISNTSRANLNKLLTDYTEMKKAILHVYWEEFQKDPVGLMSRVAQPASKKIDQNKLKPEMDEKGNLTTAGFACSQCGQPLFVYKLEQVSEKGKAYTNYFGRCNVAEHEKLIKLAQLKPEKDSDEAVTYSLGKFGQRALDFYSIHVTKESTHPVKPLAQIAGNRYASGPVGKALSDACMGTIASFLSKYQDIIIEHQKVVKGNQKRLESLRELAGKENLEYPSVTLPPQPHTKEGVDAYNEVIARVRWWVNLNLWQKLKLSRDDAKPLLRLKGFPSFPLVERQANEVDWWDMVCNVKKLINEKKEDGKVFWQNLAGYKRQEALRPYLSSEEDRKKGKKFARYQLGDLLLHLEKKHGERDWGKVYDEAWERIDKKVEGLSKHIKLEEERRSEDAQSKAALTDWLRAKASFVIEGLKEADKDEFCRCELKLQKWYGDLRGKPFAIEAENSILDISGFSKQYNCAFIWQKDGVKKLNLYLIINYFKGGKLRFKKIKPEAFEANRFYTVINKKSGEIVPMEVNFNFDDPNLIILPLAFGKRQGREFIWNDLLSLETGSLKLANGRVIEKTLYNRRTRQDEPALFVALTFERREVLDSSNIKPMNLIGVDRGENIPAVIALTDPEGCPLSRFKDSLGNPTHILRIGESYKEKQRTIQAKKEVEQRRAGGYSRKYASKAKNLADDMVRNTARDLLYYAVTQDAMLIFENLSRGFGRQGKRTFMAERQYTRMEDWLTAKLAYEGLPSKTYLSKTLAQYTSKTCSNCGFTITSADYDRVLEKLKKTATGWMTTINGKELKVEGQITYYNRYKRQNVVKDLSVELDRLSEESVNNDISSWTKGRSGEALSLLKKRFSHRPVQEKFVCLNCGFETHADEQAALNIARSWLFLRSQEYKKYQTNKTTGNTDKRAFVETWQSFYRKKLKEVWKPAV

SEQ ID NO: 43951 - protein, 978 aa, synthetic construct
  REGION 1..978: note = engineered CasX variant
QEIKRINKIRRRLVKDSNTKKAGKTGPMKTLLVRVMTPDLRERLENLRKKPENIPQPISNTSRANLNKLLTDYTEMKKAILHVYWEEFQKDPVGLMSRVAQPASKKIDQNKLKPEMDEKGNLTTAGFACSQCGQPLFVYKLEQVSEKGKAYTNYFGRCNVAEHEKLILLAQLKPEKDSDEAVTYSLGKFGQRALDFYSIHVTKESTHPVKPLAQIAGNRYASPVGKALSDACMGTIASFLSKYQDIIIEHQKVVKGNQKRLESLRELAGKENLEYPSVTLPPQPHTKEGVDAYNEVIARVRWWVNLNLWQKLKLSRDDAKPLLRLKGFPSFPLVERQANEVDWWDMVCNVKKLINEKKEDGKVFWQNLAGYKRQEALRPYLSSEEDRKKGKKFARYQLGDLLLHLEKKHGERDWGKVYDEAWERIDKKVEGLSKHIKLEEERRSEDAQSKAALTDWLRAKASFVIEGLKEADKDEFCRCELKLQKWYGDLRGKPFAIEAENSILDISGFSKQYNCAFIWQKDGVKKLNLYLIINYFKGGKLRFKKIKPEAFEANRFYTVINKKSGEIVPMEVNFNFDDPNLIILPLAFGKRQGREFIWNDLLSLETGSLKLANGRVIEKTLYNRRTRQDEPALFVALTFERREVLDSSNIKPMNLIGVDRGENIPAVIALTDPEGCPLSRFKDSLGNPTHILRIGESYKEKQRTIQAKKEVEQRRAGGYSRKYASKAKNLADDMVRNTARDLLYYAVTQDAMLIFENLSRGFGRQGKRTFMAERQYTRMEDWLTAKLAYEGLPSKTYLSKTLAQYTSKTCSNCGFTITSADYDRVLEKLKKTATGWMTTINGKELKVEGQITYYNRYKRQNVVKDLSVELDRLSEESVNNDISSWTKGRSGEALSLLKKRFSHRPVQEKFVCLNCGFETHADEQAALNIARSWLFLRSQEYKKYQTNKTTGNTDKRAFVETWQSFYRKKLKEVWKPAV

SEQ ID NO: 43952 - protein, 979 aa, synthetic construct
  REGION 1..979: note = engineered CasX variant
QEIKRINKIRRRLVKDSNTKKAGKTGPMKTLLVRVMTPDLRERLENLRKKPENIPQPISNTSRANLNKLLTDYTEMKKAILHVYWEEFQKDPVGLMSRVAQPASKKIDQNKLKPEMDEKGNLTTAGFACSQCGQPLFVYKLEQVSEKGKAYTNYFGRCNVAEHEKLILLAQLKPEKDSDEAVTYSLGKFGQRALDFYSIHVTKESTHPVKPLAQIAGNRYASYPVGKALSDACMGTIASFLSKYQDIIIEHQKVVKGNQKRLESLRELAGKENLEYPSVTLPPQPHTKEGVDAYNEVIARVRWWVNLNLWQKLKLSRDDAKPLLRLKGFPSFPLVERQANEVDWWDMVCNVKKLINEKKEDGKVFWQNLAGYKRQEALRPYLSSEEDRKKGKKFARYQLGDLLLHLEKKHGEYDWGKVYDEAWERIDKKVEGLSKHIKLEEERRSEDAQSKAALTDWLRAKASFVIEGLKEADKDEFCRCELKLQKWYGDLRGKPFAIEAENSILDISGFSKQYNCAFIWQKDGVKKLNLYLIINYFKGGKLRFKKIKPEAFEANRFYTVINKKSGEIVPMEVNFNFDDPNLIILPLAFGKRQGREFIWNDLLSLETGSLKLANGRVIEKTLYNRRTRQDEPALFVALTFERREVLDSSNIKPMNLIGVDRGENIPAVIALTDPEGCPLSRFKDSLGNPTHILRIGESYKEKQRTIQAKKEVEQRRAGGYSRKYASKAKNLADDMVRNTARDLLYYAVTQDAMLIFENLSRGFGRQGKRTFMAERQYTRMEDWLTAKLAYEGLPSKTYLSKTLAQYTSKTCSNCGFTITSADYDRVLEKLKKTATGWMTTINGKELKVEGQITYYNRYKRQNVVKDLSVELDRLSEESVNNDISSWTKGRSGEALSLLKKRFSHRPVQEKFVCLNCGFETHADEQAALNIARSWLFLRSQEYKKYQTNKTTGNTDKRAFVETWQSFYRKKLKEVWKPAV

SEQ ID NO: 43953 - protein, 979 aa, synthetic construct
  REGION 1..979: note = engineered CasX variant
QEIKRINKIRRRLVKDSNTKKAGKTGPMKTLLVRVMTPDLRERLENLRKKPENIPQPISNTSRANLNKLLTDYTEMKKAILHVYWEEFQKDPVGLMSRVAQPASKKIDQNKLKPEMDEKGNLTTAGFACSQCGQPLFVYKLEQVSEKGKAYTNYFGRCNVAEHEKLILLAQLKPEKDSDEAVTYSLGKFGQRALDFYSIHVTKESTHPVKPLAQIAGNRYASHPVGKALSDACMGTIASFLSKYQDIIIEHQKVVKGNQKRLESLRELAGKENLEYPSVTLPPQPHTKEGVDAYNEVIARVRWWVNLNLWQKLKLSRDDAKPLLRLKGFPSFPLVERQANEVDWWDMVCNVKKLINEKKEDGKVFWQNLAGYKRQEALRPYLSSEEDRKKGKKFARYQLGDLLLHLEKKHGEYDWGKVYDEAWERIDKKVEGLSKHIKLEEERRSEDAQSKAALTDWLRAKASFVIEGLKEADKDEFCRCELKLQKWYGDLRGKPFAIEAENSILDISGFSKQYNCAFIWQKDGVKKLNLYLIINYFKGGKLRFKKIKPEAFEANRFYTVINKKSGEIVPMEVNFNFDDPNLIILPLAFGKRQGREFIWNDLLSLETGSLKLANGRVIEKTLYNRRTRQDEPALFVALTFERREVLDSSNIKPMNLIGVDRGENIPAVIALTDPEGCPLSRFKDSLGNPTHILRIGESYKEKQRTIQAKKEVEQRRAGGYSRKYASKAKNLADDMVRNTARDLLYYAVTQDAMLIFENLSRGFGRQGKRTFMAERQYTRMEDWLTAKLAYEGLPSKTYLSKTLAQYTSKTCSNCGFTITSADYDRVLEKLKKTATGWMTTINGKELKVEGQITYYNRYKRQNVVKDLSVELDRLSEESVNNDISSWTKGRSGEALSLLKKRFSHRPVQEKFVCLNCGFETHADEQAALNIARSWLFLRSQEYKKYQTNKTTGNTDKRAFVETWQSFYRKKLKEVWKPAV

SEQ ID NO: 43954 - protein, 979 aa, synthetic construct
  REGION 1..979: note = engineered CasX variant
QEIKRINKIRRRLVKDSNTKKAGKTGPMKTLLVRVMTPDLRERLENLRKKPENIPQPISNTSRANLNKLLTDYTEMKKAILHVYWEEFQKDPVGLMSRVAQPASKKIDQNKLKPEMDEKGNLTTAGFACSQCGQPLFVYKLEQVSEKGKAYTNYFGRCNVAEHEKLILLAQLKPEKDSDEAVTYSLGKFGQRALDFYSIHVTKESTHPVKPLAQIAGNRYASSPVGKALSDACMGTIASFLSKYQDIIIEHQKVVKGNQKRLESLRELAGKENLEYPSVTLPPQPHTKEGVDAYNEVIARVRWWVNLNLWQKLKLSRDDAKPLLRLKGFPSFPLVERQANEVDWWDMVCNVKKLINEKKEDGKVFWQNLAGYKRQEALRPYLSSEEDRKKGKKFARYQLGDLLLHLEKKHGEYDWGKVYDEAWERIDKKVEGLSKHIKLEEERRSEDAQSKAALTDWLRAKASFVIEGLKEADKDEFCRCELKLQKWYGDLRGKPFAIEAENSILDISGFSKQYNCAFIWQKDGVKKLNLYLIINYFKGGKLRFKKIKPEAFEANRFYTVINKKSGEIVPMEVNFNFDDPNLIILPLAFGKRQGREFIWNDLLSLETGSLKLANGRVIEKTLYNRRTRQDEPALFVALTFERREVLDSSNIKPMNLIGVDRGENIPAVIALTDPEGCPLSRFKDSLGNPTHILRIGESYKEKQRTIQAKKEVEQRRAGGYSRKYASKAKNLADDMVRNTARDLLYYAVTQDAMLIFENLSRGFGRQGKRTFMAERQYTRMEDWLTAKLAYEGLPSKTYLSKTLAQYTSKTCSNCGFTITSADYDRVLEKLKKTATGWMTTINGKELKVEGQITYYNRYKRQNVVKDLSVELDRLSEESVNNDISSWTKGRSGEALSLLKKRFSHRPVQEKFVCLNCGFETHADEQAALNIARSWLFLRSQEYKKYQTNKTTGNTDKRAFVETWQSFYRKKLKEVWKPAV

SEQ ID NO: 43955 - protein, 979 aa, synthetic construct
  REGION 1..979: note = engineered CasX variant
QEIKRINKIRRRLVKDSNTKKAGKTGPMKTLLVRVMTPDLRERLENLRKKPENIPQPISNTSRANLNKLLTDYTEMKKAILHVYWEEFQKDPVGLMSRVAQPASKKIDQNKLKPEMDEKGNLTTAGFACSQCGQPLFVYKLEQVSEKGKAYTNYFGRCNVAEHEKLILLAQLKPEKDSDEAVTYSLGKFGQRALDFYSIHVTKESTHPVKPLAQIAGNRYASTPVGKALSDACMGTIASFLSKYQDIIIEHQKVVKGNQKRLESLRELAGKENLEYPSVTLPPQPHTKEGVDAYNEVIARVRWWVNLNLWQKLKLSRDDAKPLLRLKGFPSFPLVERQANEVDWWDMVCNVKKLINEKKEDGKVFWQNLAGYKRQEALRPYLSSEEDRKKGKKFARYQLGDLLLHLEKKHGEYDWGKVYDEAWERIDKKVEGLSKHIKLEEERRSEDAQSKAALTDWLRAKASFVIEGLKEADKDEFCRCELKLQKWYGDLRGKPFAIEAENSILDISGFSKQYNCAFIWQKDGVKKLNLYLIINYFKGGKLRFKKIKPEAFEANRFYTVINKKSGEIVPMEVNFNFDDPNLIILPLAFGKRQGREFIWNDLLSLETGSLKLANGRVIEKTLYNRRTRQDEPALFVALTFERREVLDSSNIKPMNLIGVDRGENIPAVIALTDPEGCPLSRFKDSLGNPTHILRIGESYKEKQRTIQAKKEVEQRRAGGYSRKYASKAKNLADDMVRNTARDLLYYAVTQDAMLIFENLSRGFGRQGKRTFMAERQYTRMEDWLTAKLAYEGLPSKTYLSKTLAQYTSKTCSNCGFTITSADYDRVLEKLKKTATGWMTTINGKELKVEGQITYYNRYKRQNVVKDLSVELDRLSEESVNNDISSWTKGRSGEALSLLKKRFSHRPVQEKFVCLNCGFETHADEQAALNIARSWLFLRSQEYKKYQTNKTTGNTDKRAFVETWQSFYRKKLKEVWKPAV

SEQ ID NO: 43956 - protein, 979 aa, synthetic construct
  REGION 1..979: note = engineered CasX variant
QEIKRINKIRRRLVKDSNTKKAGKTGPMKTLLVRVMTPDLRERLENLRKKPENIPQPISNTSRANLNKLLTDYTEMKKAILHVYWEEFQKDPVGLMSRVAQPASKKIDQNKLKPEMDEKGNLTTAGFACSQCGQPLFVYKLEQVSEKGKAYTNYFGRCNVAEHEKLILLAQLKPEKDSDEAVTYSLGKFGQRALDFYSIHVTKESTHPVKPLAQIAGNRYASAPVGKALSDACMGTIASFLSKYQDIIIEHQKVVKGNQKRLESLRELAGKENLEYPSVTLPPQPHTKEGVDAYNEVIARVRWWVNLNLWQKLKLSRDDAKPLLRLKGFPSFPLVERQANEVDWWDMVCNVKKLINEKKEDGKVFWQNLAGYKRQEALRPYLSSEEDRKKGKKFARYQLGDLLLHLEKKHGEYDWGKVYDEAWERIDKKVEGLSKHIKLEEERRSEDAQSKAALTDWLRAKASFVIEGLKEADKDEFCRCELKLQKWYGDLRGKPFAIEAENSILDISGFSKQYNCAFIWQKDGVKKLNLYLIINYFKGGKLRFKKIKPEAFEANRFYTVINKKSGEIVPMEVNFNFDDPNLIILPLAFGKRQGREFIWNDLLSLETGSLKLANGRVIEKTLYNRRTRQDEPALFVALTFERREVLDSSNIKPMNLIGVDRGENIPAVIALTDPEGCPLSRFKDSLGNPTHILRIGESYKEKQRTIQAKKEVEQRRAGGYSRKYASKAKNLADDMVRNTARDLLYYAVTQDAMLIFENLSRGFGRQGKRTFMAERQYTRMEDWLTAKLAYEGLPSKTYLSKTLAQYTSKTCSNCGFTITSADYDRVLEKLKKTATGWMTTINGKELKVEGQITYYNRYKRQNVVKDLSVELDRLSEESVNNDISSWTKGRSGEALSLLKKRFSHRPVQEKFVCLNCGFETHADEQAALNIARSWLFLRSQEYKKYQTNKTTGNTDKRAFVETWQSFYRKKLKEVWKPAV

SEQ ID NO: 43957 - protein, 979 aa, synthetic construct
  REGION 1..979: note = engineered CasX variant
QEIKRINKIRRRLVKDSNTKKAGKTGPMKTLLVRVMTPDLRERLENLRKKPENIPQPISNTSRANLNKLLTDYTEMKKAILHVYWEEFQKDPVGLMSRVAQPASKKIDQNKLKPEMDEKGNLTTAGFACSQCGQPLFVYKLEQVSEKGKAYTNYFGRCNVAEHEKLILLAQLKPEKDSDEAVTYSLGKFGQRALDFYSIHVTKESTHPVKPLAQIAGNRYASVPVGKALSDACMGTIASFLSKYQDIIIEHQKVVKGNQKRLESLRELAGKENLEYPSVTLPPQPHTKEGVDAYNEVIARVRWWVNLNLWQKLKLSRDDAKPLLRLKGFPSFPLVERQANEVDWWDMVCNVKKLINEKKEDGKVFWQNLAGYKRQEALRPYLSSEEDRKKGKKFARYQLGDLLLHLEKKHGEYDWGKVYDEAWERIDKKVEGLSKHIKLEEERRSEDAQSKAALTDWLRAKASFVIEGLKEADKDEFCRCELKLQKWYGDLRGKPFAIEAENSILDISGFSKQYNCAFIWQKDGVKKLNLYLIINYFKGGKLRFKKIKPEAFEANRFYTVINKKSGEIVPMEVNFNFDDPNLIILPLAFGKRQGREFIWNDLLSLETGSLKLANGRVIEKTLYNRRTRQDEPALFVALTFERREVLDSSNIKPMNLIGVDRGENIPAVIALTDPEGCPLSRFKDSLGNPTHILRIGESYKEKQRTIQAKKEVEQRRAGGYSRKYASKAKNLADDMVRNTARDLLYYAVTQDAMLIFENLSRGFGRQGKRTFMAERQYTRMEDWLTAKLAYEGLPSKTYLSKTLAQYTSKTCSNCGFTITSADYDRVLEKLKKTATGWMTTINGKELKVEGQITYYNRYKRQNVVKDLSVELDRLSEESVNNDISSWTKGRSGEALSLLKKRFSHRPVQEKFVCLNCGFETHADEQAALNIARSWLFLRSQEYKKYQTNKTTGNTDKRAFVETWQSFYRKKLKEVWKPAV

SEQ ID NO: 43958 - protein, 979 aa, synthetic construct
  REGION 1..979: note = engineered CasX variant
QEIKRINKIRRRLVKDSNTKKAGKTGPMKTLLVRVMTPDLRERLENLRKKPENIPQPISNTSRANLNKLLTDYTEMKKAILHVYWEEFQKDPVGLMSRVAQPASKKIDQNKLKPEMDEKGNLTTAGFACSQCGQPLFVYKLEQVSEKGKAYTNYFGRCNVAEHEKLIKLAQLKPEKDSDEAVTYSLGKFGQRALDFYSIHVTKESTHPVKPLAQIAGNRYASGPVGKALSDACMGTIASFLSKYQDIIIEHQKVVKGNQKRLESLRELAGKENLEYPSVTLPPQPHTKEGVDAYNEVIARVRWWVNLNLWQKLKLSRDDAKPLLRLKGFPSFPLVERQANEVDWWDMVCNVKKLINEKKEDGKVFWQNLAGYKRQEALRPYLSSEEDRKKGKKFARYQLGDLLLHLEKKHGEYDWGKVYDEAWERIDKKVEGLSKHIKLEEERRSEDAQSKAALTDWLRAKASFVIEGLKEADKDEFCRCELKLQKWYGDLRGKPFAIEAENSILDISGFSKQYNCAFIWQKDGVKKLNLYLIINYFKGGKLRFKKIKPEAFEANRFYTVINKKSGEIVPMEVNFNFDDPNLIILPLAFGKRQGREFIWNDLLSLETGSLKLANGRVIEKTLYNRRTRQDEPALFVALTFERREVLDSSNIKPMNLIGVDRGENIPAVIALTDPEGCPLSRFKDSLGNPTHILRIGESYKEKQRTIQAKKEVEQRRAGGYSRKYASKAKNLADDMVRNTARDLLYYAVTQDAMLIFENLSRGFGRQGKRTFMAERQYTRMEDWLTAKLAYEGLPSKTYLSKTLAQYTSKTCSNCGFTITSADYDRVLEKLKKTATGWMTTINGKELKVEGQITYYNRYKRQNVVKDLSVELDRLSEESVNNDISSWTKGRSGEALSLLKKRFSHRPVQEKFVCLNCGFETHADEQAALNIARSWLFLRSQEYKKYQTNKTTGNTDKRAFVETWQSFYRKKLKEVWKPAV

SEQ ID NO: 43959 - protein, 978 aa, synthetic construct
  REGION 1..978: note = engineered CasX variant
QEIKRINKIRRRLVKDSNTKKAGKTGPMKTLLVRVMTPDLRERLENLRKKPENIPQPISNTSRANLNKLLTDYTEMKKAILHVYWEEFQKDPVGLMSRVAQPASKKIDQNKLKPEMDEKGNLTTAGFACSQCGQPLFVYKLEQVSEKGKAYTNYFGRCNVAEHEKLILLAQLKPEKDSDEAVTYSLGKFGQRALDFYSIHVTKESTHPVKPLAQIAGNRYASPVGKALSDACMGTIASFLSKYQDIIIEHQKVVKGNQKRLESLRELAGKENLEYPSVTLPPQPHTKEGVDAYNEVIARVRWWVNLNLWQKLKLSRDDAKPLLRLKGFPSFPLVERQANEVDWWDMVCNVKKLINEKKEDGKVFWQNLAGYKRQEALRPYLSSEEDRKKGKKFARYQLGDLLLHLEKKHGEYDWGKVYDEAWERIDKKVEGLSKHIKLEEERRSEDAQSKAALTDWLRAKASFVIEGLKEADKDEFCRCELKLQKWYGDLRGKPFAIEAENSILDISGFSKQYNCAFIWQKDGVKKLNLYLIINYFKGGKLRFKKIKPEAFEANRFYTVINKKSGEIVPMEVNFNFDDPNLIILPLAFGKRQGREFIWNDLLSLETGSLKLANGRVIEKTLYNRRTRQDEPALFVALTFERREVLDSSNIKPMNLIGVDRGENIPAVIALTDPEGCPLSRFKDSLGNPTHILRIGESYKEKQRTIQAKKEVEQRRAGGYSRKYASKAKNLADDMVRNTARDLLYYAVTQDAMLIFENLSRGFGRQGKRTFMAERQYTRMEDWLTAKLAYEGLPSKTYLSKTLAQYTSKTCSNCGFTITSADYDRVLEKLKKTATGWMTTINGKELKVEGQITYYNRYKRQNVVKDLSVELDRLSEESVNNDISSWTKGRSGEALSLLKKRFSHRPVQEKFVCLNCGFETHADEQAALNIARSWLFLRSQEYKKYQTNKTTGNTDKRAFVETWQSFYRKKLKEVWKPAV

SEQ ID NO: 43960 - protein, 978 aa, synthetic construct
  REGION 1..978: note = engineered CasX variant
QEIKRINKIRRRLVKDSNTKKAGKTGPMKTLLVRVMTPDLRERLENLRKKPENIPQPISNTSRANLNKLLTDYTEMKKAILHVYWEEFQKDPVGLMSRVAQPASKKIDQNKLKPEMDEKGNLTTAGFACSQCGQPLFVYKLEQVSEKGKAYTNYFGRCNVAEHEKLILLAQLKPEKDSDEAVTYSLGKFGQRALDFYSIHVTKESTHPVKPLAQIAGNRYASYPVGKALSDACMGTIASFLSKYQDIIIEHQKVVKGNQKRLESLRELAGKENLEYPSVTLPPQPHTKEGVDAYNEVIARVRWWVNLNLWQKLKLSRDDAKPLLRLKGFPSFPLVERQANEVDWWDMVCNVKKLINEKKEDGKVFWQNLAGYKRQEALRPYLSSEEDRKKGKKFARYQLGDLLLHLEKKHGEDWGDVYDEAWERIDKKVEGLSKHIKLEEERRSEDAQSKAALTDWLRAKASFVIEGLKEADKDEFCRCELKLQKWYGDLRGKPFAIEAENSILDISGFSKQYNCAFIWQKDGVKKLNLYLIINYFKGGKLRFKKIKPEAFEANRFYTVINKKSGEIVPMEVNFNFDDPNLIILPLAFGKRQGREFIWNDLLSLETGSLKLANGRVIEKTLYNRRTRQDEPALFVALTFERREVLDSSNIKPMNLIGVDRGENIPAVIALTDPEGCPLSRFKDSLGNPTHILRIGESYKEKQRTIQAKKEVEQRRAGGYSRKYASKAKNLADDMVRNTARDLLYYAVTQDAMLIFENLSRGFGRQGKRTFMAERQYTRMEDWLTAKLAYEGLPSKTYLSKTLAQYTSKTCSNCGFTITSADYDRVLEKLKKTATGWMTTINGKELKVEGQITYYNRYKRQNVVKDLSVELDRLSEESVNNDISSWTKGRSGEALSLLKKRFSHRPVQEKFVCLNCGFETHADEQAALNIARSWLFLRSQEYKKYQTNKTTGNTDKRAFVETWQSFYRKKLKEVWKPAV

SEQ ID NO: 43961 - protein, 978 aa, synthetic construct
  REGION 1..978: note = engineered CasX variant
QEIKRINKIRRRLVKDSNTKKAGKTGPMKTLLVRVMTPDLRERLENLRKKPENIPQPISNTSRANLNKLLTDYTEMKKAILHVYWEEFQKDPVGLMSRVAQPASKKIDQNKLKPEMDEKGNLTTAGFACSQCGQPLFVYKLEQVSEKGKAYTNYFGRCNVAEHEKLILLAQLKPEKDSDEAVTYSLGKFGQRALDFYSIHVTKESTHPVKPLAQIAGNRYASHPVGKALSDACMGTIASFLSKYQDIIIEHQKVVKGNQKRLESLRELAGKENLEYPSVTLPPQPHTKEGVDAYNEVIARVRWWVNLNLWQKLKLSRDDAKPLLRLKGFPSFPLVERQANEVDWWDMVCNVKKLINEKKEDGKVFWQNLAGYKRQEALRPYLSSEEDRKKGKKFARYQLGDLLLHLEKKHGEDWGDVYDEAWERIDKKVEGLSKHIKLEEERRSEDAQSKAALTDWLRAKASFVIEGLKEADKDEFCRCELKLQKWYGDLRGKPFAIEAENSILDISGFSKQYNCAFIWQKDGVKKLNLYLIINYFKGGKLRFKKIKPEAFEANRFYTVINKKSGEIVPMEVNFNFDDPNLIILPLAFGKRQGREFIWNDLLSLETGSLKLANGRVIEKTLYNRRTRQDEPALFVALTFERREVLDSSNIKPMNLIGVDRGENIPAVIALTDPEGCPLSRFKDSLGNPTHILRIGESYKEKQRTIQAKKEVEQRRAGGYSRKYASKAKNLADDMVRNTARDLLYYAVTQDAMLIFENLSRGFGRQGKRTFMAERQYTRMEDWLTAKLAYEGLPSKTYLSKTLAQYTSKTCSNCGFTITSADYDRVLEKLKKTATGWMTTINGKELKVEGQITYYNRYKRQNVVKDLSVELDRLSEESVNNDISSWTKGRSGEALSLLKKRFSHRPVQEKFVCLNCGFETHADEQAALNIARSWLFLRSQEYKKYQTNKTTGNTDKRAFVETWQSFYRKKLKEVWKPAV

SEQ ID NO: 43962 - protein, 978 aa, synthetic construct
  REGION 1..978: note = engineered CasX variant
QEIKRINKIRRRLVKDSNTKKAGKTGPMKTLLVRVMTPDLRERLENLRKKPENIPQPISNTSRANLNKLLTDYTEMKKAILHVYWEEFQKDPVGLMSRVAQPASKKIDQNKLKPEMDEKGNLTTAGFACSQCGQPLFVYKLEQVSEKGKAYTNYFGRCNVAEHEKLILLAQLKPEKDSDEAVTYSLGKFGQRALDFYSIHVTKESTHPVKPLAQIAGNRYASSPVGKALSDACMGTIASFLSKYQDIIIEHQKVVKGNQKRLESLRELAGKENLEYPSVTLPPQPHTKEGVDAYNEVIARVRWWVNLNLWQKLKLSRDDAKPLLRLKGFPSFPLVERQANEVDWWDMVCNVKKLINEKKEDGKVFWQNLAGYKRQEALRPYLSSEEDRKKGKKFARYQLGDLLLHLEKKHGEDWGDVYDEAWERIDKKVEGLSKHIKLEEERRSEDAQSKAALTDWLRAKASFVIEGLKEADKDEFCRCELKLQKWYGDLRGKPFAIEAENSILDISGFSKQYNCAFIWQKDGVKKLNLYLIINYFKGGKLRFKKIKPEAFEANRFYTVINKKSGEIVPMEVNFNFDDPNLIILPLAFGKRQGREFIWNDLLSLETGSLKLANGRVIEKTLYNRRTRQDEPALFVALTFERREVLDSSNIKPMNLIGVDRGENIPAVIALTDPEGCPLSRFKDSLGNPTHILRIGESYKEKQRTIQAKKEVEQRRAGGYSRKYASKAKNLADDMVRNTARDLLYYAVTQDAMLIFENLSRGFGRQGKRTFMAERQYTRMEDWLTAKLAYEGLPSKTYLSKTLAQYTSKTCSNCGFTITSADYDRVLEKLKKTATGWMTTINGKELKVEGQITYYNRYKRQNVVKDLSVELDRLSEESVNNDISSWTKGRSGEALSLLKKRFSHRPVQEKFVCLNCGFETHADEQAALNIARSWLFLRSQEYKKYQTNKTTGNTDKRAFVETWQSFYRKKLKEVWKPAV

SEQ ID NO: 43963 - protein, 978 aa, synthetic construct
  REGION 1..978: note = engineered CasX variant
QEIKRINKIRRRLVKDSNTKKAGKTGPMKTLLVRVMTPDLRERLENLRKKPENIPQPISNTSRANLNKLLTDYTEMKKAILHVYWEEFQKDPVGLMSRVAQPASKKIDQNKLKPEMDEKGNLTTAGFACSQCGQPLFVYKLEQVSEKGKAYTNYFGRCNVAEHEKLILLAQLKPEKDSDEAVTYSLGKFGQRALDFYSIHVTKESTHPVKPLAQIAGNRYASTPVGKALSDACMGTIASFLSKYQDIIIEHQKVVKGNQKRLESLRELAGKENLEYPSVTLPPQPHTKEGVDAYNEVIARVRWWVNLNLWQKLKLSRDDAKPLLRLKGFPSFPLVERQANEVDWWDMVCNVKKLINEKKEDGKVFWQNLAGYKRQEALRPYLSSEEDRKKGKKFARYQLGDLLLHLEKKHGEDWGDVYDEAWERIDKKVEGLSKHIKLEEERRSEDAQSKAALTDWLRAKASFVIEGLKEADKDEFCRCELKLQKWYGDLRGKPFAIEAENSILDISGFSKQYNCAFIWQKDGVKKLNLYLIINYFKGGKLRFKKIKPEAFEANRFYTVINKKSGEIVPMEVNFNFDDPNLIILPLAFGKRQGREFIWNDLLSLETGSLKLANGRVIEKTLYNRRTRQDEPALFVALTFERREVLDSSNIKPMNLIGVDRGENIPAVIALTDPEGCPLSRFKDSLGNPTHILRIGESYKEKQRTIQAKKEVEQRRAGGYSRKYASKAKNLADDMVRNTARDLLYYAVTQDAMLIFENLSRGFGRQGKRTFMAERQYTRMEDWLTAKLAYEGLPSKTYLSKTLAQYTSKTCSNCGFTITSADYDRVLEKLKKTATGWMTTINGKELKVEGQITYYNRYKRQNVVKDLSVELDRLSEESVNNDISSWTKGRSGEALSLLKKRFSHRPVQEKFVCLNCGFETHADEQAALNIARSWLFLRSQEYKKYQTNKTTGNTDKRAFVETWQSFYRKKLKEVWKPAV

SEQ ID NO: 43964 - protein, 978 aa, synthetic construct
  REGION 1..978: note = engineered CasX variant
QEIKRINKIRRRLVKDSNTKKAGKTGPMKTLLVRVMTPDLRERLENLRKKPENIPQPISNTSRANLNKLLTDYTEMKKAILHVYWEEFQKDPVGLMSRVAQPASKKIDQNKLKPEMDEKGNLTTAGFACSQCGQPLFVYKLEQVSEKGKAYTNYFGRCNVAEHEKLILLAQLKPEKDSDEAVTYSLGKFGQRALDFYSIHVTKESTHPVKPLAQIAGNRYASAPVGKALSDACMGTIASFLSKYQDIIIEHQKVVKGNQKRLESLRELAGKENLEYPSVTLPPQPHTKEGVDAYNEVIARVRWWVNLNLWQKLKLSRDDAKPLLRLKGFPSFPLVERQANEVDWWDMVCNVKKLINEKKEDGKVFWQNLAGYKRQEALRPYLSSEEDRKKGKKFARYQLGDLLLHLEKKHGEDWGDVYDEAWERIDKKVEGLSKHIKLEEERRSEDAQSKAALTDWLRAKASFVIEGLKEADKDEFCRCELKLQKWYGDLRGKPFAIEAENSILDISGFSKQYNCAFIWQKDGVKKLNLYLIINYFKGGKLRFKKIKPEAFEANRFYTVINKKSGEIVPMEVNFNFDDPNLIILPLAFGKRQGREFIWNDLLSLETGSLKLANGRVIEKTLYNRRTRQDEPALFVALTFERREVLDSSNIKPMNLIGVDRGENIPAVIALTDPEGCPLSRFKDSLGNPTHILRIGESYKEKQRTIQAKKEVEQRRAGGYSRKYASKAKNLADDMVRNTARDLLYYAVTQDAMLIFENLSRGFGRQGKRTFMAERQYTRMEDWLTAKLAYEGLPSKTYLSKTLAQYTSKTCSNCGFTITSADYDRVLEKLKKTATGWMTTINGKELKVEGQITYYNRYKRQNVVKDLSVELDRLSEESVNNDISSWTKGRSGEALSLLKKRFSHRPVQEKFVCLNCGFETHADEQAALNIARSWLFLRSQEYKKYQTNKTTGNTDKRAFVETWQSFYRKKLKEVWKPAV

SEQ ID NO: 43965 - protein, 978 aa, synthetic construct
  REGION 1..978: note = engineered CasX variant
QEIKRINKIRRRLVKDSNTKKAGKTGPMKTLLVRVMTPDLRERLENLRKKPENIPQPISNTSRANLNKLLTDYTEMKKAILHVYWEEFQKDPVGLMSRVAQPASKKIDQNKLKPEMDEKGNLTTAGFACSQCGQPLFVYKLEQVSEKGKAYTNYFGRCNVAEHEKLILLAQLKPEKDSDEAVTYSLGKFGQRALDFYSIHVTKESTHPVKPLAQIAGNRYASVPVGKALSDACMGTIASFLSKYQDIIIEHQKVVKGNQKRLESLRELAGKENLEYPSVTLPPQPHTKEGVDAYNEVIARVRWWVNLNLWQKLKLSRDDAKPLLRLKGFPSFPLVERQANEVDWWDMVCNVKKLINEKKEDGKVFWQNLAGYKRQEALRPYLSSEEDRKKGKKFARYQLGDLLLHLEKKHGEDWGDVYDEAWERIDKKVEGLSKHIKLEEERRSEDAQSKAALTDWLRAKASFVIEGLKEADKDEFCRCELKLQKWYGDLRGKPFAIEAENSILDISGFSKQYNCAFIWQKDGVKKLNLYLIINYFKGGKLRFKKIKPEAFEANRFYTVINKKSGEIVPMEVNFNFDDPNLIILPLAFGKRQGREFIWNDLLSLETGSLKLANGRVIEKTLYNRRTRQDEPALFVALTFERREVLDSSNIKPMNLIGVDRGENIPAVIALTDPEGCPLSRFKDSLGNPTHILRIGESYKEKQRTIQAKKEVEQRRAGGYSRKYASKAKNLADDMVRNTARDLLYYAVTQDAMLIFENLSRGFGRQGKRTFMAERQYTRMEDWLTAKLAYEGLPSKTYLSKTLAQYTSKTCSNCGFTITSADYDRVLEKLKKTATGWMTTINGKELKVEGQITYYNRYKRQNVVKDLSVELDRLSEESVNNDISSWTKGRSGEALSLLKKRFSHRPVQEKFVCLNCGFETHADEQAALNIARSWLFLRSQEYKKYQTNKTTGNTDKRAFVETWQSFYRKKLKEVWKPAV

SEQ ID NO: 43966 - protein, 978 aa, synthetic construct
  REGION 1..978: note = engineered CasX variant
QEIKRINKIRRRLVKDSNTKKAGKTGPMKTLLVRVMTPDLRERLENLRKKPENIPQPISNTSRANLNKLLTDYTEMKKAILHVYWEEFQKDPVGLMSRVAQPASKKIDQNKLKPEMDEKGNLTTAGFACSQCGQPLFVYKLEQVSEKGKAYTNYFGRCNVAEHEKLIKLAQLKPEKDSDEAVTYSLGKFGQRALDFYSIHVTKESTHPVKPLAQIAGNRYASGPVGKALSDACMGTIASFLSKYQDIIIEHQKVVKGNQKRLESLRELAGKENLEYPSVTLPPQPHTKEGVDAYNEVIARVRWWVNLNLWQKLKLSRDDAKPLLRLKGFPSFPLVERQANEVDWWDMVCNVKKLINEKKEDGKVFWQNLAGYKRQEALRPYLSSEEDRKKGKKFARYQLGDLLLHLEKKHGEDWGDVYDEAWERIDKKVEGLSKHIKLEEERRSEDAQSKAALTDWLRAKASFVIEGLKEADKDEFCRCELKLQKWYGDLRGKPFAIEAENSILDISGFSKQYNCAFIWQKDGVKKLNLYLIINYFKGGKLRFKKIKPEAFEANRFYTVINKKSGEIVPMEVNFNFDDPNLIILPLAFGKRQGREFIWNDLLSLETGSLKLANGRVIEKTLYNRRTRQDEPALFVALTFERREVLDSSNIKPMNLIGVDRGENIPAVIALTDPEGCPLSRFKDSLGNPTHILRIGESYKEKQRTIQAKKEVEQRRAGGYSRKYASKAKNLADDMVRNTARDLLYYAVTQDAMLIFENLSRGFGRQGKRTFMAERQYTRMEDWLTAKLAYEGLPSKTYLSKTLAQYTSKTCSNCGFTITSADYDRVLEKLKKTATGWMTTINGKELKVEGQITYYNRYKRQNVVKDLSVELDRLSEESVNNDISSWTKGRSGEALSLLKKRFSHRPVQEKFVCLNCGFETHADEQAALNIARSWLFLRSQEYKKYQTNKTTGNTDKRAFVETWQSFYRKKLKEVWKPAV

SEQ ID NO: 43967 - protein, 977 aa, synthetic construct
  REGION 1..977: note = engineered CasX variant
QEIKRINKIRRRLVKDSNTKKAGKTGPMKTLLVRVMTPDLRERLENLRKKPENIPQPISNTSRANLNKLLTDYTEMKKAILHVYWEEFQKDPVGLMSRVAQPASKKIDQNKLKPEMDEKGNLTTAGFACSQCGQPLFVYKLEQVSEKGKAYTNYFGRCNVAEHEKLILLAQLKPEKDSDEAVTYSLGKFGQRALDFYSIHVTKESTHPVKPLAQIAGNRYASPVGKALSDACMGTIASFLSKYQDIIIEHQKVVKGNQKRLESLRELAGKENLEYPSVTLPPQPHTKEGVDAYNEVIARVRWWVNLNLWQKLKLSRDDAKPLLRLKGFPSFPLVERQANEVDWWDMVCNVKKLINEKKEDGKVFWQNLAGYKRQEALRPYLSSEEDRKKGKKFARYQLGDLLLHLEKKHGEDWGDVYDEAWERIDKKVEGLSKHIKLEEERRSEDAQSKAALTDWLRAKASFVIEGLKEADKDEFCRCELKLQKWYGDLRGKPFAIEAENSILDISGFSKQYNCAFIWQKDGVKKLNLYLIINYFKGGKLRFKKIKPEAFEANRFYTVINKKSGEIVPMEVNFNFDDPNLIILPLAFGKRQGREFIWNDLLSLETGSLKLANGRVIEKTLYNRRTRQDEPALFVALTFERREVLDSSNIKPMNLIGVDRGENIPAVIALTDPEGCPLSRFKDSLGNPTHILRIGESYKEKQRTIQAKKEVEQRRAGGYSRKYASKAKNLADDMVRNTARDLLYYAVTQDAMLIFENLSRGFGRQGKRTFMAERQYTRMEDWLTAKLAYEGLPSKTYLSKTLAQYTSKTCSNCGFTITSADYDRVLEKLKKTATGWMTTINGKELKVEGQITYYNRYKRQNVVKDLSVELDRLSEESVNNDISSWTKGRSGEALSLLKKRFSHRPVQEKFVCLNCGFETHADEQAALNIARSWLFLRSQEYKKYQTNKTTGNTDKRAFVETWQSFYRKKLKEVWKPAV

SEQ ID NO: 43968 - protein, 978 aa, synthetic construct
  REGION 1..978: note = engineered CasX variant
QEIKRINKIRRRLVKDSNTKKAGKTGPMKTLLVRVMTPDLRERLENLRKKPENIPQPISNTSRANLNKLLTDYTEMKKAILHVYWEEFQKDPVGLMSRVAQPASKKIDQNKLKPEMDEKGNLTTAGFACSQCGQPLFVYKLEQVSEKGKAYTNYFGRCNVAEHEKLILLAQLKPEKDSDEAVTYSLGKFGQRALDFYSIHVTKESTHPVKPLAQIAGNRYASYPVGKALSDACMGTIASFLSKYQDIIIEHQKVVKGNQKRLESLRELAGKENLEYPSVTLPPQPHTKEGVDAYNEVIARVRWWVNLNLWQKLKLSRDDAKPLLRLKGFPSFPLVERQANEVDWWDMVCNVKKLINEKKEDGKVFWQNLAGYKRQEALRPYLSSEEDRKKGKKFARYQLGDLLLHLEKKHGEDWGKVYGEAWERIDKKVEGLSKHIKLEEERRSEDAQSKAALTDWLRAKASFVIEGLKEADKDEFCRCELKLQKWYGDLRGKPFAIEAENSILDISGFSKQYNCAFIWQKDGVKKLNLYLIINYFKGGKLRFKKIKPEAFEANRFYTVINKKSGEIVPMEVNFNFDDPNLIILPLAFGKRQGREFIWNDLLSLETGSLKLANGRVIEKTLYNRRTRQDEPALFVALTFERREVLDSSNIKPMNLIGVDRGENIPAVIALTDPEGCPLSRFKDSLGNPTHILRIGESYKEKQRTIQAKKEVEQRRAGGYSRKYASKAKNLADDMVRNTARDLLYYAVTQDAMLIFENLSRGFGRQGKRTFMAERQYTRMEDWLTAKLAYEGLPSKTYLSKTLAQYTSKTCSNCGFTITSADYDRVLEKLKKTATGWMTTINGKELKVEGQITYYNRYKRQNVVKDLSVELDRLSEESVNNDISSWTKGRSGEALSLLKKRFSHRPVQEKFVCLNCGFETHADEQAALNIARSWLFLRSQEYKKYQTNKTTGNTDKRAFVETWQSFYRKKLKEVWKPAV

SEQ ID NO: 43969 - protein, 978 aa, synthetic construct
  REGION 1..978: note = engineered CasX variant
QEIKRINKIRRRLVKDSNTKKAGKTGPMKTLLVRVMTPDLRERLENLRKKPENIPQPISNTSRANLNKLLTDYTEMKKAILHVYWEEFQKDPVGLMSRVAQPASKKIDQNKLKPEMDEKGNLTTAGFACSQCGQPLFVYKLEQVSEKGKAYTNYFGRCNVAEHEKLILLAQLKPEKDSDEAVTYSLGKFGQRALDFYSIHVTKESTHPVKPLAQIAGNRYASHPVGKALSDACMGTIASFLSKYQDIIIEHQKVVKGNQKRLESLRELAGKENLEYPSVTLPPQPHTKEGVDAYNEVIARVRWWVNLNLWQKLKLSRDDAKPLLRLKGFPSFPLVERQANEVDWWDMVCNVKKLINEKKEDGKVFWQNLAGYKRQEALRPYLSSEEDRKKGKKFARYQLGDLLLHLEKKHGEDWGKVYGEAWERIDKKVEGLSKHIKLEEERRSEDAQSKAALTDWLRAKASFVIEGLKEADKDEFCRCELKLQKWYGDLRGKPFAIEAENSILDISGFSKQYNCAFIWQKDGVKKLNLYLIINYFKGGKLRFKKIKPEAFEANRFYTVINKKSGEIVPMEVNFNFDDPNLIILPLAFGKRQGREFIWNDLLSLETGSLKLANGRVIEKTLYNRRTRQDEPALFVALTFERREVLDSSNIKPMNLIGVDRGENIPAVIALTDPEGCPLSRFKDSLGNPTHILRIGESYKEKQRTIQAKKEVEQRRAGGYSRKYASKAKNLADDMVRNTARDLLYYAVTQDAMLIFENLSRGFGRQGKRTFMAERQYTRMEDWLTAKLAYEGLPSKTYLSKTLAQYTSKTCSNCGFTITSADYDRVLEKLKKTATGWMTTINGKELKVEGQITYYNRYKRQNVVKDLSVELDRLSEESVNNDISSWTKGRSGEALSLLKKRFSHRPVQEKFVCLNCGFETHADEQAALNIARSWLFLRSQEYKKYQTNKTTGNTDKRAFVETWQSFYRKKLKEVWKPAV

SEQ ID NO: 43970 - protein, 978 aa, synthetic construct
  REGION 1..978: note = engineered CasX variant
QEIKRINKIRRRLVKDSNTKKAGKTGPMKTLLVRVMTPDLRERLENLRKKPENIPQPISNTSRANLNKLLTDYTEMKKAILHVYWEEFQKDPVGLMSRVAQPASKKIDQNKLKPEMDEKGNLTTAGFACSQCGQPLFVYKLEQVSEKGKAYTNYFGRCNVAEHEKLILLAQLKPEKDSDEAVTYSLGKFGQRALDFYSIHVTKESTHPVKPLAQIAGNRYASSPVGKALSDACMGTIASFLSKYQDIIIEHQKVVKGNQKRLESLRELAGKENLEYPSVTLPPQPHTKEGVDAYNEVIARVRWWVNLNLWQKLKLSRDDAKPLLRLKGFPSFPLVERQANEVDWWDMVCNVKKLINEKKEDGKVFWQNLAGYKRQEALRPYLSSEEDRKKGKKFARYQLGDLLLHLEKKHGEDWGKVYGEAWERIDKKVEGLSKHIKLEEERRSEDAQSKAALTDWLRAKASFVIEGLKEADKDEFCRCELKLQKWYGDLRGKPFAIEAENSILDISGFSKQYNCAFIWQKDGVKKLNLYLIINYFKGGKLRFKKIKPEAFEANRFYTVINKKSGEIVPMEVNFNFDDPNLIILPLAFGKRQGREFIWNDLLSLETGSLKLANGRVIEKTLYNRRTRQDEPALFVALTFERREVLDSSNIKPMNLIGVDRGENIPAVIALTDPEGCPLSRFKDSLGNPTHILRIGESYKEKQRTIQAKKEVEQRRAGGYSRKYASKAKNLADDMVRNTARDLLYYAVTQDAMLIFENLSRGFGRQGKRTFMAERQYTRMEDWLTAKLAYEGLPSKTYLSKTLAQYTSKTCSNCGFTITSADYDRVLEKLKKTATGWMTTINGKELKVEGQITYYNRYKRQNVVKDLSVELDRLSEESVNNDISSWTKGRSGEALSLLKKRFSHRPVQEKFVCLNCGFETHADEQAALNIARSWLFLRSQEYKKYQTNKTTGNTDKRAFVETWQSFYRKKLKEVWKPAV

SEQ ID NO: 43971 - protein, 978 aa, synthetic construct
  REGION 1..978: note = engineered CasX variant
QEIKRINKIRRRLVKDSNTKKAGKTGPMKTLLVRVMTPDLRERLENLRKKPENIPQPISNTSRANLNKLLTDYTEMKKAILHVYWEEFQKDPVGLMSRVAQPASKKIDQNKLKPEMDEKGNLTTAGFACSQCGQPLFVYKLEQVSEKGKAYTNYFGRCNVAEHEKLILLAQLKPEKDSDEAVTYSLGKFGQRALDFYSIHVTKESTHPVKPLAQIAGNRYASTPVGKALSDACMGTIASFLSKYQDIIIEHQKVVKGNQKRLESLRELAGKENLEYPSVTLPPQPHTKEGVDAYNEVIARVRWWVNLNLWQKLKLSRDDAKPLLRLKGFPSFPLVERQANEVDWWDMVCNVKKLINEKKEDGKVFWQNLAGYKRQEALRPYLSSEEDRKKGKKFARYQLGDLLLHLEKKHGEDWGKVYGEAWERIDKKVEGLSKHIKLEEERRSEDAQSKAALTDWLRAKASFVIEGLKEADKDEFCRCELKLQKWYGDLRGKPFAIEAENSILDISGFSKQYNCAFIWQKDGVKKLNLYLIINYFKGGKLRFKKIKPEAFEANRFYTVINKKSGEIVPMEVNFNFDDPNLIILPLAFGKRQGREFIWNDLLSLETGSLKLANGRVIEKTLYNRRTRQDEPALFVALTFERREVLDSSNIKPMNLIGVDRGENIPAVIALTDPEGCPLSRFKDSLGNPTHILRIGESYKEKQRTIQAKKEVEQRRAGGYSRKYASKAKNLADDMVRNTARDLLYYAVTQDAMLIFENLSRGFGRQGKRTFMAERQYTRMEDWLTAKLAYEGLPSKTYLSKTLAQYTSKTCSNCGFTITSADYDRVLEKLKKTATGWMTTINGKELKVEGQITYYNRYKRQNVVKDLSVELDRLSEESVNNDISSWTKGRSGEALSLLKKRFSHRPVQEKFVCLNCGFETHADEQAALNIARSWLFLRSQEYKKYQTNKTTGNTDKRAFVETWQSFYRKKLKEVWKPAV

SEQ ID NO: 43972 - protein, 978 aa, synthetic construct
  REGION 1..978: note = engineered CasX variant
QEIKRINKIRRRLVKDSNTKKAGKTGPMKTLLVRVMTPDLRERLENLRKKPENIPQPISNTSRANLNKLLTDYTEMKKAILHVYWEEFQKDPVGLMSRVAQPASKKIDQNKLKPEMDEKGNLTTAGFACSQCGQPLFVYKLEQVSEKGKAYTNYFGRCNVAEHEKLILLAQLKPEKDSDEAVTYSLGKFGQRALDFYSIHVTKESTHPVKPLAQIAGNRYASAPVGKALSDACMGTIASFLSKYQDIIIEHQKVVKGNQKRLESLRELAGKENLEYPSVTLPPQPHTKEGVDAYNEVIARVRWWVNLNLWQKLKLSRDDAKPLLRLKGFPSFPLVERQANEVDWWDMVCNVKKLINEKKEDGKVFWQNLAGYKRQEALRPYLSSEEDRKKGKKFARYQLGDLLLHLEKKHGEDWGKVYGEAWERIDKKVEGLSKHIKLEEERRSEDAQSKAALTDWLRAKASFVIEGLKEADKDEFCRCELKLQKWYGDLRGKPFAIEAENSILDISGFSKQYNCAFIWQKDGVKKLNLYLIINYFKGGKLRFKKIKPEAFEANRFYTVINKKSGEIVPMEVNFNFDDPNLIILPLAFGKRQGREFIWNDLLSLETGSLKLANGRVIEKTLYNRRTRQDEPALFVALTFERREVLDSSNIKPMNLIGVDRGENIPAVIALTDPEGCPLSRFKDSLGNPTHILRIGESYKEKQRTIQAKKEVEQRRAGGYSRKYASKAKNLADDMVRNTARDLLYYAVTQDAMLIFENLSRGFGRQGKRTFMAERQYTRMEDWLTAKLAYEGLPSKTYLSKTLAQYTSKTCSNCGFTITSADYDRVLEKLKKTATGWMTTINGKELKVEGQITYYNRYKRQNVVKDLSVELDRLSEESVNNDISSWTKGRSGEALSLLKKRFSHRPVQEKFVCLNCGFETHADEQAALNIARSWLFLRSQEYKKYQTNKTTGNTDKRAFVETWQSFYRKKLKEVWKPAV

SEQ ID NO: 43973 - protein, 978 aa, synthetic construct
  REGION 1..978: note = engineered CasX variant
QEIKRINKIRRRLVKDSNTKKAGKTGPMKTLLVRVMTPDLRERLENLRKKPENIPQPISNTSRANLNKLLTDYTEMKKAILHVYWEEFQKDPVGLMSRVAQPASKKIDQNKLKPEMDEKGNLTTAGFACSQCGQPLFVYKLEQVSEKGKAYTNYFGRCNVAEHEKLILLAQLKPEKDSDEAVTYSLGKFGQRALDFYSIHVTKESTHPVKPLAQIAGNRYASVPVGKALSDACMGTIASFLSKYQDIIIEHQKVVKGNQKRLESLRELAGKENLEYPSVTLPPQPHTKEGVDAYNEVIARVRWWVNLNLWQKLKLSRDDAKPLLRLKGFPSFPLVERQANEVDWWDMVCNVKKLINEKKEDGKVFWQNLAGYKRQEALRPYLSSEEDRKKGKKFARYQLGDLLLHLEKKHGEDWGKVYGEAWERIDKKVEGLSKHIKLEEERRSEDAQSKAALTDWLRAKASFVIEGLKEADKDEFCRCELKLQKWYGDLRGKPFAIEAENSILDISGFSKQYNCAFIWQKDGVKKLNLYLIINYFKGGKLRFKKIKPEAFEANRFYTVINKKSGEIVPMEVNFNFDDPNLIILPLAFGKRQGREFIWNDLLSLETGSLKLANGRVIEKTLYNRRTRQDEPALFVALTFERREVLDSSNIKPMNLIGVDRGENIPAVIALTDPEGCPLSRFKDSLGNPTHILRIGESYKEKQRTIQAKKEVEQRRAGGYSRKYASKAKNLADDMVRNTARDLLYYAVTQDAMLIFENLSRGFGRQGKRTFMAERQYTRMEDWLTAKLAYEGLPSKTYLSKTLAQYTSKTCSNCGFTITSADYDRVLEKLKKTATGWMTTINGKELKVEGQITYYNRYKRQNVVKDLSVELDRLSEESVNNDISSWTKGRSGEALSLLKKRFSHRPVQEKFVCLNCGFETHADEQAALNIARSWLFLRSQEYKKYQTNKTTGNTDKRAFVETWQSFYRKKLKEVWKPAV

SEQ ID NO: 43974 - protein, 978 aa, synthetic construct
  REGION 1..978: note = engineered CasX variant
QEIKRINKIRRRLVKDSNTKKAGKTGPMKTLLVRVMTPDLRERLENLRKKPENIPQPISNTSRANLNKLLTDYTEMKKAILHVYWEEFQKDPVGLMSRVAQPASKKIDQNKLKPEMDEKGNLTTAGFACSQCGQPLFVYKLEQVSEKGKAYTNYFGRCNVAEHEKLIKLAQLKPEKDSDEAVTYSLGKFGQRALDFYSIHVTKESTHPVKPLAQIAGNRYASGPVGKALSDACMGTIASFLSKYQDIIIEHQKVVKGNQKRLESLRELAGKENLEYPSVTLPPQPHTKEGVDAYNEVIARVRWWVNLNLWQKLKLSRDDAKPLLRLKGFPSFPLVERQANEVDWWDMVCNVKKLINEKKEDGKVFWQNLAGYKRQEALRPYLSSEEDRKKGKKFARYQLGDLLLHLEKKHGEDWGKVYGEAWERIDKKVEGLSKHIKLEEERRSEDAQSKAALTDWLRAKASFVIEGLKEADKDEFCRCELKLQKWYGDLRGKPFAIEAENSILDISGFSKQYNCAFIWQKDGVKKLNLYLIINYFKGGKLRFKKIKPEAFEANRFYTVINKKSGEIVPMEVNFNFDDPNLIILPLAFGKRQGREFIWNDLLSLETGSLKLANGRVIEKTLYNRRTRQDEPALFVALTFERREVLDSSNIKPMNLIGVDRGENIPAVIALTDPEGCPLSRFKDSLGNPTHILRIGESYKEKQRTIQAKKEVEQRRAGGYSRKYASKAKNLADDMVRNTARDLLYYAVTQDAMLIFENLSRGFGRQGKRTFMAERQYTRMEDWLTAKLAYEGLPSKTYLSKTLAQYTSKTCSNCGFTITSADYDRVLEKLKKTATGWMTTINGKELKVEGQITYYNRYKRQNVVKDLSVELDRLSEESVNNDISSWTKGRSGEALSLLKKRFSHRPVQEKFVCLNCGFETHADEQAALNIARSWLFLRSQEYKKYQTNKTTGNTDKRAFVETWQSFYRKKLKEVWKPAV

SEQ ID NO: 43975 - protein, 977 aa, synthetic construct
  REGION 1..977: note = engineered CasX variant
QEIKRINKIRRRLVKDSNTKKAGKTGPMKTLLVRVMTPDLRERLENLRKKPENIPQPISNTSRANLNKLLTDYTEMKKAILHVYWEEFQKDPVGLMSRVAQPASKKIDQNKLKPEMDEKGNLTTAGFACSQCGQPLFVYKLEQVSEKGKAYTNYFGRCNVAEHEKLILLAQLKPEKDSDEAVTYSLGKFGQRALDFYSIHVTKESTHPVKPLAQIAGNRYASPVGKALSDACMGTIASFLSKYQDIIIEHQKVVKGNQKRLESLRELAGKENLEYPSVTLPPQPHTKEGVDAYNEVIARVRWWVNLNLWQKLKLSRDDAKPLLRLKGFPSFPLVERQANEVDWWDMVCNVKKLINEKKEDGKVFWQNLAGYKRQEALRPYLSSEEDRKKGKKFARYQLGDLLLHLEKKHGEDWGKVYGEAWERIDKKVEGLSKHIKLEEERRSEDAQSKAALTDWLRAKASFVIEGLKEADKDEFCRCELKLQKWYGDLRGKPFAIEAENSILDISGFSKQYNCAFIWQKDGVKKLNLYLIINYFKGGKLRFKKIKPEAFEANRFYTVINKKSGEIVPMEVNFNFDDPNLIILPLAFGKRQGREFIWNDLLSLETGSLKLANGRVIEKTLYNRRTRQDEPALFVALTFERREVLDSSNIKPMNLIGVDRGENIPAVIALTDPEGCPLSRFKDSLGNPTHILRIGESYKEKQRTIQAKKEVEQRRAGGYSRKYASKAKNLADDMVRNTARDLLYYAVTQDAMLIFENLSRGFGRQGKRTFMAERQYTRMEDWLTAKLAYEGLPSKTYLSKTLAQYTSKTCSNCGFTITSADYDRVLEKLKKTATGWMTTINGKELKVEGQITYYNRYKRQNVVKDLSVELDRLSEESVNNDISSWTKGRSGEALSLLKKRFSHRPVQEKFVCLNCGFETHADEQAALNIARSWLFLRSQEYKKYQTNKTTGNTDKRAFVETWQSFYRKKLKEVWKPAV

SEQ ID NO: 43976 - protein, 978 aa, synthetic construct
  REGION 1..978: note = engineered CasX variant
QEIKRINKIRRRLVKDSNTKKAGKTGPMKTLLVRVMTPDLRERLENLRKKPENIPQPISNTSRANLNKLLTDYTEMKKAILHVYWEEFQKDPVGLMSRVAQPASKKIDQNKLKPEMDEKGNLTTAGFACSQCGQPLFVYKLEQVSEKGKAYTNYFGRCNVAEHEKLILLAQLKPEKDSDEAVTYSLGKFGQRALDFYSIHVTKESTHPVKPLAQIAGNRYASYPVGKALSDACMGTIASFLSKYQDIIIEHQKVVKGNQKRLESLRELAGKENLEYPSVTLPPQPHTKEGVDAYNEVIARVRWWVNLNLWQKLKLSRDDAKPLLRLKGFPSFPLVERQANEVDWWDMVCNVKKLINEKKEDGKVFWQNLAGYKRQEALRPYLSSEEDRKKGKKFARYQLGDLLLHLEKKHGEDWGKVYDEAWERIDKKVEGLSKHIKLEEERRSEDAQSKAALTDWLRAKASFVIEGKKEADKDEFCRCELKLQKWYGDLRGKPFAIEAENSILDISGFSKQYNCAFIWQKDGVKKLNLYLIINYFKGGKLRFKKIKPEAFEANRFYTVINKKSGEIVPMEVNFNFDDPNLIILPLAFGKRQGREFIWNDLLSLETGSLKLANGRVIEKTLYNRRTRQDEPALFVALTFERREVLDSSNIKPMNLIGVDRGENIPAVIALTDPEGCPLSRFKDSLGNPTHILRIGESYKEKQRTIQAKKEVEQRRAGGYSRKYASKAKNLADDMVRNTARDLLYYAVTQDAMLIFENLSRGFGRQGKRTFMAERQYTRMEDWLTAKLAYEGLPSKTYLSKTLAQYTSKTCSNCGFTITSADYDRVLEKLKKTATGWMTTINGKELKVEGQITYYNRYKRQNVVKDLSVELDRLSEESVNNDISSWTKGRSGEALSLLKKRFSHRPVQEKFVCLNCGFETHADEQAALNIARSWLFLRSQEYKKYQTNKTTGNTDKRAFVETWQSFYRKKLKEVWKPAV

SEQ ID NO: 43977 - protein, 978 aa, synthetic construct
  REGION 1..978: note = engineered CasX variant
QEIKRINKIRRRLVKDSNTKKAGKTGPMKTLLVRVMTPDLRERLENLRKKPENIPQPISNTSRANLNKLLTDYTEMKKAILHVYWEEFQKDPVGLMSRVAQPASKKIDQNKLKPEMDEKGNLTTAGFACSQCGQPLFVYKLEQVSEKGKAYTNYFGRCNVAEHEKLILLAQLKPEKDSDEAVTYSLGKFGQRALDFYSIHVTKESTHPVKPLAQIAGNRYASHPVGKALSDACMGTIASFLSKYQDIIIEHQKVVKGNQKRLESLRELAGKENLEYPSVTLPPQPHTKEGVDAYNEVIARVRWWVNLNLWQKLKLSRDDAKPLLRLKGFPSFPLVERQANEVDWWDMVCNVKKLINEKKEDGKVFWQNLAGYKRQEALRPYLSSEEDRKKGKKFARYQLGDLLLHLEKKHGEDWGKVYDEAWERIDKKVEGLSKHIKLEEERRSEDAQSKAALTDWLRAKASFVIEGKKEADKDEFCRCELKLQKWYGDLRGKPFAIEAENSILDISGFSKQYNCAFIWQKDGVKKLNLYLIINYFKGGKLRFKKIKPEAFEANRFYTVINKKSGEIVPMEVNFNFDDPNLIILPLAFGKRQGREFIWNDLLSLETGSLKLANGRVIEKTLYNRRTRQDEPALFVALTFERREVLDSSNIKPMNLIGVDRGENIPAVIALTDPEGCPLSRFKDSLGNPTHILRIGESYKEKQRTIQAKKEVEQRRAGGYSRKYASKAKNLADDMVRNTARDLLYYAVTQDAMLIFENLSRGFGRQGKRTFMAERQYTRMEDWLTAKLAYEGLPSKTYLSKTLAQYTSKTCSNCGFTITSADYDRVLEKLKKTATGWMTTINGKELKVEGQITYYNRYKRQNVVKDLSVELDRLSEESVNNDISSWTKGRSGEALSLLKKRFSHRPVQEKFVCLNCGFETHADEQAALNIARSWLFLRSQEYKKYQTNKTTGNTDKRAFVETWQSFYRKKLKEVWKPAV

SEQ ID NO: 43978 - protein, 978 aa, synthetic construct
  REGION 1..978: note = engineered CasX variant
QEIKRINKIRRRLVKDSNTKKAGKTGPMKTLLVRVMTPDLRERLENLRKKPENIPQPISNTSRANLNKLLTDYTEMKKAILHVYWEEFQKDPVGLMSRVAQPASKKIDQNKLKPEMDEKGNLTTAGFACSQCGQPLFVYKLEQVSEKGKAYTNYFGRCNVAEHEKLILLAQLKPEKDSDEAVTYSLGKFGQRALDFYSIHVTKESTHPVKPLAQIAGNRYASSPVGKALSDACMGTIASFLSKYQDIIIEHQKVVKGNQKRLESLRELAGKENLEYPSVTLPPQPHTKEGVDAYNEVIARVRWWVNLNLWQKLKLSRDDAKPLLRLKGFPSFPLVERQANEVDWWDMVCNVKKLINEKKEDGKVFWQNLAGYKRQEALRPYLSSEEDRKKGKKFARYQLGDLLLHLEKKHGEDWGKVYDEAWERIDKKVEGLSKHIKLEEERRSEDAQSKAALTDWLRAKASFVIEGKKEADKDEFCRCELKLQKWYGDLRGKPFAIEAENSILDISGFSKQYNCAFIWQKDGVKKLNLYLIINYFKGGKLRFKKIKPEAFEANRFYTVINKKSGEIVPMEVNFNFDDPNLIILPLAFGKRQGREFIWNDLLSLETGSLKLANGRVIEKTLYNRRTRQDEPALFVALTFERREVLDSSNIKPMNLIGVDRGENIPAVIALTDPEGCPLSRFKDSLGNPTHILRIGESYKEKQRTIQAKKEVEQRRAGGYSRKYASKAKNLADDMVRNTARDLLYYAVTQDAMLIFENLSRGFGRQGKRTFMAERQYTRMEDWLTAKLAYEGLPSKTYLSKTLAQYTSKTCSNCGFTITSADYDRVLEKLKKTATGWMTTINGKELKVEGQITYYNRYKRQNVVKDLSVELDRLSEESVNNDISSWTKGRSGEALSLLKKRFSHRPVQEKFVCLNCGFETHADEQAALNIARSWLFLRSQEYKKYQTNKTTGNTDKRAFVETWQSFYRKKLKEVWKPAV

SEQ ID NO: 43979 - protein, 978 aa, synthetic construct
  REGION 1..978: note = engineered CasX variant
QEIKRINKIRRRLVKDSNTKKAGKTGPMKTLLVRVMTPDLRERLENLRKKPENIPQPISNTSRANLNKLLTDYTEMKKAILHVYWEEFQKDPVGLMSRVAQPASKKIDQNKLKPEMDEKGNLTTAGFACSQCGQPLFVYKLEQVSEKGKAYTNYFGRCNVAEHEKLILLAQLKPEKDSDEAVTYSLGKFGQRALDFYSIHVTKESTHPVKPLAQIAGNRYASTPVGKALSDACMGTIASFLSKYQDIIIEHQKVVKGNQKRLESLRELAGKENLEYPSVTLPPQPHTKEGVDAYNEVIARVRWWVNLNLWQKLKLSRDDAKPLLRLKGFPSFPLVERQANEVDWWDMVCNVKKLINEKKEDGKVFWQNLAGYKRQEALRPYLSSEEDRKKGKKFARYQLGDLLLHLEKKHGEDWGKVYDEAWERIDKKVEGLSKHIKLEEERRSEDAQSKAALTDWLRAKASFVIEGKKEADKDEFCRCELKLQKWYGDLRGKPFAIEAENSILDISGFSKQYNCAFIWQKDGVKKLNLYLIINYFKGGKLRFKKIKPEAFEANRFYTVINKKSGEIVPMEVNFNFDDPNLIILPLAFGKRQGREFIWNDLLSLETGSLKLANGRVIEKTLYNRRTRQDEPALFVALTFERREVLDSSNIKPMNLIGVDRGENIPAVIALTDPEGCPLSRFKDSLGNPTHILRIGESYKEKQRTIQAKKEVEQRRAGGYSRKYASKAKNLADDMVRNTARDLLYYAVTQDAMLIFENLSRGFGRQGKRTFMAERQYTRMEDWLTAKLAYEGLPSKTYLSKTLAQYTSKTCSNCGFTITSADYDRVLEKLKKTATGWMTTINGKELKVEGQITYYNRYKRQNVVKDLSVELDRLSEESVNNDISSWTKGRSGEALSLLKKRFSHRPVQEKFVCLNCGFETHADEQAALNIARSWLFLRSQEYKKYQTNKTTGNTDKRAFVETWQSFYRKKLKEVWKPAV

SEQ ID NO: 43980 - protein, 978 aa, synthetic construct
  REGION 1..978: note = engineered CasX variant
QEIKRINKIRRRLVKDSNTKKAGKTGPMKTLLVRVMTPDLRERLENLRKKPENIPQPISNTSRANLNKLLTDYTEMKKAILHVYWEEFQKDPVGLMSRVAQPASKKIDQNKLKPEMDEKGNLTTAGFACSQCGQPLFVYKLEQVSEKGKAYTNYFGRCNVAEHEKLILLAQLKPEKDSDEAVTYSLGKFGQRALDFYSIHVTKESTHPVKPLAQIAGNRYASAPVGKALSDACMGTIASFLSKYQDIIIEHQKVVKGNQKRLESLRELAGKENLEYPSVTLPPQPHTKEGVDAYNEVIARVRWWVNLNLWQKLKLSRDDAKPLLRLKGFPSFPLVERQANEVDWWDMVCNVKKLINEKKEDGKVFWQNLAGYKRQEALRPYLSSEEDRKKGKKFARYQLGDLLLHLEKKHGEDWGKVYDEAWERIDKKVEGLSKHIKLEEERRSEDAQSKAALTDWLRAKASFVIEGKKEADKDEFCRCELKLQKWYGDLRGKPFAIEAENSILDISGFSKQYNCAFIWQKDGVKKLNLYLIINYFKGGKLRFKKIKPEAFEANRFYTVINKKSGEIVPMEVNFNFDDPNLIILPLAFGKRQGREFIWNDLLSLETGSLKLANGRVIEKTLYNRRTRQDEPALFVALTFERREVLDSSNIKPMNLIGVDRGENIPAVIALTDPEGCPLSRFKDSLGNPTHILRIGESYKEKQRTIQAKKEVEQRRAGGYSRKYASKAKNLADDMVRNTARDLLYYAVTQDAMLIFENLSRGFGRQGKRTFMAERQYTRMEDWLTAKLAYEGLPSKTYLSKTLAQYTSKTCSNCGFTITSADYDRVLEKLKKTATGWMTTINGKELKVEGQITYYNRYKRQNVVKDLSVELDRLSEESVNNDISSWTKGRSGEALSLLKKRFSHRPVQEKFVCLNCGFETHADEQAALNIARSWLFLRSQEYKKYQTNKTTGNTDKRAFVETWQSFYRKKLKEVWKPAV

SEQ ID NO: 43981 - protein, 978 aa, synthetic construct
  REGION 1..978: note = engineered CasX variant
QEIKRINKIRRRLVKDSNTKKAGKTGPMKTLLVRVMTPDLRERLENLRKKPENIPQPISNTSRANLNKLLTDYTEMKKAILHVYWEEFQKDPVGLMSRVAQPASKKIDQNKLKPEMDEKGNLTTAGFACSQCGQPLFVYKLEQVSEKGKAYTNYFGRCNVAEHEKLILLAQLKPEKDSDEAVTYSLGKFGQRALDFYSIHVTKESTHPVKPLAQIAGNRYASVPVGKALSDACMGTIASFLSKYQDIIIEHQKVVKGNQKRLESLRELAGKENLEYPSVTLPPQPHTKEGVDAYNEVIARVRWWVNLNLWQKLKLSRDDAKPLLRLKGFPSFPLVERQANEVDWWDMVCNVKKLINEKKEDGKVFWQNLAGYKRQEALRPYLSSEEDRKKGKKFARYQLGDLLLHLEKKHGEDWGKVYDEAWERIDKKVEGLSKHIKLEEERRSEDAQSKAALTDWLRAKASFVIEGKKEADKDEFCRCELKLQKWYGDLRGKPFAIEAENSILDISGFSKQYNCAFIWQKDGVKKLNLYLIINYFKGGKLRFKKIKPEAFEANRFYTVINKKSGEIVPMEVNFNFDDPNLIILPLAFGKRQGREFIWNDLLSLETGSLKLANGRVIEKTLYNRRTRQDEPALFVALTFERREVLDSSNIKPMNLIGVDRGENIPAVIALTDPEGCPLSRFKDSLGNPTHILRIGESYKEKQRTIQAKKEVEQRRAGGYSRKYASKAKNLADDMVRNTARDLLYYAVTQDAMLIFENLSRGFGRQGKRTFMAERQYTRMEDWLTAKLAYEGLPSKTYLSKTLAQYTSKTCSNCGFTITSADYDRVLEKLKKTATGWMTTINGKELKVEGQITYYNRYKRQNVVKDLSVELDRLSEESVNNDISSWTKGRSGEALSLLKKRFSHRPVQEKFVCLNCGFETHADEQAALNIARSWLFLRSQEYKKYQTNKTTGNTDKRAFVETWQSFYRKKLKEVWKPAV

SEQ ID NO: 43982 - protein, 978 aa, synthetic construct
  REGION 1..978: note = engineered CasX variant
QEIKRINKIRRRLVKDSNTKKAGKTGPMKTLLVRVMTPDLRERLENLRKKPENIPQPISNTSRANLNKLLTDYTEMKKAILHVYWEEFQKDPVGLMSRVAQPASKKIDQNKLKPEMDEKGNLTTAGFACSQCGQPLFVYKLEQVSEKGKAYTNYFGRCNVAEHEKLIKLAQLKPEKDSDEAVTYSLGKFGQRALDFYSIHVTKESTHPVKPLAQIAGNRYASGPVGKALSDACMGTIASFLSKYQDIIIEHQKVVKGNQKRLESLRELAGKENLEYPSVTLPPQPHTKEGVDAYNEVIARVRWWVNLNLWQKLKLSRDDAKPLLRLKGFPSFPLVERQANEVDWWDMVCNVKKLINEKKEDGKVFWQNLAGYKRQEALRPYLSSEEDRKKGKKFARYQLGDLLLHLEKKHGEDWGKVYDEAWERIDKKVEGLSKHIKLEEERRSEDAQSKAALTDWLRAKASFVIEGKKEADKDEFCRCELKLQKWYGDLRGKPFAIEAENSILDISGFSKQYNCAFIWQKDGVKKLNLYLIINYFKGGKLRFKKIKPEAFEANRFYTVINKKSGEIVPMEVNFNFDDPNLIILPLAFGKRQGREFIWNDLLSLETGSLKLANGRVIEKTLYNRRTRQDEPALFVALTFERREVLDSSNIKPMNLIGVDRGENIPAVIALTDPEGCPLSRFKDSLGNPTHILRIGESYKEKQRTIQAKKEVEQRRAGGYSRKYASKAKNLADDMVRNTARDLLYYAVTQDAMLIFENLSRGFGRQGKRTFMAERQYTRMEDWLTAKLAYEGLPSKTYLSKTLAQYTSKTCSNCGFTITSADYDRVLEKLKKTATGWMTTINGKELKVEGQITYYNRYKRQNVVKDLSVELDRLSEESVNNDISSWTKGRSGEALSLLKKRFSHRPVQEKFVCLNCGFETHADEQAALNIARSWLFLRSQEYKKYQTNKTTGNTDKRAFVETWQSFYRKKLKEVWKPAV

SEQ ID NO: 43983 - protein, 977 aa, synthetic construct
  REGION 1..977: note = engineered CasX variant
QEIKRINKIRRRLVKDSNTKKAGKTGPMKTLLVRVMTPDLRERLENLRKKPENIPQPISNTSRANLNKLLTDYTEMKKAILHVYWEEFQKDPVGLMSRVAQPASKKIDQNKLKPEMDEKGNLTTAGFACSQCGQPLFVYKLEQVSEKGKAYTNYFGRCNVAEHEKLILLAQLKPEKDSDEAVTYSLGKFGQRALDFYSIHVTKESTHPVKPLAQIAGNRYASPVGKALSDACMGTIASFLSKYQDIIIEHQKVVKGNQKRLESLRELAGKENLEYPSVTLPPQPHTKEGVDAYNEVIARVRWWVNLNLWQKLKLSRDDAKPLLRLKGFPSFPLVERQANEVDWWDMVCNVKKLINEKKEDGKVFWQNLAGYKRQEALRPYLSSEEDRKKGKKFARYQLGDLLLHLEKKHGEDWGKVYDEAWERIDKKVEGLSKHIKLEEERRSEDAQSKAALTDWLRAKASFVIEGKKEADKDEFCRCELKLQKWYGDLRGKPFAIEAENSILDISGFSKQYNCAFIWQKDGVKKLNLYLIINYFKGGKLRFKKIKPEAFEANRFYTVINKKSGEIVPMEVNFNFDDPNLIILPLAFGKRQGREFIWNDLLSLETGSLKLANGRVIEKTLYNRRTRQDEPALFVALTFERREVLDSSNIKPMNLIGVDRGENIPAVIALTDPEGCPLSRFKDSLGNPTHILRIGESYKEKQRTIQAKKEVEQRRAGGYSRKYASKAKNLADDMVRNTARDLLYYAVTQDAMLIFENLSRGFGRQGKRTFMAERQYTRMEDWLTAKLAYEGLPSKTYLSKTLAQYTSKTCSNCGFTITSADYDRVLEKLKKTATGWMTTINGKELKVEGQITYYNRYKRQNVVKDLSVELDRLSEESVNNDISSWTKGRSGEALSLLKKRFSHRPVQEKFVCLNCGFETHADEQAALNIARSWLFLRSQEYKKYQTNKTTGNTDKRAFVETWQSFYRKKLKEVWKPAV

SEQ ID NO: 43984 - protein, 978 aa, synthetic construct
  REGION 1..978: note = engineered CasX variant
QEIKRINKIRRRLVKDSNTKKAGKTGPMKTLLVRVMTPDLRERLENLRKKPENIPQPISNTSRANLNKLLTDYTEMKKAILHVYWEEFQKDPVGLMSRVAQPASKKIDQNKLKPEMDEKGNLTTAGFACSQCGQPLFVYKLEQVSEKGKAYTNYFGRCNVAEHEKLILLAQLKPEKDSDEAVTYSLGKFGQRALDFYSIHVTKESTHPVKPLAQIAGNRYASYPVGKALSDACMGTIASFLSKYQDIIIEHQKVVKGNQKRLESLRELAGKENLEYPSVTLPPQPHTKEGVDAYNEVIARVRWWVNLNLWQKLKLSRDDAKPLLRLKGFPSFPLVERQANEVDWWDMVCNVKKLINEKKEDGKVFWQNLAGYKRQEALRPYLSSEEDRKKGKKFARYQLGDLLLHLEKKHGEDWGKVYDEAWERIDKKVEGLSKHIKLEEERRSEDAQSKAALTDWLRAKASFVIEGSKEADKDEFCRCELKLQKWYGDLRGKPFAIEAENSILDISGFSKQYNCAFIWQKDGVKKLNLYLIINYFKGGKLRFKKIKPEAFEANRFYTVINKKSGEIVPMEVNFNFDDPNLIILPLAFGKRQGREFIWNDLLSLETGSLKLANGRVIEKTLYNRRTRQDEPALFVALTFERREVLDSSNIKPMNLIGVDRGENIPAVIALTDPEGCPLSRFKDSLGNPTHILRIGESYKEKQRTIQAKKEVEQRRAGGYSRKYASKAKNLADDMVRNTARDLLYYAVTQDAMLIFENLSRGFGRQGKRTFMAERQYTRMEDWLTAKLAYEGLPSKTYLSKTLAQYTSKTCSNCGFTITSADYDRVLEKLKKTATGWMTTINGKELKVEGQITYYNRYKRQNVVKDLSVELDRLSEESVNNDISSWTKGRSGEALSLLKKRFSHRPVQEKFVCLNCGFETHADEQAALNIARSWLFLRSQEYKKYQTNKTTGNTDKRAFVETWQSFYRKKLKEVWKPAV

SEQ ID NO: 43985 - protein, 978 aa, synthetic construct
  REGION 1..978: note = engineered CasX variant
QEIKRINKIRRRLVKDSNTKKAGKTGPMKTLLVRVMTPDLRERLENLRKKPENIPQPISNTSRANLNKLLTDYTEMKKAILHVYWEEFQKDPVGLMSRVAQPASKKIDQNKLKPEMDEKGNLTTAGFACSQCGQPLFVYKLEQVSEKGKAYTNYFGRCNVAEHEKLILLAQLKPEKDSDEAVTYSLGKFGQRALDFYSIHVTKESTHPVKPLAQIAGNRYASHPVGKALSDACMGTIASFLSKYQDIIIEHQKVVKGNQKRLESLRELAGKENLEYPSVTLPPQPHTKEGVDAYNEVIARVRWWVNLNLWQKLKLSRDDAKPLLRLKGFPSFPLVERQANEVDWWDMVCNVKKLINEKKEDGKVFWQNLAGYKRQEALRPYLSSEEDRKKGKKFARYQLGDLLLHLEKKHGEDWGKVYDEAWERIDKKVEGLSKHIKLEEERRSEDAQSKAALTDWLRAKASFVIEGSKEADKDEFCRCELKLQKWYGDLRGKPFAIEAENSILDISGFSKQYNCAFIWQKDGVKKLNLYLIINYFKGGKLRFKKIKPEAFEANRFYTVINKKSGEIVPMEVNFNFDDPNLIILPLAFGKRQGREFIWNDLLSLETGSLKLANGRVIEKTLYNRRTRQDEPALFVALTFERREVLDSSNIKPMNLIGVDRGENIPAVIALTDPEGCPLSRFKDSLGNPTHILRIGESYKEKQRTIQAKKEVEQRRAGGYSRKYASKAKNLADDMVRNTARDLLYYAVTQDAMLIFENLSRGFGRQGKRTFMAERQYTRMEDWLTAKLAYEGLPSKTYLSKTLAQYTSKTCSNCGFTITSADYDRVLEKLKKTATGWMTTINGKELKVEGQITYYNRYKRQNVVKDLSVELDRLSEESVNNDISSWTKGRSGEALSLLKKRFSHRPVQEKFVCLNCGFETHADEQAALNIARSWLFLRSQEYKKYQTNKTTGNTDKRAFVETWQSFYRKKLKEVWKPAV

SEQ ID NO: 43986 - protein, 978 aa, synthetic construct
  REGION 1..978: note = engineered CasX variant
QEIKRINKIRRRLVKDSNTKKAGKTGPMKTLLVRVMTPDLRERLENLRKKPENIPQPISNTSRANLNKLLTDYTEMKKAILHVYWEEFQKDPVGLMSRVAQPASKKIDQNKLKPEMDEKGNLTTAGFACSQCGQPLFVYKLEQVSEKGKAYTNYFGRCNVAEHEKLILLAQLKPEKDSDEAVTYSLGKFGQRALDFYSIHVTKESTHPVKPLAQIAGNRYASSPVGKALSDACMGTIASFLSKYQDIIIEHQKVVKGNQKRLESLRELAGKENLEYPSVTLPPQPHTKEGVDAYNEVIARVRWWVNLNLWQKLKLSRDDAKPLLRLKGFPSFPLVERQANEVDWWDMVCNVKKLINEKKEDGKVFWQNLAGYKRQEALRPYLSSEEDRKKGKKFARYQLGDLLLHLEKKHGEDWGKVYDEAWERIDKKVEGLSKHIKLEEERRSEDAQSKAALTDWLRAKASFVIEGSKEADKDEFCRCELKLQKWYGDLRGKPFAIEAENSILDISGFSKQYNCAFIWQKDGVKKLNLYLIINYFKGGKLRFKKIKPEAFEANRFYTVINKKSGEIVPMEVNFNFDDPNLIILPLAFGKRQGREFIWNDLLSLETGSLKLANGRVIEKTLYNRRTRQDEPALFVALTFERREVLDSSNIKPMNLIGVDRGENIPAVIALTDPEGCPLSRFKDSLGNPTHILRIGESYKEKQRTIQAKKEVEQRRAGGYSRKYASKAKNLADDMVRNTARDLLYYAVTQDAMLIFENLSRGFGRQGKRTFMAERQYTRMEDWLTAKLAYEGLPSKTYLSKTLAQYTSKTCSNCGFTITSADYDRVLEKLKKTATGWMTTINGKELKVEGQITYYNRYKRQNVVKDLSVELDRLSEESVNNDISSWTKGRSGEALSLLKKRFSHRPVQEKFVCLNCGFETHADEQAALNIARSWLFLRSQEYKKYQTNKTTGNTDKRAFVETWQSFYRKKLKEVWKPAV

SEQ ID NO: 43987 - protein, 978 aa, synthetic construct
  REGION 1..978: note = engineered CasX variant
QEIKRINKIRRRLVKDSNTKKAGKTGPMKTLLVRVMTPDLRERLENLRKKPENIPQPISNTSRANLNKLLTDYTEMKKAILHVYWEEFQKDPVGLMSRVAQPASKKIDQNKLKPEMDEKGNLTTAGFACSQCGQPLFVYKLEQVSEKGKAYTNYFGRCNVAEHEKLILLAQLKPEKDSDEAVTYSLGKFGQRALDFYSIHVTKESTHPVKPLAQIAGNRYASTPVGKALSDACMGTIASFLSKYQDIIIEHQKVVKGNQKRLESLRELAGKENLEYPSVTLPPQPHTKEGVDAYNEVIARVRWWVNLNLWQKLKLSRDDAKPLLRLKGFPSFPLVERQANEVDWWDMVCNVKKLINEKKEDGKVFWQNLAGYKRQEALRPYLSSEEDRKKGKKFARYQLGDLLLHLEKKHGEDWGKVYDEAWERIDKKVEGLSKHIKLEEERRSEDAQSKAALTDWLRAKASFVIEGSKEADKDEFCRCELKLQKWYGDLRGKPFAIEAENSILDISGFSKQYNCAFIWQKDGVKKLNLYLIINYFKGGKLRFKKIKPEAFEANRFYTVINKKSGEIVPMEVNFNFDDPNLIILPLAFGKRQGREFIWNDLLSLETGSLKLANGRVIEKTLYNRRTRQDEPALFVALTFERREVLDSSNIKPMNLIGVDRGENIPAVIALTDPEGCPLSRFKDSLGNPTHILRIGESYKEKQRTIQAKKEVEQRRAGGYSRKYASKAKNLADDMVRNTARDLLYYAVTQDAMLIFENLSRGFGRQGKRTFMAERQYTRMEDWLTAKLAYEGLPSKTYLSKTLAQYTSKTCSNCGFTITSADYDRVLEKLKKTATGWMTTINGKELKVEGQITYYNRYKRQNVVKDLSVELDRLSEESVNNDISSWTKGRSGEALSLLKKRFSHRPVQEKFVCLNCGFETHADEQAALNIARSWLFLRSQEYKKYQTNKTTGNTDKRAFVETWQSFYRKKLKEVWKPAV

SEQ ID NO: 43988 - protein, 978 aa, synthetic construct
  REGION 1..978: note = engineered CasX variant
QEIKRINKIRRRLVKDSNTKKAGKTGPMKTLLVRVMTPDLRERLENLRKKPENIPQPISNTSRANLNKLLTDYTEMKKAILHVYWEEFQKDPVGLMSRVAQPASKKIDQNKLKPEMDEKGNLTTAGFACSQCGQPLFVYKLEQVSEKGKAYTNYFGRCNVAEHEKLILLAQLKPEKDSDEAVTYSLGKFGQRALDFYSIHVTKESTHPVKPLAQIAGNRYASAPVGKALSDACMGTIASFLSKYQDIIIEHQKVVKGNQKRLESLRELAGKENLEYPSVTLPPQPHTKEGVDAYNEVIARVRWWVNLNLWQKLKLSRDDAKPLLRLKGFPSFPLVERQANEVDWWDMVCNVKKLINEKKEDGKVFWQNLAGYKRQEALRPYLSSEEDRKKGKKFARYQLGDLLLHLEKKHGEDWGKVYDEAWERIDKKVEGLSKHIKLEEERRSEDAQSKAALTDWLRAKASFVIEGSKEADKDEFCRCELKLQKWYGDLRGKPFAIEAENSILDISGFSKQYNCAFIWQKDGVKKLNLYLIINYFKGGKLRFKKIKPEAFEANRFYTVINKKSGEIVPMEVNFNFDDPNLIILPLAFGKRQGREFIWNDLLSLETGSLKLANGRVIEKTLYNRRTRQDEPALFVALTFERREVLDSSNIKPMNLIGVDRGENIPAVIALTDPEGCPLSRFKDSLGNPTHILRIGESYKEKQRTIQAKKEVEQRRAGGYSRKYASKAKNLADDMVRNTARDLLYYAVTQDAMLIFENLSRGFGRQGKRTFMAERQYTRMEDWLTAKLAYEGLPSKTYLSKTLAQYTSKTCSNCGFTITSADYDRVLEKLKKTATGWMTTINGKELKVEGQITYYNRYKRQNVVKDLSVELDRLSEESVNNDISSWTKGRSGEALSLLKKRFSHRPVQEKFVCLNCGFETHADEQAALNIARSWLFLRSQEYKKYQTNKTTGNTDKRAFVETWQSFYRKKLKEVWKPAV

SEQ ID NO: 43989 - protein, 978 aa, synthetic construct
  REGION 1..978: note = engineered CasX variant
QEIKRINKIRRRLVKDSNTKKAGKTGPMKTLLVRVMTPDLRERLENLRKKPENIPQPISNTSRANLNKLLTDYTEMKKAILHVYWEEFQKDPVGLMSRVAQPASKKIDQNKLKPEMDEKGNLTTAGFACSQCGQPLFVYKLEQVSEKGKAYTNYFGRCNVAEHEKLILLAQLKPEKDSDEAVTYSLGKFGQRALDFYSIHVTKESTHPVKPLAQIAGNRYASVPVGKALSDACMGTIASFLSKYQDIIIEHQKVVKGNQKRLESLRELAGKENLEYPSVTLPPQPHTKEGVDAYNEVIARVRWWVNLNLWQKLKLSRDDAKPLLRLKGFPSFPLVERQANEVDWWDMVCNVKKLINEKKEDGKVFWQNLAGYKRQEALRPYLSSEEDRKKGKKFARYQLGDLLLHLEKKHGEDWGKVYDEAWERIDKKVEGLSKHIKLEEERRSEDAQSKAALTDWLRAKASFVIEGSKEADKDEFCRCELKLQKWYGDLRGKPFAIEAENSILDISGFSKQYNCAFIWQKDGVKKLNLYLIINYFKGGKLRFKKIKPEAFEANRFYTVINKKSGEIVPMEVNFNFDDPNLIILPLAFGKRQGREFIWNDLLSLETGSLKLANGRVIEKTLYNRRTRQDEPALFVALTFERREVLDSSNIKPMNLIGVDRGENIPAVIALTDPEGCPLSRFKDSLGNPTHILRIGESYKEKQRTIQAKKEVEQRRAGGYSRKYASKAKNLADDMVRNTARDLLYYAVTQDAMLIFENLSRGFGRQGKRTFMAERQYTRMEDWLTAKLAYEGLPSKTYLSKTLAQYTSKTCSNCGFTITSADYDRVLEKLKKTATGWMTTINGKELKVEGQITYYNRYKRQNVVKDLSVELDRLSEESVNNDISSWTKGRSGEALSLLKKRFSHRPVQEKFVCLNCGFETHADEQAALNIARSWLFLRSQEYKKYQTNKTTGNTDKRAFVETWQSFYRKKLKEVWKPAV

SEQ ID NO: 43990 - protein, 978 aa, synthetic construct
  REGION 1..978: note = engineered CasX variant
QEIKRINKIRRRLVKDSNTKKAGKTGPMKTLLVRVMTPDLRERLENLRKKPENIPQPISNTSRANLNKLLTDYTEMKKAILHVYWEEFQKDPVGLMSRVAQPASKKIDQNKLKPEMDEKGNLTTAGFACSQCGQPLFVYKLEQVSEKGKAYTNYFGRCNVAEHEKLIKLAQLKPEKDSDEAVTYSLGKFGQRALDFYSIHVTKESTHPVKPLAQIAGNRYASGPVGKALSDACMGTIASFLSKYQDIIIEHQKVVKGNQKRLESLRELAGKENLEYPSVTLPPQPHTKEGVDAYNEVIARVRWWVNLNLWQKLKLSRDDAKPLLRLKGFPSFPLVERQANEVDWWDMVCNVKKLINEKKEDGKVFWQNLAGYKRQEALRPYLSSEEDRKKGKKFARYQLGDLLLHLEKKHGEDWGKVYDEAWERIDKKVEGLSKHIKLEEERRSEDAQSKAALTDWLRAKASFVIEGSKEADKDEFCRCELKLQKWYGDLRGKPFAIEAENSILDISGFSKQYNCAFIWQKDGVKKLNLYLIINYFKGGKLRFKKIKPEAFEANRFYTVINKKSGEIVPMEVNFNFDDPNLIILPLAFGKRQGREFIWNDLLSLETGSLKLANGRVIEKTLYNRRTRQDEPALFVALTFERREVLDSSNIKPMNLIGVDRGENIPAVIALTDPEGCPLSRFKDSLGNPTHILRIGESYKEKQRTIQAKKEVEQRRAGGYSRKYASKAKNLADDMVRNTARDLLYYAVTQDAMLIFENLSRGFGRQGKRTFMAERQYTRMEDWLTAKLAYEGLPSKTYLSKTLAQYTSKTCSNCGFTITSADYDRVLEKLKKTATGWMTTINGKELKVEGQITYYNRYKRQNVVKDLSVELDRLSEESVNNDISSWTKGRSGEALSLLKKRFSHRPVQEKFVCLNCGFETHADEQAALNIARSWLFLRSQEYKKYQTNKTTGNTDKRAFVETWQSFYRKKLKEVWKPAV

SEQ ID NO: 43991 - protein, 977 aa, synthetic construct
  REGION 1..977: note = engineered CasX variant
QEIKRINKIRRRLVKDSNTKKAGKTGPMKTLLVRVMTPDLRERLENLRKKPENIPQPISNTSRANLNKLLTDYTEMKKAILHVYWEEFQKDPVGLMSRVAQPASKKIDQNKLKPEMDEKGNLTTAGFACSQCGQPLFVYKLEQVSEKGKAYTNYFGRCNVAEHEKLILLAQLKPEKDSDEAVTYSLGKFGQRALDFYSIHVTKESTHPVKPLAQIAGNRYASPVGKALSDACMGTIASFLSKYQDIIIEHQKVVKGNQKRLESLRELAGKENLEYPSVTLPPQPHTKEGVDAYNEVIARVRWWVNLNLWQKLKLSRDDAKPLLRLKGFPSFPLVERQANEVDWWDMVCNVKKLINEKKEDGKVFWQNLAGYKRQEALRPYLSSEEDRKKGKKFARYQLGDLLLHLEKKHGEDWGKVYDEAWERIDKKVEGLSKHIKLEEERRSEDAQSKAALTDWLRAKASFVIEGSKEADKDEFCRCELKLQKWYGDLRGKPFAIEAENSILDISGFSKQYNCAFIWQKDGVKKLNLYLIINYFKGGKLRFKKIKPEAFEANRFYTVINKKSGEIVPMEVNFNFDDPNLIILPLAFGKRQGREFIWNDLLSLETGSLKLANGRVIEKTLYNRRTRQDEPALFVALTFERREVLDSSNIKPMNLIGVDRGENIPAVIALTDPEGCPLSRFKDSLGNPTHILRIGESYKEKQRTIQAKKEVEQRRAGGYSRKYASKAKNLADDMVRNTARDLLYYAVTQDAMLIFENLSRGFGRQGKRTFMAERQYTRMEDWLTAKLAYEGLPSKTYLSKTLAQYTSKTCSNCGFTITSADYDRVLEKLKKTATGWMTTINGKELKVEGQITYYNRYKRQNVVKDLSVELDRLSEESVNNDISSWTKGRSGEALSLLKKRFSHRPVQEKFVCLNCGFETHADEQAALNIARSWLFLRSQEYKKYQTNKTTGNTDKRAFVETWQSFYRKKLKEVWKPAV

SEQ ID NO: 43992 - protein, 979 aa, synthetic construct
  REGION 1..979: note = engineered CasX variant
QEIKRINKIRRRLVKDSNTKKAGKTGPMKTLLVRVMTPDLRERLENLRKKPENIPQPISNTSRANLNKLLTDYTEMKKAILHVYWEEFQKDPVGLMSRVAQPASKKIDQNKLKPEMDEKGNLTTAGFACSQCGQPLFVYKLEQVSEKGKAYTNYFGRCNVAEHEKLILLAQLKPEKDSDEAVTYSLGKFGQRALDFYSIHVTKESTHPVKPLAQIAGNRYASYPVGKALSDACMGTIASFLSKYQDIIIEHQKVVKGNQKRLESLRELAGKENLEYPSVTLPPQPHTKEGVDAYNEVIARVRWWVNLNLWQKLKLSRDDAKPLLRLKGFPSFPLVERQANEVDWWDMVCNVKKLINEKKEDGKVFWQNLAGYKRQEALRPYLSSEEDRKKGKKFARYQLGDLLLHLEKKHGEDWGKVYDEAWERIDKKVEGLSKHIKLEEERRSEDAQSKAALTDWLRAKASFVIEGLKEADDKDEFCRCELKLQKWYGDLRGKPFAIEAENSILDISGFSKQYNCAFIWQKDGVKKLNLYLIINYFKGGKLRFKKIKPEAFEANRFYTVINKKSGEIVPMEVNFNFDDPNLIILPLAFGKRQGREFIWNDLLSLETGSLKLANGRVIEKTLYNRRTRQDEPALFVALTFERREVLDSSNIKPMNLIGVDRGENIPAVIALTDPEGCPLSRFKDSLGNPTHILRIGESYKEKQRTIQAKKEVEQRRAGGYSRKYASKAKNLADDMVRNTARDLLYYAVTQDAMLIFENLSRGFGRQGKRTFMAERQYTRMEDWLTAKLAYEGLPSKTYLSKTLAQYTSKTCSNCGFTITSADYDRVLEKLKKTATGWMTTINGKELKVEGQITYYNRYKRQNVVKDLSVELDRLSEESVNNDISSWTKGRSGEALSLLKKRFSHRPVQEKFVCLNCGFETHADEQAALNIARSWLFLRSQEYKKYQTNKTTGNTDKRAFVETWQSFYRKKLKEVWKPAV

SEQ ID NO: 43993 - protein, 979 aa, synthetic construct
  REGION 1..979: note = engineered CasX variant
QEIKRINKIRRRLVKDSNTKKAGKTGPMKTLLVRVMTPDLRERLENLRKKPENIPQPISNTSRANLNKLLTDYTEMKKAILHVYWEEFQKDPVGLMSRVAQPASKKIDQNKLKPEMDEKGNLTTAGFACSQCGQPLFVYKLEQVSEKGKAYTNYFGRCNVAEHEKLILLAQLKPEKDSDEAVTYSLGKFGQRALDFYSIHVTKESTHPVKPLAQIAGNRYASHPVGKALSDACMGTIASFLSKYQDIIIEHQKVVKGNQKRLESLRELAGKENLEYPSVTLPPQPHTKEGVDAYNEVIARVRWWVNLNLWQKLKLSRDDAKPLLRLKGFPSFPLVERQANEVDWWDMVCNVKKLINEKKEDGKVFWQNLAGYKRQEALRPYLSSEEDRKKGKKFARYQLGDLLLHLEKKHGEDWGKVYDEAWERIDKKVEGLSKHIKLEEERRSEDAQSKAALTDWLRAKASFVIEGLKEADDKDEFCRCELKLQKWYGDLRGKPFAIEAENSILDISGFSKQYNCAFIWQKDGVKKLNLYLIINYFKGGKLRFKKIKPEAFEANRFYTVINKKSGEIVPMEVNFNFDDPNLIILPLAFGKRQGREFIWNDLLSLETGSLKLANGRVIEKTLYNRRTRQDEPALFVALTFERREVLDSSNIKPMNLIGVDRGENIPAVIALTDPEGCPLSRFKDSLGNPTHILRIGESYKEKQRTIQAKKEVEQRRAGGYSRKYASKAKNLADDMVRNTARDLLYYAVTQDAMLIFENLSRGFGRQGKRTFMAERQYTRMEDWLTAKLAYEGLPSKTYLSKTLAQYTSKTCSNCGFTITSADYDRVLEKLKKTATGWMTTINGKELKVEGQITYYNRYKRQNVVKDLSVELDRLSEESVNNDISSWTKGRSGEALSLLKKRFSHRPVQEKFVCLNCGFETHADEQAALNIARSWLFLRSQEYKKYQTNKTTGNTDKRAFVETWQSFYRKKLKEVWKPAV

SEQ ID NO: 43994 - protein, 979 aa, synthetic construct
  REGION 1..979: note = engineered CasX variant
QEIKRINKIRRRLVKDSNTKKAGKTGPMKTLLVRVMTPDLRERLENLRKKPENIPQPISNTSRANLNKLLTDYTEMKKAILHVYWEEFQKDPVGLMSRVAQPASKKIDQNKLKPEMDEKGNLTTAGFACSQCGQPLFVYKLEQVSEKGKAYTNYFGRCNVAEHEKLILLAQLKPEKDSDEAVTYSLGKFGQRALDFYSIHVTKESTHPVKPLAQIAGNRYASSPVGKALSDACMGTIASFLSKYQDIIIEHQKVVKGNQKRLESLRELAGKENLEYPSVTLPPQPHTKEGVDAYNEVIARVRWWVNLNLWQKLKLSRDDAKPLLRLKGFPSFPLVERQANEVDWWDMVCNVKKLINEKKEDGKVFWQNLAGYKRQEALRPYLSSEEDRKKGKKFARYQLGDLLLHLEKKHGEDWGKVYDEAWERIDKKVEGLSKHIKLEEERRSEDAQSKAALTDWLRAKASFVIEGLKEADDKDEFCRCELKLQKWYGDLRGKPFAIEAENSILDISGFSKQYNCAFIWQKDGVKKLNLYLIINYFKGGKLRFKKIKPEAFEANRFYTVINKKSGEIVPMEVNFNFDDPNLIILPLAFGKRQGREFIWNDLLSLETGSLKLANGRVIEKTLYNRRTRQDEPALFVALTFERREVLDSSNIKPMNLIGVDRGENIPAVIALTDPEGCPLSRFKDSLGNPTHILRIGESYKEKQRTIQAKKEVEQRRAGGYSRKYASKAKNLADDMVRNTARDLLYYAVTQDAMLIFENLSRGFGRQGKRTFMAERQYTRMEDWLTAKLAYEGLPSKTYLSKTLAQYTSKTCSNCGFTITSADYDRVLEKLKKTATGWMTTINGKELKVEGQITYYNRYKRQNVVKDLSVELDRLSEESVNNDISSWTKGRSGEALSLLKKRFSHRPVQEKFVCLNCGFETHADEQAALNIARSWLFLRSQEYKKYQTNKTTGNTDKRAFVETWQSFYRKKLKEVWKPAV

SEQ ID NO: 43995 - protein, 979 aa, synthetic construct
  REGION 1..979: note = engineered CasX variant
QEIKRINKIRRRLVKDSNTKKAGKTGPMKTLLVRVMTPDLRERLENLRKKPENIPQPISNTSRANLNKLLTDYTEMKKAILHVYWEEFQKDPVGLMSRVAQPASKKIDQNKLKPEMDEKGNLTTAGFACSQCGQPLFVYKLEQVSEKGKAYTNYFGRCNVAEHEKLILLAQLKPEKDSDEAVTYSLGKFGQRALDFYSIHVTKESTHPVKPLAQIAGNRYASTPVGKALSDACMGTIASFLSKYQDIIIEHQKVVKGNQKRLESLRELAGKENLEYPSVTLPPQPHTKEGVDAYNEVIARVRWWVNLNLWQKLKLSRDDAKPLLRLKGFPSFPLVERQANEVDWWDMVCNVKKLINEKKEDGKVFWQNLAGYKRQEALRPYLSSEEDRKKGKKFARYQLGDLLLHLEKKHGEDWGKVYDEAWERIDKKVEGLSKHIKLEEERRSEDAQSKAALTDWLRAKASFVIEGLKEADDKDEFCRCELKLQKWYGDLRGKPFAIEAENSILDISGFSKQYNCAFIWQKDGVKKLNLYLIINYFKGGKLRFKKIKPEAFEANRFYTVINKKSGEIVPMEVNFNFDDPNLIILPLAFGKRQGREFIWNDLLSLETGSLKLANGRVIEKTLYNRRTRQDEPALFVALTFERREVLDSSNIKPMNLIGVDRGENIPAVIALTDPEGCPLSRFKDSLGNPTHILRIGESYKEKQRTIQAKKEVEQRRAGGYSRKYASKAKNLADDMVRNTARDLLYYAVTQDAMLIFENLSRGFGRQGKRTFMAERQYTRMEDWLTAKLAYEGLPSKTYLSKTLAQYTSKTCSNCGFTITSADYDRVLEKLKKTATGWMTTINGKELKVEGQITYYNRYKRQNVVKDLSVELDRLSEESVNNDISSWTKGRSGEALSLLKKRFSHRPVQEKFVCLNCGFETHADEQAALNIARSWLFLRSQEYKKYQTNKTTGNTDKRAFVETWQSFYRKKLKEVWKPAV

SEQ ID NO: 43996 - protein, 979 aa, synthetic construct
  REGION 1..979: note = engineered CasX variant
QEIKRINKIRRRLVKDSNTKKAGKTGPMKTLLVRVMTPDLRERLENLRKKPENIPQPISNTSRANLNKLLTDYTEMKKAILHVYWEEFQKDPVGLMSRVAQPASKKIDQNKLKPEMDEKGNLTTAGFACSQCGQPLFVYKLEQVSEKGKAYTNYFGRCNVAEHEKLILLAQLKPEKDSDEAVTYSLGKFGQRALDFYSIHVTKESTHPVKPLAQIAGNRYASAPVGKALSDACMGTIASFLSKYQDIIIEHQKVVKGNQKRLESLRELAGKENLEYPSVTLPPQPHTKEGVDAYNEVIARVRWWVNLNLWQKLKLSRDDAKPLLRLKGFPSFPLVERQANEVDWWDMVCNVKKLINEKKEDGKVFWQNLAGYKRQEALRPYLSSEEDRKKGKKFARYQLGDLLLHLEKKHGEDWGKVYDEAWERIDKKVEGLSKHIKLEEERRSEDAQSKAALTDWLRAKASFVIEGLKEADDKDEFCRCELKLQKWYGDLRGKPFAIEAENSILDISGFSKQYNCAFIWQKDGVKKLNLYLIINYFKGGKLRFKKIKPEAFEANRFYTVINKKSGEIVPMEVNFNFDDPNLIILPLAFGKRQGREFIWNDLLSLETGSLKLANGRVIEKTLYNRRTRQDEPALFVALTFERREVLDSSNIKPMNLIGVDRGENIPAVIALTDPEGCPLSRFKDSLGNPTHILRIGESYKEKQRTIQAKKEVEQRRAGGYSRKYASKAKNLADDMVRNTARDLLYYAVTQDAMLIFENLSRGFGRQGKRTFMAERQYTRMEDWLTAKLAYEGLPSKTYLSKTLAQYTSKTCSNCGFTITSADYDRVLEKLKKTATGWMTTINGKELKVEGQITYYNRYKRQNVVKDLSVELDRLSEESVNNDISSWTKGRSGEALSLLKKRFSHRPVQEKFVCLNCGFETHADEQAALNIARSWLFLRSQEYKKYQTNKTTGNTDKRAFVETWQSFYRKKLKEVWKPAV

SEQ ID NO: 43997 - protein, 979 aa, synthetic construct
  REGION 1..979: note = engineered CasX variant
QEIKRINKIRRRLVKDSNTKKAGKTGPMKTLLVRVMTPDLRERLENLRKKPENIPQPISNTSRANLNKLLTDYTEMKKAILHVYWEEFQKDPVGLMSRVAQPASKKIDQNKLKPEMDEKGNLTTAGFACSQCGQPLFVYKLEQVSEKGKAYTNYFGRCNVAEHEKLILLAQLKPEKDSDEAVTYSLGKFGQRALDFYSIHVTKESTHPVKPLAQIAGNRYASVPVGKALSDACMGTIASFLSKYQDIIIEHQKVVKGNQKRLESLRELAGKENLEYPSVTLPPQPHTKEGVDAYNEVIARVRWWVNLNLWQKLKLSRDDAKPLLRLKGFPSFPLVERQANEVDWWDMVCNVKKLINEKKEDGKVFWQNLAGYKRQEALRPYLSSEEDRKKGKKFARYQLGDLLLHLEKKHGEDWGKVYDEAWERIDKKVEGLSKHIKLEEERRSEDAQSKAALTDWLRAKASFVIEGLKEADDKDEFCRCELKLQKWYGDLRGKPFAIEAENSILDISGFSKQYNCAFIWQKDGVKKLNLYLIINYFKGGKLRFKKIKPEAFEANRFYTVINKKSGEIVPMEVNFNFDDPNLIILPLAFGKRQGREFIWNDLLSLETGSLKLANGRVIEKTLYNRRTRQDEPALFVALTFERREVLDSSNIKPMNLIGVDRGENIPAVIALTDPEGCPLSRFKDSLGNPTHILRIGESYKEKQRTIQAKKEVEQRRAGGYSRKYASKAKNLADDMVRNTARDLLYYAVTQDAMLIFENLSRGFGRQGKRTFMAERQYTRMEDWLTAKLAYEGLPSKTYLSKTLAQYTSKTCSNCGFTITSADYDRVLEKLKKTATGWMTTINGKELKVEGQITYYNRYKRQNVVKDLSVELDRLSEESVNNDISSWTKGRSGEALSLLKKRFSHRPVQEKFVCLNCGFETHADEQAALNIARSWLFLRSQEYKKYQTNKTTGNTDKRAFVETWQSFYRKKLKEVWKPAV

SEQ ID NO: 43998 - protein, 979 aa, synthetic construct
  REGION 1..979: note = engineered CasX variant
QEIKRINKIRRRLVKDSNTKKAGKTGPMKTLLVRVMTPDLRERLENLRKKPENIPQPISNTSRANLNKLLTDYTEMKKAILHVYWEEFQKDPVGLMSRVAQPASKKIDQNKLKPEMDEKGNLTTAGFACSQCGQPLFVYKLEQVSEKGKAYTNYFGRCNVAEHEKLIKLAQLKPEKDSDEAVTYSLGKFGQRALDFYSIHVTKESTHPVKPLAQIAGNRYASGPVGKALSDACMGTIASFLSKYQDIIIEHQKVVKGNQKRLESLRELAGKENLEYPSVTLPPQPHTKEGVDAYNEVIARVRWWVNLNLWQKLKLSRDDAKPLLRLKGFPSFPLVERQANEVDWWDMVCNVKKLINEKKEDGKVFWQNLAGYKRQEALRPYLSSEEDRKKGKKFARYQLGDLLLHLEKKHGEDWGKVYDEAWERIDKKVEGLSKHIKLEEERRSEDAQSKAALTDWLRAKASFVIEGLKEADDKDEFCRCELKLQKWYGDLRGKPFAIEAENSILDISGFSKQYNCAFIWQKDGVKKLNLYLIINYFKGGKLRFKKIKPEAFEANRFYTVINKKSGEIVPMEVNFNFDDPNLIILPLAFGKRQGREFIWNDLLSLETGSLKLANGRVIEKTLYNRRTRQDEPALFVALTFERREVLDSSNIKPMNLIGVDRGENIPAVIALTDPEGCPLSRFKDSLGNPTHILRIGESYKEKQRTIQAKKEVEQRRAGGYSRKYASKAKNLADDMVRNTARDLLYYAVTQDAMLIFENLSRGFGRQGKRTFMAERQYTRMEDWLTAKLAYEGLPSKTYLSKTLAQYTSKTCSNCGFTITSADYDRVLEKLKKTATGWMTTINGKELKVEGQITYYNRYKRQNVVKDLSVELDRLSEESVNNDISSWTKGRSGEALSLLKKRFSHRPVQEKFVCLNCGFETHADEQAALNIARSWLFLRSQEYKKYQTNKTTGNTDKRAFVETWQSFYRKKLKEVWKPAV

SEQ ID NO: 43999 - protein, 978 aa, synthetic construct
  REGION 1..978: note = engineered CasX variant
QEIKRINKIRRRLVKDSNTKKAGKTGPMKTLLVRVMTPDLRERLENLRKKPENIPQPISNTSRANLNKLLTDYTEMKKAILHVYWEEFQKDPVGLMSRVAQPASKKIDQNKLKPEMDEKGNLTTAGFACSQCGQPLFVYKLEQVSEKGKAYTNYFGRCNVAEHEKLILLAQLKPEKDSDEAVTYSLGKFGQRALDFYSIHVTKESTHPVKPLAQIAGNRYASPVGKALSDACMGTIASFLSKYQDIIIEHQKVVKGNQKRLESLRELAGKENLEYPSVTLPPQPHTKEGVDAYNEVIARVRWWVNLNLWQKLKLSRDDAKPLLRLKGFPSFPLVERQANEVDWWDMVCNVKKLINEKKEDGKVFWQNLAGYKRQEALRPYLSSEEDRKKGKKFARYQLGDLLLHLEKKHGEDWGKVYDEAWERIDKKVEGLSKHIKLEEERRSEDAQSKAALTDWLRAKASFVIEGLKEADDKDEFCRCELKLQKWYGDLRGKPFAIEAENSILDISGFSKQYNCAFIWQKDGVKKLNLYLIINYFKGGKLRFKKIKPEAFEANRFYTVINKKSGEIVPMEVNFNFDDPNLIILPLAFGKRQGREFIWNDLLSLETGSLKLANGRVIEKTLYNRRTRQDEPALFVALTFERREVLDSSNIKPMNLIGVDRGENIPAVIALTDPEGCPLSRFKDSLGNPTHILRIGESYKEKQRTIQAKKEVEQRRAGGYSRKYASKAKNLADDMVRNTARDLLYYAVTQDAMLIFENLSRGFGRQGKRTFMAERQYTRMEDWLTAKLAYEGLPSKTYLSKTLAQYTSKTCSNCGFTITSADYDRVLEKLKKTATGWMTTINGKELKVEGQITYYNRYKRQNVVKDLSVELDRLSEESVNNDISSWTKGRSGEALSLLKKRFSHRPVQEKFVCLNCGFETHADEQAALNIARSWLFLRSQEYKKYQTNKTTGNTDKRAFVETWQSFYRKKLKEVWKPAV

SEQ ID NO: 44000 - protein, 979 aa, synthetic construct
  REGION 1..979: note = engineered CasX variant
QEIKRINKIRRRLVKDSNTKKAGKTGPMKTLLVRVMTPDLRERLENLRKKPENIPQPISNTSRANLNKLLTDYTEMKKAILHVYWEEFQKDPVGLMSRVAQPASKKIDQNKLKPEMDEKGNLTTAGFACSQCGQPLFVYKLEQVSEKGKAYTNYFGRCNVAEHEKLILLAQLKPEKDSDEAVTYSLGKFGQRALDFYSIHVTKESTHPVKPLAQIAGNRYASYPVGKALSDACMGTIASFLSKYQDIIIEHQKVVKGNQKRLESLRELAGKENLEYPSVTLPPQPHTKEGVDAYNEVIARVRWWVNLNLWQKLKLSRDDAKPLLRLKGFPSFPLVERQANEVDWWDMVCNVKKLINEKKEDGKVFWQNLAGYKRQEALRPYLSSEEDRKKGKKFARYQLGDLLLHLEKKHGEDWGKVYDEAWERIDKKVEGLSKHIKLEEERRSEDAQSKAALTDWLRAKASFVIEGLKEADKDEFCRCELKLQKWYGDLRGKPFAIEAENSILDISGFSKQYNCAFIWQKDGVKKLNLYLIINYFKGGKLRFKKIKPEAFEANRFYTVINKKSGEIVPMEVNFNFDDPNLIILPLAFGKRQGREFIWNDLLSLETGSLKLANGRVIEKTLYNRRTRQDEPALFVALTFERREVLDSSNIKPMNLIGVDRGENIPAVIALTDPEGCPLSRFKDSLGNPTHILRIGESYKEKQRTIQAKKEVEQRRAGGYSRKYASKAKNLADDMVRNTARDLLYYAVTQDAMLIFENLSRGFGRQGKRTFMAERQYTRMEDWLTAKLAYEGLPSKTYLSKTLAQYTSKTCSNCGFTITSADYDRVLEKLKKTATGWMTTINGKELKVEGQITYYNRYKRQNVVKDLSVELDRLSEESVNNDISSWTKGRSGNEALSLLKKRFSHRPVQEKFVCLNCGFETHADEQAALNIARSWLFLRSQEYKKYQTNKTTGNTDKRAFVETWQSFYRKKLKEVWKPAV

SEQ ID NO: 44001 - protein, 979 aa, synthetic construct
  REGION 1..979: note = engineered CasX variant
QEIKRINKIRRRLVKDSNTKKAGKTGPMKTLLVRVMTPDLRERLENLRKKPENIPQPISNTSRANLNKLLTDYTEMKKAILHVYWEEFQKDPVGLMSRVAQPASKKIDQNKLKPEMDEKGNLTTAGFACSQCGQPLFVYKLEQVSEKGKAYTNYFGRCNVAEHEKLILLAQLKPEKDSDEAVTYSLGKFGQRALDFYSIHVTKESTHPVKPLAQIAGNRYASHPVGKALSDACMGTIASFLSKYQDIIIEHQKVVKGNQKRLESLRELAGKENLEYPSVTLPPQPHTKEGVDAYNEVIARVRWWVNLNLWQKLKLSRDDAKPLLRLKGFPSFPLVERQANEVDWWDMVCNVKKLINEKKEDGKVFWQNLAGYKRQEALRPYLSSEEDRKKGKKFARYQLGDLLLHLEKKHGEDWGKVYDEAWERIDKKVEGLSKHIKLEEERRSEDAQSKAALTDWLRAKASFVIEGLKEADKDEFCRCELKLQKWYGDLRGKPFAIEAENSILDISGFSKQYNCAFIWQKDGVKKLNLYLIINYFKGGKLRFKKIKPEAFEANRFYTVINKKSGEIVPMEVNFNFDDPNLIILPLAFGKRQGREFIWNDLLSLETGSLKLANGRVIEKTLYNRRTRQDEPALFVALTFERREVLDSSNIKPMNLIGVDRGENIPAVIALTDPEGCPLSRFKDSLGNPTHILRIGESYKEKQRTIQAKKEVEQRRAGGYSRKYASKAKNLADDMVRNTARDLLYYAVTQDAMLIFENLSRGFGRQGKRTFMAERQYTRMEDWLTAKLAYEGLPSKTYLSKTLAQYTSKTCSNCGFTITSADYDRVLEKLKKTATGWMTTINGKELKVEGQITYYNRYKRQNVVKDLSVELDRLSEESVNNDISSWTKGRSGNEALSLLKKRFSHRPVQEKFVCLNCGFETHADEQAALNIARSWLFLRSQEYKKYQTNKTTGNTDKRAFVETWQSFYRKKLKEVWKPAV

SEQ ID NO: 44002 - protein, 979 aa, synthetic construct
  REGION 1..979: note = engineered CasX variant
QEIKRINKIRRRLVKDSNTKKAGKTGPMKTLLVRVMTPDLRERLENLRKKPENIPQPISNTSRANLNKLLTDYTEMKKAILHVYWEEFQKDPVGLMSRVAQPASKKIDQNKLKPEMDEKGNLTTAGFACSQCGQPLFVYKLEQVSEKGKAYTNYFGRCNVAEHEKLILLAQLKPEKDSDEAVTYSLGKFGQRALDFYSIHVTKESTHPVKPLAQIAGNRYASSPVGKALSDACMGTIASFLSKYQDIIIEHQKVVKGNQKRLESLRELAGKENLEYPSVTLPPQPHTKEGVDAYNEVIARVRWWVNLNLWQKLKLSRDDAKPLLRLKGFPSFPLVERQANEVDWWDMVCNVKKLINEKKEDGKVFWQNLAGYKRQEALRPYLSSEEDRKKGKKFARYQLGDLLLHLEKKHGEDWGKVYDEAWERIDKKVEGLSKHIKLEEERRSEDAQSKAALTDWLRAKASFVIEGLKEADKDEFCRCELKLQKWYGDLRGKPFAIEAENSILDISGFSKQYNCAFIWQKDGVKKLNLYLIINYFKGGKLRFKKIKPEAFEANRFYTVINKKSGEIVPMEVNFNFDDPNLIILPLAFGKRQGREFIWNDLLSLETGSLKLANGRVIEKTLYNRRTRQDEPALFVALTFERREVLDSSNIKPMNLIGVDRGENIPAVIALTDPEGCPLSRFKDSLGNPTHILRIGESYKEKQRTIQAKKEVEQRRAGGYSRKYASKAKNLADDMVRNTARDLLYYAVTQDAMLIFENLSRGFGRQGKRTFMAERQYTRMEDWLTAKLAYEGLPSKTYLSKTLAQYTSKTCSNCGFTITSADYDRVLEKLKKTATGWMTTINGKELKVEGQITYYNRYKRQNVVKDLSVELDRLSEESVNNDISSWTKGRSGNEALSLLKKRFSHRPVQEKFVCLNCGFETHADEQAALNIARSWLFLRSQEYKKYQTNKTTGNTDKRAFVETWQSFYRKKLKEVWKPAV

SEQ ID NO: 44003 - protein, 979 aa, synthetic construct
  REGION 1..979: note = engineered CasX variant
QEIKRINKIRRRLVKDSNTKKAGKTGPMKTLLVRVMTPDLRERLENLRKKPENIPQPISNTSRANLNKLLTDYTEMKKAILHVYWEEFQKDPVGLMSRVAQPASKKIDQNKLKPEMDEKGNLTTAGFACSQCGQPLFVYKLEQVSEKGKAYTNYFGRCNVAEHEKLILLAQLKPEKDSDEAVTYSLGKFGQRALDFYSIHVTKESTHPVKPLAQIAGNRYASTPVGKALSDACMGTIASFLSKYQDIIIEHQKVVKGNQKRLESLRELAGKENLEYPSVTLPPQPHTKEGVDAYNEVIARVRWWVNLNLWQKLKLSRDDAKPLLRLKGFPSFPLVERQANEVDWWDMVCNVKKLINEKKEDGKVFWQNLAGYKRQEALRPYLSSEEDRKKGKKFARYQLGDLLLHLEKKHGEDWGKVYDEAWERIDKKVEGLSKHIKLEEERRSEDAQSKAALTDWLRAKASFVIEGLKEADKDEFCRCELKLQKWYGDLRGKPFAIEAENSILDISGFSKQYNCAFIWQKDGVKKLNLYLIINYFKGGKLRFKKIKPEAFEANRFYTVINKKSGEIVPMEVNFNFDDPNLIILPLAFGKRQGREFIWNDLLSLETGSLKLANGRVIEKTLYNRRTRQDEPALFVALTFERREVLDSSNIKPMNLIGVDRGENIPAVIALTDPEGCPLSRFKDSLGNPTHILRIGESYKEKQRTIQAKKEVEQRRAGGYSRKYASKAKNLADDMVRNTARDLLYYAVTQDAMLIFENLSRGFGRQGKRTFMAERQYTRMEDWLTAKLAYEGLPSKTYLSKTLAQYTSKTCSNCGFTITSADYDRVLEKLKKTATGWMTTINGKELKVEGQITYYNRYKRQNVVKDLSVELDRLSEESVNNDISSWTKGRSGNEALSLLKKRFSHRPVQEKFVCLNCGFETHADEQAALNIARSWLFLRSQEYKKYQTNKTTGNTDKRAFVETWQSFYRKKLKEVWKPAV

SEQ ID NO: 44004 - protein, 979 aa, synthetic construct
  REGION 1..979: note = engineered CasX variant
QEIKRINKIRRRLVKDSNTKKAGKTGPMKTLLVRVMTPDLRERLENLRKKPENIPQPISNTSRANLNKLLTDYTEMKKAILHVYWEEFQKDPVGLMSRVAQPASKKIDQNKLKPEMDEKGNLTTAGFACSQCGQPLFVYKLEQVSEKGKAYTNYFGRCNVAEHEKLILLAQLKPEKDSDEAVTYSLGKFGQRALDFYSIHVTKESTHPVKPLAQIAGNRYASAPVGKALSDACMGTIASFLSKYQDIIIEHQKVVKGNQKRLESLRELAGKENLEYPSVTLPPQPHTKEGVDAYNEVIARVRWWVNLNLWQKLKLSRDDAKPLLRLKGFPSFPLVERQANEVDWWDMVCNVKKLINEKKEDGKVFWQNLAGYKRQEALRPYLSSEEDRKKGKKFARYQLGDLLLHLEKKHGEDWGKVYDEAWERIDKKVEGLSKHIKLEEERRSEDAQSKAALTDWLRAKASFVIEGLKEADKDEFCRCELKLQKWYGDLRGKPFAIEAENSILDISGFSKQYNCAFIWQKDGVKKLNLYLIINYFKGGKLRFKKIKPEAFEANRFYTVINKKSGEIVPMEVNFNFDDPNLIILPLAFGKRQGREFIWNDLLSLETGSLKLANGRVIEKTLYNRRTRQDEPALFVALTFERREVLDSSNIKPMNLIGVDRGENIPAVIALTDPEGCPLSRFKDSLGNPTHILRIGESYKEKQRTIQAKKEVEQRRAGGYSRKYASKAKNLADDMVRNTARDLLYYAVTQDAMLIFENLSRGFGRQGKRTFMAERQYTRMEDWLTAKLAYEGLPSKTYLSKTLAQYTSKTCSNCGFTITSADYDRVLEKLKKTATGWMTTINGKELKVEGQITYYNRYKRQNVVKDLSVELDRLSEESVNNDISSWTKGRSGNEALSLLKKRFSHRPVQEKFVCLNCGFETHADEQAALNIARSWLFLRSQEYKKYQTNKTTGNTDKRAFVETWQSFYRKKLKEVWKPAV

SEQ ID NO: 44005 - protein, 979 aa, synthetic construct
  REGION 1..979: note = engineered CasX variant
QEIKRINKIRRRLVKDSNTKKAGKTGPMKTLLVRVMTPDLRERLENLRKKPENIPQPISNTSRANLNKLLTDYTEMKKAILHVYWEEFQKDPVGLMSRVAQPASKKIDQNKLKPEMDEKGNLTTAGFACSQCGQPLFVYKLEQVSEKGKAYTNYFGRCNVAEHEKLILLAQLKPEKDSDEAVTYSLGKFGQRALDFYSIHVTKESTHPVKPLAQIAGNRYASVPVGKALSDACMGTIASFLSKYQDIIIEHQKVVKGNQKRLESLRELAGKENLEYPSVTLPPQPHTKEGVDAYNEVIARVRWWVNLNLWQKLKLSRDDAKPLLRLKGFPSFPLVERQANEVDWWDMVCNVKKLINEKKEDGKVFWQNLAGYKRQEALRPYLSSEEDRKKGKKFARYQLGDLLLHLEKKHGEDWGKVYDEAWERIDKKVEGLSKHIKLEEERRSEDAQSKAALTDWLRAKASFVIEGLKEADKDEFCRCELKLQKWYGDLRGKPFAIEAENSILDISGFSKQYNCAFIWQKDGVKKLNLYLIINYFKGGKLRFKKIKPEAFEANRFYTVINKKSGEIVPMEVNFNFDDPNLIILPLAFGKRQGREFIWNDLLSLETGSLKLANGRVIEKTLYNRRTRQDEPALFVALTFERREVLDSSNIKPMNLIGVDRGENIPAVIALTDPEGCPLSRFKDSLGNPTHILRIGESYKEKQRTIQAKKEVEQRRAGGYSRKYASKAKNLADDMVRNTARDLLYYAVTQDAMLIFENLSRGFGRQGKRTFMAERQYTRMEDWLTAKLAYEGLPSKTYLSKTLAQYTSKTCSNCGFTITSADYDRVLEKLKKTATGWMTTINGKELKVEGQITYYNRYKRQNVVKDLSVELDRLSEESVNNDISSWTKGRSGNEALSLLKKRFSHRPVQEKFVCLNCGFETHADEQAALNIARSWLFLRSQEYKKYQTNKTTGNTDKRAFVETWQSFYRKKLKEVWKPAV

SEQ ID NO: 44006 - protein, 979 aa, synthetic construct
  REGION 1..979: note = engineered CasX variant
QEIKRINKIRRRLVKDSNTKKAGKTGPMKTLLVRVMTPDLRERLENLRKKPENIPQPISNTSRANLNKLLTDYTEMKKAILHVYWEEFQKDPVGLMSRVAQPASKKIDQNKLKPEMDEKGNLTTAGFACSQCGQPLFVYKLEQVSEKGKAYTNYFGRCNVAEHEKLIKLAQLKPEKDSDEAVTYSLGKFGQRALDFYSIHVTKESTHPVKPLAQIAGNRYASGPVGKALSDACMGTIASFLSKYQDIIIEHQKVVKGNQKRLESLRELAGKENLEYPSVTLPPQPHTKEGVDAYNEVIARVRWWVNLNLWQKLKLSRDDAKPLLRLKGFPSFPLVERQANEVDWWDMVCNVKKLINEKKEDGKVFWQNLAGYKRQEALRPYLSSEEDRKKGKKFARYQLGDLLLHLEKKHGEDWGKVYDEAWERIDKKVEGLSKHIKLEEERRSEDAQSKAALTDWLRAKASFVIEGLKEADKDEFCRCELKLQKWYGDLRGKPFAIEAENSILDISGFSKQYNCAFIWQKDGVKKLNLYLIINYFKGGKLRFKKIKPEAFEANRFYTVINKKSGEIVPMEVNFNFDDPNLIILPLAFGKRQGREFIWNDLLSLETGSLKLANGRVIEKTLYNRRTRQDEPALFVALTFERREVLDSSNIKPMNLIGVDRGENIPAVIALTDPEGCPLSRFKDSLGNPTHILRIGESYKEKQRTIQAKKEVEQRRAGGYSRKYASKAKNLADDMVRNTARDLLYYAVTQDAMLIFENLSRGFGRQGKRTFMAERQYTRMEDWLTAKLAYEGLPSKTYLSKTLAQYTSKTCSNCGFTITSADYDRVLEKLKKTATGWMTTINGKELKVEGQITYYNRYKRQNVVKDLSVELDRLSEESVNNDISSWTKGRSGNEALSLLKKRFSHRPVQEKFVCLNCGFETHADEQAALNIARSWLFLRSQEYKKYQTNKTTGNTDKRAFVETWQSFYRKKLKEVWKPAV

SEQ ID NO: 44007 - protein, 978 aa, synthetic construct
  REGION 1..978: note = engineered CasX variant
QEIKRINKIRRRLVKDSNTKKAGKTGPMKTLLVRVMTPDLRERLENLRKKPENIPQPISNTSRANLNKLLTDYTEMKKAILHVYWEEFQKDPVGLMSRVAQPASKKIDQNKLKPEMDEKGNLTTAGFACSQCGQPLFVYKLEQVSEKGKAYTNYFGRCNVAEHEKLILLAQLKPEKDSDEAVTYSLGKFGQRALDFYSIHVTKESTHPVKPLAQIAGNRYASPVGKALSDACMGTIASFLSKYQDIIIEHQKVVKGNQKRLESLRELAGKENLEYPSVTLPPQPHTKEGVDAYNEVIARVRWWVNLNLWQKLKLSRDDAKPLLRLKGFPSFPLVERQANEVDWWDMVCNVKKLINEKKEDGKVFWQNLAGYKRQEALRPYLSSEEDRKKGKKFARYQLGDLLLHLEKKHGEDWGKVYDEAWERIDKKVEGLSKHIKLEEERRSEDAQSKAALTDWLRAKASFVIEGLKEADKDEFCRCELKLQKWYGDLRGKPFAIEAENSILDISGFSKQYNCAFIWQKDGVKKLNLYLIINYFKGGKLRFKKIKPEAFEANRFYTVINKKSGEIVPMEVNFNFDDPNLIILPLAFGKRQGREFIWNDLLSLETGSLKLANGRVIEKTLYNRRTRQDEPALFVALTFERREVLDSSNIKPMNLIGVDRGENIPAVIALTDPEGCPLSRFKDSLGNPTHILRIGESYKEKQRTIQAKKEVEQRRAGGYSRKYASKAKNLADDMVRNTARDLLYYAVTQDAMLIFENLSRGFGRQGKRTFMAERQYTRMEDWLTAKLAYEGLPSKTYLSKTLAQYTSKTCSNCGFTITSADYDRVLEKLKKTATGWMTTINGKELKVEGQITYYNRYKRQNVVKDLSVELDRLSEESVNNDISSWTKGRSGNEALSLLKKRFSHRPVQEKFVCLNCGFETHADEQAALNIARSWLFLRSQEYKKYQTNKTTGNTDKRAFVETWQSFYRKKLKEVWKPAV

SEQ ID NO: 44008 - protein, 978 aa, synthetic construct
  REGION 1..978: note = engineered CasX variant
QEIKRINKIRRRLVKDSNTKKAGKTGPMKTLLVRVMTPDLRERLENLRKKPENIPQPISNTSRANLNKLLTDYTEMKKAILHVYWEEFQKDPVGLMSRVAQPASKKIDQNKLKPEMDEKGNLTTAGFACSQCGQPLFVYKLEQVSEKGKAYTNYFGRCNVAEHEKLILLAQLKPEKDSDEAVTYSLGKFGQRALDFYSIHVTKESTHPVKPLAQIAGNRYASYPVGKALSDACMGTIASFLSKYQDIIIEHQKVVKGNQKRLESLRELAGKENLEYPSVTLPPQPHTKEGVDAYNEVIARVRWWVNLNLWQKLKLSRDDAKPLLRLKGFPSFPLVERQANEVDWWDMVCNVKKLINEKKEDGKVFWQNLAGYKRQEALRPYLSSEEDRQKGKKFARYQLGDLLLHLEKKHGEDWGKVYDEAWERIDKKVEGLSKHIKLEEERRSEDAQSKAALTDWLRAKASFVIEGLKEADKDEFCRCELKLQKWYGDLRGKPFAIEAENSILDISGFSKQYNCAFIWQKDGVKKLNLYLIINYFKGGKLRFKKIKPEAFEANRFYTVINKKSGEIVPMEVNFNFDDPNLIILPLAFGKRQGREFIWNDLLSLETGSLKLANGRVIEKTLYNRRTRQDEPALFVALTFERREVLDSSNIKPMNLIGVDRGENIPAVIALTDPEGCPLSRFKDSLGNPTHILRIGESYKEKQRTIQAKKEVEQRRAGGYSRKYASKAKNLADDMVRNTARDLLYYAVTQDAMLIFENLSRGFGRQGKRTFMAERQYTRMEDWLTAKLAYEGLPSKTYLSKTLAQYTSKTCSNCGFTITSADYDRVLEKLKKTATGWMTTINGKELKVEGQITYYNRYKRQNVVKDLSVELDRLSEESVNNDISSWTKGRSGEALSLLKKRFSHRPVQEKFVCLNCGFETHADEQAALNIARSWLFLRSQEYKKYQTNKTTGNTDKRAFVETWQSFYRKKLKEVWKPAV

SEQ ID NO: 44009 - protein, 978 aa, synthetic construct
  REGION 1..978: note = engineered CasX variant
QEIKRINKIRRRLVKDSNTKKAGKTGPMKTLLVRVMTPDLRERLENLRKKPENIPQPISNTSRANLNKLLTDYTEMKKAILHVYWEEFQKDPVGLMSRVAQPASKKIDQNKLKPEMDEKGNLTTAGFACSQCGQPLFVYKLEQVSEKGKAYTNYFGRCNVAEHEKLILLAQLKPEKDSDEAVTYSLGKFGQRALDFYSIHVTKESTHPVKPLAQIAGNRYASHPVGKALSDACMGTIASFLSKYQDIIIEHQKVVKGNQKRLESLRELAGKENLEYPSVTLPPQPHTKEGVDAYNEVIARVRWWVNLNLWQKLKLSRDDAKPLLRLKGFPSFPLVERQANEVDWWDMVCNVKKLINEKKEDGKVFWQNLAGYKRQEALRPYLSSEEDRQKGKKFARYQLGDLLLHLEKKHGEDWGKVYDEAWERIDKKVEGLSKHIKLEEERRSEDAQSKAALTDWLRAKASFVIEGLKEADKDEFCRCELKLQKWYGDLRGKPFAIEAENSILDISGFSKQYNCAFIWQKDGVKKLNLYLIINYFKGGKLRFKKIKPEAFEANRFYTVINKKSGEIVPMEVNFNFDDPNLIILPLAFGKRQGREFIWNDLLSLETGSLKLANGRVIEKTLYNRRTRQDEPALFVALTFERREVLDSSNIKPMNLIGVDRGENIPAVIALTDPEGCPLSRFKDSLGNPTHILRIGESYKEKQRTIQAKKEVEQRRAGGYSRKYASKAKNLADDMVRNTARDLLYYAVTQDAMLIFENLSRGFGRQGKRTFMAERQYTRMEDWLTAKLAYEGLPSKTYLSKTLAQYTSKTCSNCGFTITSADYDRVLEKLKKTATGWMTTINGKELKVEGQITYYNRYKRQNVVKDLSVELDRLSEESVNNDISSWTKGRSGEALSLLKKRFSHRPVQEKFVCLNCGFETHADEQAALNIARSWLFLRSQEYKKYQTNKTTGNTDKRAFVETWQSFYRKKLKEVWKPAV

SEQ ID NO: 44010 - protein, 978 aa, synthetic construct
  REGION 1..978: note = engineered CasX variant
QEIKRINKIRRRLVKDSNTKKAGKTGPMKTLLVRVMTPDLRERLENLRKKPENIPQPISNTSRANLNKLLTDYTEMKKAILHVYWEEFQKDPVGLMSRVAQPASKKIDQNKLKPEMDEKGNLTTAGFACSQCGQPLFVYKLEQVSEKGKAYTNYFGRCNVAEHEKLILLAQLKPEKDSDEAVTYSLGKFGQRALDFYSIHVTKESTHPVKPLAQIAGNRYASSPVGKALSDACMGTIASFLSKYQDIIIEHQKVVKGNQKRLESLRELAGKENLEYPSVTLPPQPHTKEGVDAYNEVIARVRWWVNLNLWQKLKLSRDDAKPLLRLKGFPSFPLVERQANEVDWWDMVCNVKKLINEKKEDGKVFWQNLAGYKRQEALRPYLSSEEDRQKGKKFARYQLGDLLLHLEKKHGEDWGKVYDEAWERIDKKVEGLSKHIKLEEERRSEDAQSKAALTDWLRAKASFVIEGLKEADKDEFCRCELKLQKWYGDLRGKPFAIEAENSILDISGFSKQYNCAFIWQKDGVKKLNLYLIINYFKGGKLRFKKIKPEAFEANRFYTVINKKSGEIVPMEVNFNFDDPNLIILPLAFGKRQGREFIWNDLLSLETGSLKLANGRVIEKTLYNRRTRQDEPALFVALTFERREVLDSSNIKPMNLIGVDRGENIPAVIALTDPEGCPLSRFKDSLGNPTHILRIGESYKEKQRTIQAKKEVEQRRAGGYSRKYASKAKNLADDMVRNTARDLLYYAVTQDAMLIFENLSRGFGRQGKRTFMAERQYTRMEDWLTAKLAYEGLPSKTYLSKTLAQYTSKTCSNCGFTITSADYDRVLEKLKKTATGWMTTINGKELKVEGQITYYNRYKRQNVVKDLSVELDRLSEESVNNDISSWTKGRSGEALSLLKKRFSHRPVQEKFVCLNCGFETHADEQAALNIARSWLFLRSQEYKKYQTNKTTGNTDKRAFVETWQSFYRKKLKEVWKPAV

SEQ ID NO: 44011 - protein, 978 aa, synthetic construct
  REGION 1..978: note = engineered CasX variant
QEIKRINKIRRRLVKDSNTKKAGKTGPMKTLLVRVMTPDLRERLENLRKKPENIPQPISNTSRANLNKLLTDYTEMKKAILHVYWEEFQKDPVGLMSRVAQPASKKIDQNKLKPEMDEKGNLTTAGFACSQCGQPLFVYKLEQVSEKGKAYTNYFGRCNVAEHEKLILLAQLKPEKDSDEAVTYSLGKFGQRALDFYSIHVTKESTHPVKPLAQIAGNRYASTPVGKALSDACMGTIASFLSKYQDIIIEHQKVVKGNQKRLESLRELAGKENLEYPSVTLPPQPHTKEGVDAYNEVIARVRWWVNLNLWQKLKLSRDDAKPLLRLKGFPSFPLVERQANEVDWWDMVCNVKKLINEKKEDGKVFWQNLAGYKRQEALRPYLSSEEDRQKGKKFARYQLGDLLLHLEKKHGEDWGKVYDEAWERIDKKVEGLSKHIKLEEERRSEDAQSKAALTDWLRAKASFVIEGLKEADKDEFCRCELKLQKWYGDLRGKPFAIEAENSILDISGFSKQYNCAFIWQKDGVKKLNLYLIINYFKGGKLRFKKIKPEAFEANRFYTVINKKSGEIVPMEVNFNFDDPNLIILPLAFGKRQGREFIWNDLLSLETGSLKLANGRVIEKTLYNRRTRQDEPALFVALTFERREVLDSSNIKPMNLIGVDRGENIPAVIALTDPEGCPLSRFKDSLGNPTHILRIGESYKEKQRTIQAKKEVEQRRAGGYSRKYASKAKNLADDMVRNTARDLLYYAVTQDAMLIFENLSRGFGRQGKRTFMAERQYTRMEDWLTAKLAYEGLPSKTYLSKTLAQYTSKTCSNCGFTITSADYDRVLEKLKKTATGWMTTINGKELKVEGQITYYNRYKRQNVVKDLSVELDRLSEESVNNDISSWTKGRSGEALSLLKKRFSHRPVQEKFVCLNCGFETHADEQAALNIARSWLFLRSQEYKKYQTNKTTGNTDKRAFVETWQSFYRKKLKEVWKPAV

SEQ ID NO: 44012 - protein, 978 aa, synthetic construct
  REGION 1..978: note = engineered CasX variant
QEIKRINKIRRRLVKDSNTKKAGKTGPMKTLLVRVMTPDLRERLENLRKKPENIPQPISNTSRANLNKLLTDYTEMKKAILHVYWEEFQKDPVGLMSRVAQPASKKIDQNKLKPEMDEKGNLTTAGFACSQCGQPLFVYKLEQVSEKGKAYTNYFGRCNVAEHEKLILLAQLKPEKDSDEAVTYSLGKFGQRALDFYSIHVTKESTHPVKPLAQIAGNRYASAPVGKALSDACMGTIASFLSKYQDIIIEHQKVVKGNQKRLESLRELAGKENLEYPSVTLPPQPHTKEGVDAYNEVIARVRWWVNLNLWQKLKLSRDDAKPLLRLKGFPSFPLVERQANEVDWWDMVCNVKKLINEKKEDGKVFWQNLAGYKRQEALRPYLSSEEDRQKGKKFARYQLGDLLLHLEKKHGEDWGKVYDEAWERIDKKVEGLSKHIKLEEERRSEDAQSKAALTDWLRAKASFVIEGLKEADKDEFCRCELKLQKWYGDLRGKPFAIEAENSILDISGFSKQYNCAFIWQKDGVKKLNLYLIINYFKGGKLRFKKIKPEAFEANRFYTVINKKSGEIVPMEVNFNFDDPNLIILPLAFGKRQGREFIWNDLLSLETGSLKLANGRVIEKTLYNRRTRQDEPALFVALTFERREVLDSSNIKPMNLIGVDRGENIPAVIALTDPEGCPLSRFKDSLGNPTHILRIGESYKEKQRTIQAKKEVEQRRAGGYSRKYASKAKNLADDMVRNTARDLLYYAVTQDAMLIFENLSRGFGRQGKRTFMAERQYTRMEDWLTAKLAYEGLPSKTYLSKTLAQYTSKTCSNCGFTITSADYDRVLEKLKKTATGWMTTINGKELKVEGQITYYNRYKRQNVVKDLSVELDRLSEESVNNDISSWTKGRSGEALSLLKKRFSHRPVQEKFVCLNCGFETHADEQAALNIARSWLFLRSQEYKKYQTNKTTGNTDKRAFVETWQSFYRKKLKEVWKPAV

SEQ ID NO: 44013 - protein, 978 aa, synthetic construct
  REGION 1..978: note = engineered CasX variant
QEIKRINKIRRRLVKDSNTKKAGKTGPMKTLLVRVMTPDLRERLENLRKKPENIPQPISNTSRANLNKLLTDYTEMKKAILHVYWEEFQKDPVGLMSRVAQPASKKIDQNKLKPEMDEKGNLTTAGFACSQCGQPLFVYKLEQVSEKGKAYTNYFGRCNVAEHEKLILLAQLKPEKDSDEAVTYSLGKFGQRALDFYSIHVTKESTHPVKPLAQIAGNRYASVPVGKALSDACMGTIASFLSKYQDIIIEHQKVVKGNQKRLESLRELAGKENLEYPSVTLPPQPHTKEGVDAYNEVIARVRWWVNLNLWQKLKLSRDDAKPLLRLKGFPSFPLVERQANEVDWWDMVCNVKKLINEKKEDGKVFWQNLAGYKRQEALRPYLSSEEDRQKGKKFARYQLGDLLLHLEKKHGEDWGKVYDEAWERIDKKVEGLSKHIKLEEERRSEDAQSKAALTDWLRAKASFVIEGLKEADKDEFCRCELKLQKWYGDLRGKPFAIEAENSILDISGFSKQYNCAFIWQKDGVKKLNLYLIINYFKGGKLRFKKIKPEAFEANRFYTVINKKSGEIVPMEVNFNFDDPNLIILPLAFGKRQGREFIWNDLLSLETGSLKLANGRVIEKTLYNRRTRQDEPALFVALTFERREVLDSSNIKPMNLIGVDRGENIPAVIALTDPEGCPLSRFKDSLGNPTHILRIGESYKEKQRTIQAKKEVEQRRAGGYSRKYASKAKNLADDMVRNTARDLLYYAVTQDAMLIFENLSRGFGRQGKRTFMAERQYTRMEDWLTAKLAYEGLPSKTYLSKTLAQYTSKTCSNCGFTITSADYDRVLEKLKKTATGWMTTINGKELKVEGQITYYNRYKRQNVVKDLSVELDRLSEESVNNDISSWTKGRSGEALSLLKKRFSHRPVQEKFVCLNCGFETHADEQAALNIARSWLFLRSQEYKKYQTNKTTGNTDKRAFVETWQSFYRKKLKEVWKPAV

SEQ ID NO: 44014 - protein, 978 aa, synthetic construct
  REGION 1..978: note = engineered CasX variant
QEIKRINKIRRRLVKDSNTKKAGKTGPMKTLLVRVMTPDLRERLENLRKKPENIPQPISNTSRANLNKLLTDYTEMKKAILHVYWEEFQKDPVGLMSRVAQPASKKIDQNKLKPEMDEKGNLTTAGFACSQCGQPLFVYKLEQVSEKGKAYTNYFGRCNVAEHEKLIKLAQLKPEKDSDEAVTYSLGKFGQRALDFYSIHVTKESTHPVKPLAQIAGNRYASGPVGKALSDACMGTIASFLSKYQDIIIEHQKVVKGNQKRLESLRELAGKENLEYPSVTLPPQPHTKEGVDAYNEVIARVRWWVNLNLWQKLKLSRDDAKPLLRLKGFPSFPLVERQANEVDWWDMVCNVKKLINEKKEDGKVFWQNLAGYKRQEALRPYLSSEEDRQKGKKFARYQLGDLLLHLEKKHGEDWGKVYDEAWERIDKKVEGLSKHIKLEEERRSEDAQSKAALTDWLRAKASFVIEGLKEADKDEFCRCELKLQKWYGDLRGKPFAIEAENSILDISGFSKQYNCAFIWQKDGVKKLNLYLIINYFKGGKLRFKKIKPEAFEANRFYTVINKKSGEIVPMEVNFNFDDPNLIILPLAFGKRQGREFIWNDLLSLETGSLKLANGRVIEKTLYNRRTRQDEPALFVALTFERREVLDSSNIKPMNLIGVDRGENIPAVIALTDPEGCPLSRFKDSLGNPTHILRIGESYKEKQRTIQAKKEVEQRRAGGYSRKYASKAKNLADDMVRNTARDLLYYAVTQDAMLIFENLSRGFGRQGKRTFMAERQYTRMEDWLTAKLAYEGLPSKTYLSKTLAQYTSKTCSNCGFTITSADYDRVLEKLKKTATGWMTTINGKELKVEGQITYYNRYKRQNVVKDLSVELDRLSEESVNNDISSWTKGRSGEALSLLKKRFSHRPVQEKFVCLNCGFETHADEQAALNIARSWLFLRSQEYKKYQTNKTTGNTDKRAFVETWQSFYRKKLKEVWKPAV

SEQ ID NO: 44015 - protein, 977 aa, synthetic construct
  REGION 1..977: note = engineered CasX variant
QEIKRINKIRRRLVKDSNTKKAGKTGPMKTLLVRVMTPDLRERLENLRKKPENIPQPISNTSRANLNKLLTDYTEMKKAILHVYWEEFQKDPVGLMSRVAQPASKKIDQNKLKPEMDEKGNLTTAGFACSQCGQPLFVYKLEQVSEKGKAYTNYFGRCNVAEHEKLILLAQLKPEKDSDEAVTYSLGKFGQRALDFYSIHVTKESTHPVKPLAQIAGNRYASPVGKALSDACMGTIASFLSKYQDIIIEHQKVVKGNQKRLESLRELAGKENLEYPSVTLPPQPHTKEGVDAYNEVIARVRWWVNLNLWQKLKLSRDDAKPLLRLKGFPSFPLVERQANEVDWWDMVCNVKKLINEKKEDGKVFWQNLAGYKRQEALRPYLSSEEDRQKGKKFARYQLGDLLLHLEKKHGEDWGKVYDEAWERIDKKVEGLSKHIKLEEERRSEDAQSKAALTDWLRAKASFVIEGLKEADKDEFCRCELKLQKWYGDLRGKPFAIEAENSILDISGFSKQYNCAFIWQKDGVKKLNLYLIINYFKGGKLRFKKIKPEAFEANRFYTVINKKSGEIVPMEVNFNFDDPNLIILPLAFGKRQGREFIWNDLLSLETGSLKLANGRVIEKTLYNRRTRQDEPALFVALTFERREVLDSSNIKPMNLIGVDRGENIPAVIALTDPEGCPLSRFKDSLGNPTHILRIGESYKEKQRTIQAKKEVEQRRAGGYSRKYASKAKNLADDMVRNTARDLLYYAVTQDAMLIFENLSRGFGRQGKRTFMAERQYTRMEDWLTAKLAYEGLPSKTYLSKTLAQYTSKTCSNCGFTITSADYDRVLEKLKKTATGWMTTINGKELKVEGQITYYNRYKRQNVVKDLSVELDRLSEESVNNDISSWTKGRSGEALSLLKKRFSHRPVQEKFVCLNCGFETHADEQAALNIARSWLFLRSQEYKKYQTNKTTGNTDKRAFVETWQSFYRKKLKEVWKPAV

SEQ ID NO: 44016 - protein, 978 aa, synthetic construct
  REGION 1..978: note = engineered CasX variant
QEIKRINKIRRRLVKDSNTKKAGKTGPMKTLLVRVMTPDLRERLENLRKKPENIPQPISNTSRANLNKLLTDYTEMKKAILHVYWEEFQKDPVGLMSRVAQPASKKIDQNKLKPEMDEKGNLTTAGFACSQCGQPLFVYKLEQVSEKGKAYTNYFGRCNVAEHEKLILLAQLKPEKDSDEAVTYSLGKFGQRALDFYSIHVTKESTHPVKPLAQIAGNRYASYPVGKALSDACMGTIASFLSKYQDIIIEHQKVVKGNQKRLESLRELAGKENLEYPSVTLPPQPHTKEGVDAYNEVIARVRWWVNLNLWQKLKLSRDDAKPLLRLKGFPSFPLVERQANEVDWWDMVCNVKKLINEKKEDGKVFWQNLAGYKRQEALRPYLSSEEDRKKGKKFARYQLGDLLLHLEKKHGEDWGKVYDEAWERIDKKVEGLSKHIKLEEERRSEDAQSKAALTDWLRAKASFVIEGLKEADKDEFCRCELKLQKWYGDLRGKPFAIEAENSILDISGFSKQYNCAFIWQKDGVKKLNLYLIINYFKGGKLRFKKIKPEAFEANRFYTVINKKSGEIVPMEVNFNFDDPNLIILPLAFGKRQGREFIWNDLLSLETGSLKLANGRVIEKTLYNRRTRQDEPALFVALTFERREVLDSSNIKPMNLIGVDRGENIPAVIALTDPEGCPLSRFKDSLGNPTHILRIGESYKEKQRTIQAKKEVEQRRAGGYSRKYASKAKNLADDMVRNTARDLLYYAVTQDAMLIFENLSRGFGRQGKRTFMAERQYTRMEDWLTAKLAYEGLPSQTYLSKTLAQYTSKTCSNCGFTITSADYDRVLEKLKKTATGWMTTINGKELKVEGQITYYNRYKRQNVVKDLSVELDRLSEESVNNDISSWTKGRSGEALSLLKKRFSHRPVQEKFVCLNCGFETHADEQAALNIARSWLFLRSQEYKKYQTNKTTGNTDKRAFVETWQSFYRKKLKEVWKPAV

SEQ ID NO: 44017 - protein, 978 aa, synthetic construct
  REGION 1..978: note = engineered CasX variant
QEIKRINKIRRRLVKDSNTKKAGKTGPMKTLLVRVMTPDLRERLENLRKKPENIPQPISNTSRANLNKLLTDYTEMKKAILHVYWEEFQKDPVGLMSRVAQPASKKIDQNKLKPEMDEKGNLTTAGFACSQCGQPLFVYKLEQVSEKGKAYTNYFGRCNVAEHEKLILLAQLKPEKDSDEAVTYSLGKFGQRALDFYSIHVTKESTHPVKPLAQIAGNRYASHPVGKALSDACMGTIASFLSKYQDIIIEHQKVVKGNQKRLESLRELAGKENLEYPSVTLPPQPHTKEGVDAYNEVIARVRWWVNLNLWQKLKLSRDDAKPLLRLKGFPSFPLVERQANEVDWWDMVCNVKKLINEKKEDGKVFWQNLAGYKRQEALRPYLSSEEDRKKGKKFARYQLGDLLLHLEKKHGEDWGKVYDEAWERIDKKVEGLSKHIKLEEERRSEDAQSKAALTDWLRAKASFVIEGLKEADKDEFCRCELKLQKWYGDLRGKPFAIEAENSILDISGFSKQYNCAFIWQKDGVKKLNLYLIINYFKGGKLRFKKIKPEAFEANRFYTVINKKSGEIVPMEVNFNFDDPNLIILPLAFGKRQGREFIWNDLLSLETGSLKLANGRVIEKTLYNRRTRQDEPALFVALTFERREVLDSSNIKPMNLIGVDRGENIPAVIALTDPEGCPLSRFKDSLGNPTHILRIGESYKEKQRTIQAKKEVEQRRAGGYSRKYASKAKNLADDMVRNTARDLLYYAVTQDAMLIFENLSRGFGRQGKRTFMAERQYTRMEDWLTAKLAYEGLPSQTYLSKTLAQYTSKTCSNCGFTITSADYDRVLEKLKKTATGWMTTINGKELKVEGQITYYNRYKRQNVVKDLSVELDRLSEESVNNDISSWTKGRSGEALSLLKKRFSHRPVQEKFVCLNCGFETHADEQAALNIARSWLFLRSQEYKKYQTNKTTGNTDKRAFVETWQSFYRKKLKEVWKPAV

SEQ ID NO: 44018 - protein, 978 aa, synthetic construct
  REGION 1..978: note = engineered CasX variant
QEIKRINKIRRRLVKDSNTKKAGKTGPMKTLLVRVMTPDLRERLENLRKKPENIPQPISNTSRANLNKLLTDYTEMKKAILHVYWEEFQKDPVGLMSRVAQPASKKIDQNKLKPEMDEKGNLTTAGFACSQCGQPLFVYKLEQVSEKGKAYTNYFGRCNVAEHEKLILLAQLKPEKDSDEAVTYSLGKFGQRALDFYSIHVTKESTHPVKPLAQIAGNRYASSPVGKALSDACMGTIASFLSKYQDIIIEHQKVVKGNQKRLESLRELAGKENLEYPSVTLPPQPHTKEGVDAYNEVIARVRWWVNLNLWQKLKLSRDDAKPLLRLKGFPSFPLVERQANEVDWWDMVCNVKKLINEKKEDGKVFWQNLAGYKRQEALRPYLSSEEDRKKGKKFARYQLGDLLLHLEKKHGEDWGKVYDEAWERIDKKVEGLSKHIKLEEERRSEDAQSKAALTDWLRAKASFVIEGLKEADKDEFCRCELKLQKWYGDLRGKPFAIEAENSILDISGFSKQYNCAFIWQKDGVKKLNLYLIINYFKGGKLRFKKIKPEAFEANRFYTVINKKSGEIVPMEVNFNFDDPNLIILPLAFGKRQGREFIWNDLLSLETGSLKLANGRVIEKTLYNRRTRQDEPALFVALTFERREVLDSSNIKPMNLIGVDRGENIPAVIALTDPEGCPLSRFKDSLGNPTHILRIGESYKEKQRTIQAKKEVEQRRAGGYSRKYASKAKNLADDMVRNTARDLLYYAVTQDAMLIFENLSRGFGRQGKRTFMAERQYTRMEDWLTAKLAYEGLPSQTYLSKTLAQYTSKTCSNCGFTITSADYDRVLEKLKKTATGWMTTINGKELKVEGQITYYNRYKRQNVVKDLSVELDRLSEESVNNDISSWTKGRSGEALSLLKKRFSHRPVQEKFVCLNCGFETHADEQAALNIARSWLFLRSQEYKKYQTNKTTGNTDKRAFVETWQSFYRKKLKEVWKPAV

SEQ ID NO: 44019 - protein, 978 aa, synthetic construct
  REGION 1..978: note = engineered CasX variant
QEIKRINKIRRRLVKDSNTKKAGKTGPMKTLLVRVMTPDLRERLENLRKKPENIPQPISNTSRANLNKLLTDYTEMKKAILHVYWEEFQKDPVGLMSRVAQPASKKIDQNKLKPEMDEKGNLTTAGFACSQCGQPLFVYKLEQVSEKGKAYTNYFGRCNVAEHEKLILLAQLKPEKDSDEAVTYSLGKFGQRALDFYSIHVTKESTHPVKPLAQIAGNRYASTPVGKALSDACMGTIASFLSKYQDIIIEHQKVVKGNQKRLESLRELAGKENLEYPSVTLPPQPHTKEGVDAYNEVIARVRWWVNLNLWQKLKLSRDDAKPLLRLKGFPSFPLVERQANEVDWWDMVCNVKKLINEKKEDGKVFWQNLAGYKRQEALRPYLSSEEDRKKGKKFARYQLGDLLLHLEKKHGEDWGKVYDEAWERIDKKVEGLSKHIKLEEERRSEDAQSKAALTDWLRAKASFVIEGLKEADKDEFCRCELKLQKWYGDLRGKPFAIEAENSILDISGFSKQYNCAFIWQKDGVKKLNLYLIINYFKGGKLRFKKIKPEAFEANRFYTVINKKSGEIVPMEVNFNFDDPNLIILPLAFGKRQGREFIWNDLLSLETGSLKLANGRVIEKTLYNRRTRQDEPALFVALTFERREVLDSSNIKPMNLIGVDRGENIPAVIALTDPEGCPLSRFKDSLGNPTHILRIGESYKEKQRTIQAKKEVEQRRAGGYSRKYASKAKNLADDMVRNTARDLLYYAVTQDAMLIFENLSRGFGRQGKRTFMAERQYTRMEDWLTAKLAYEGLPSQTYLSKTLAQYTSKTCSNCGFTITSADYDRVLEKLKKTATGWMTTINGKELKVEGQITYYNRYKRQNVVKDLSVELDRLSEESVNNDISSWTKGRSGEALSLLKKRFSHRPVQEKFVCLNCGFETHADEQAALNIARSWLFLRSQEYKKYQTNKTTGNTDKRAFVETWQSFYRKKLKEVWKPAV

SEQ ID NO: 44020 - protein, 978 aa, synthetic construct
  REGION 1..978: note = engineered CasX variant
QEIKRINKIRRRLVKDSNTKKAGKTGPMKTLLVRVMTPDLRERLENLRKKPENIPQPISNTSRANLNKLLTDYTEMKKAILHVYWEEFQKDPVGLMSRVAQPASKKIDQNKLKPEMDEKGNLTTAGFACSQCGQPLFVYKLEQVSEKGKAYTNYFGRCNVAEHEKLILLAQLKPEKDSDEAVTYSLGKFGQRALDFYSIHVTKESTHPVKPLAQIAGNRYASAPVGKALSDACMGTIASFLSKYQDIIIEHQKVVKGNQKRLESLRELAGKENLEYPSVTLPPQPHTKEGVDAYNEVIARVRWWVNLNLWQKLKLSRDDAKPLLRLKGFPSFPLVERQANEVDWWDMVCNVKKLINEKKEDGKVFWQNLAGYKRQEALRPYLSSEEDRKKGKKFARYQLGDLLLHLEKKHGEDWGKVYDEAWERIDKKVEGLSKHIKLEEERRSEDAQSKAALTDWLRAKASFVIEGLKEADKDEFCRCELKLQKWYGDLRGKPFAIEAENSILDISGFSKQYNCAFIWQKDGVKKLNLYLIINYFKGGKLRFKKIKPEAFEANRFYTVINKKSGEIVPMEVNFNFDDPNLIILPLAFGKRQGREFIWNDLLSLETGSLKLANGRVIEKTLYNRRTRQDEPALFVALTFERREVLDSSNIKPMNLIGVDRGENIPAVIALTDPEGCPLSRFKDSLGNPTHILRIGESYKEKQRTIQAKKEVEQRRAGGYSRKYASKAKNLADDMVRNTARDLLYYAVTQDAMLIFENLSRGFGRQGKRTFMAERQYTRMEDWLTAKLAYEGLPSQTYLSKTLAQYTSKTCSNCGFTITSADYDRVLEKLKKTATGWMTTINGKELKVEGQITYYNRYKRQNVVKDLSVELDRLSEESVNNDISSWTKGRSGEALSLLKKRFSHRPVQEKFVCLNCGFETHADEQAALNIARSWLFLRSQEYKKYQTNKTTGNTDKRAFVETWQSFYRKKLKEVWKPAV

SEQ ID NO: 44021 - protein, 978 aa, synthetic construct
  REGION 1..978: note = engineered CasX variant
QEIKRINKIRRRLVKDSNTKKAGKTGPMKTLLVRVMTPDLRERLENLRKKPENIPQPISNTSRANLNKLLTDYTEMKKAILHVYWEEFQKDPVGLMSRVAQPASKKIDQNKLKPEMDEKGNLTTAGFACSQCGQPLFVYKLEQVSEKGKAYTNYFGRCNVAEHEKLILLAQLKPEKDSDEAVTYSLGKFGQRALDFYSIHVTKESTHPVKPLAQIAGNRYASVPVGKALSDACMGTIASFLSKYQDIIIEHQKVVKGNQKRLESLRELAGKENLEYPSVTLPPQPHTKEGVDAYNEVIARVRWWVNLNLWQKLKLSRDDAKPLLRLKGFPSFPLVERQANEVDWWDMVCNVKKLINEKKEDGKVFWQNLAGYKRQEALRPYLSSEEDRKKGKKFARYQLGDLLLHLEKKHGEDWGKVYDEAWERIDKKVEGLSKHIKLEEERRSEDAQSKAALTDWLRAKASFVIEGLKEADKDEFCRCELKLQKWYGDLRGKPFAIEAENSILDISGFSKQYNCAFIWQKDGVKKLNLYLIINYFKGGKLRFKKIKPEAFEANRFYTVINKKSGEIVPMEVNFNFDDPNLIILPLAFGKRQGREFIWNDLLSLETGSLKLANGRVIEKTLYNRRTRQDEPALFVALTFERREVLDSSNIKPMNLIGVDRGENIPAVIALTDPEGCPLSRFKDSLGNPTHILRIGESYKEKQRTIQAKKEVEQRRAGGYSRKYASKAKNLADDMVRNTARDLLYYAVTQDAMLIFENLSRGFGRQGKRTFMAERQYTRMEDWLTAKLAYEGLPSQTYLSKTLAQYTSKTCSNCGFTITSADYDRVLEKLKKTATGWMTTINGKELKVEGQITYYNRYKRQNVVKDLSVELDRLSEESVNNDISSWTKGRSGEALSLLKKRFSHRPVQEKFVCLNCGFETHADEQAALNIARSWLFLRSQEYKKYQTNKTTGNTDKRAFVETWQSFYRKKLKEVWKPAV

SEQ ID NO: 44022 - protein, 978 aa, synthetic construct
  REGION 1..978: note = engineered CasX variant
QEIKRINKIRRRLVKDSNTKKAGKTGPMKTLLVRVMTPDLRERLENLRKKPENIPQPISNTSRANLNKLLTDYTEMKKAILHVYWEEFQKDPVGLMSRVAQPASKKIDQNKLKPEMDEKGNLTTAGFACSQCGQPLFVYKLEQVSEKGKAYTNYFGRCNVAEHEKLIKLAQLKPEKDSDEAVTYSLGKFGQRALDFYSIHVTKESTHPVKPLAQIAGNRYASGPVGKALSDACMGTIASFLSKYQDIIIEHQKVVKGNQKRLESLRELAGKENLEYPSVTLPPQPHTKEGVDAYNEVIARVRWWVNLNLWQKLKLSRDDAKPLLRLKGFPSFPLVERQANEVDWWDMVCNVKKLINEKKEDGKVFWQNLAGYKRQEALRPYLSSEEDRKKGKKFARYQLGDLLLHLEKKHGEDWGKVYDEAWERIDKKVEGLSKHIKLEEERRSEDAQSKAALTDWLRAKASFVIEGLKEADKDEFCRCELKLQKWYGDLRGKPFAIEAENSILDISGFSKQYNCAFIWQKDGVKKLNLYLIINYFKGGKLRFKKIKPEAFEANRFYTVINKKSGEIVPMEVNFNFDDPNLIILPLAFGKRQGREFIWNDLLSLETGSLKLANGRVIEKTLYNRRTRQDEPALFVALTFERREVLDSSNIKPMNLIGVDRGENIPAVIALTDPEGCPLSRFKDSLGNPTHILRIGESYKEKQRTIQAKKEVEQRRAGGYSRKYASKAKNLADDMVRNTARDLLYYAVTQDAMLIFENLSRGFGRQGKRTFMAERQYTRMEDWLTAKLAYEGLPSQTYLSKTLAQYTSKTCSNCGFTITSADYDRVLEKLKKTATGWMTTINGKELKVEGQITYYNRYKRQNVVKDLSVELDRLSEESVNNDISSWTKGRSGEALSLLKKRFSHRPVQEKFVCLNCGFETHADEQAALNIARSWLFLRSQEYKKYQTNKTTGNTDKRAFVETWQSFYRKKLKEVWKPAV

SEQ ID NO: 44023 - protein, 977 aa, synthetic construct
  REGION 1..977: note = engineered CasX variant
QEIKRINKIRRRLVKDSNTKKAGKTGPMKTLLVRVMTPDLRERLENLRKKPENIPQPISNTSRANLNKLLTDYTEMKKAILHVYWEEFQKDPVGLMSRVAQPASKKIDQNKLKPEMDEKGNLTTAGFACSQCGQPLFVYKLEQVSEKGKAYTNYFGRCNVAEHEKLILLAQLKPEKDSDEAVTYSLGKFGQRALDFYSIHVTKESTHPVKPLAQIAGNRYASPVGKALSDACMGTIASFLSKYQDIIIEHQKVVKGNQKRLESLRELAGKENLEYPSVTLPPQPHTKEGVDAYNEVIARVRWWVNLNLWQKLKLSRDDAKPLLRLKGFPSFPLVERQANEVDWWDMVCNVKKLINEKKEDGKVFWQNLAGYKRQEALRPYLSSEEDRKKGKKFARYQLGDLLLHLEKKHGEDWGKVYDEAWERIDKKVEGLSKHIKLEEERRSEDAQSKAALTDWLRAKASFVIEGLKEADKDEFCRCELKLQKWYGDLRGKPFAIEAENSILDISGFSKQYNCAFIWQKDGVKKLNLYLIINYFKGGKLRFKKIKPEAFEANRFYTVINKKSGEIVPMEVNFNFDDPNLIILPLAFGKRQGREFIWNDLLSLETGSLKLANGRVIEKTLYNRRTRQDEPALFVALTFERREVLDSSNIKPMNLIGVDRGENIPAVIALTDPEGCPLSRFKDSLGNPTHILRIGESYKEKQRTIQAKKEVEQRRAGGYSRKYASKAKNLADDMVRNTARDLLYYAVTQDAMLIFENLSRGFGRQGKRTFMAERQYTRMEDWLTAKLAYEGLPSQTYLSKTLAQYTSKTCSNCGFTITSADYDRVLEKLKKTATGWMTTINGKELKVEGQITYYNRYKRQNVVKDLSVELDRLSEESVNNDISSWTKGRSGEALSLLKKRFSHRPVQEKFVCLNCGFETHADEQAALNIARSWLFLRSQEYKKYQTNKTTGNTDKRAFVETWQSFYRKKLKEVWKPAV

SEQ ID NO: 44024 - protein, 978 aa, synthetic construct
  REGION 1..978: note = engineered CasX variant
QEIKRINKIRRRLVKDSNTKKAGKTGPMKTLLVRVMTPDLRERLENLRKKPENIPQPISNTSRANLNKLLTDYTEMKKAILHVYWEEFQKDPVGLMSRVAQPASKKIDQNKLKPEMDEKGNLTTAGFACSQCGQPLFVYKLEQVSEKGKAYTNYFGRCNVAEHEKLILLAQLKPEKDSDEAVTYSLGKFGQRALDFYSIHVTKESTHPVKPLAQIAGNRYASYPVGKALSDACMGTIASFLSKYQDIIIEHQKVVKGNQKRLESLRELAGKENLEYPSVTLPPQPHTKEGVDAYNEVIARVRWWVNLNLWQKLKLSRDDAKPLLRLKGFPSFPLVERQANEVDWWDMVCNVKKLINEKKEDGKVFWQNLAGYKRQEALRPYLSSEEDRKKGKKFARYQLGDLLLHLEKKHGEDWGKVYDEAWERIDKKVEGLSKHIKLEEERRSEDAQSKAALTDWLRAKASFVIEGLKEADKDEFCRCELKLQKWYGDLRGKPFAIEAENSILDISGFSKQYNCAFIWQKDGVKKLNLYLIINYFKGGKLRFKKIKPEAFEANRFYTVINKKSGEIVPMEVNFNFDDPNLIILPLAFGKRQGREFIWNDLLSLETGSLKLANGRVIEKTLYNRRTRQDEPALFVALTFERREVLDSSNIKPMNLIGVDRGENIPAVIALTDPEGCPLSRFKDSLGNPTHILRIGESYKEKQRTIQAKKEVEQRRAGGYSRKYASKAKNLADDMVRNTARDLLYYAVTQDAMLIFENLSRGFGRQGKRTFMAERQYTRMEDWLTAKLAYNGLPSKTYLSKTLAQYTSKTCSNCGFTITSADYDRVLEKLKKTATGWMTTINGKELKVEGQITYYNRYKRQNVVKDLSVELDRLSEESVNNDISSWTKGRSGEALSLLKKRFSHRPVQEKFVCLNCGFETHADEQAALNIARSWLFLRSQEYKKYQTNKTTGNTDKRAFVETWQSFYRKKLKEVWKPAV

SEQ ID NO: 44025 - protein, 978 aa, synthetic construct
  REGION 1..978: note = engineered CasX variant
QEIKRINKIRRRLVKDSNTKKAGKTGPMKTLLVRVMTPDLRERLENLRKKPENIPQPISNTSRANLNKLLTDYTEMKKAILHVYWEEFQKDPVGLMSRVAQPASKKIDQNKLKPEMDEKGNLTTAGFACSQCGQPLFVYKLEQVSEKGKAYTNYFGRCNVAEHEKLILLAQLKPEKDSDEAVTYSLGKFGQRALDFYSIHVTKESTHPVKPLAQIAGNRYASHPVGKALSDACMGTIASFLSKYQDIIIEHQKVVKGNQKRLESLRELAGKENLEYPSVTLPPQPHTKEGVDAYNEVIARVRWWVNLNLWQKLKLSRDDAKPLLRLKGFPSFPLVERQANEVDWWDMVCNVKKLINEKKEDGKVFWQNLAGYKRQEALRPYLSSEEDRKKGKKFARYQLGDLLLHLEKKHGEDWGKVYDEAWERIDKKVEGLSKHIKLEEERRSEDAQSKAALTDWLRAKASFVIEGLKEADKDEFCRCELKLQKWYGDLRGKPFAIEAENSILDISGFSKQYNCAFIWQKDGVKKLNLYLIINYFKGGKLRFKKIKPEAFEANRFYTVINKKSGEIVPMEVNFNFDDPNLIILPLAFGKRQGREFIWNDLLSLETGSLKLANGRVIEKTLYNRRTRQDEPALFVALTFERREVLDSSNIKPMNLIGVDRGENIPAVIALTDPEGCPLSRFKDSLGNPTHILRIGESYKEKQRTIQAKKEVEQRRAGGYSRKYASKAKNLADDMVRNTARDLLYYAVTQDAMLIFENLSRGFGRQGKRTFMAERQYTRMEDWLTAKLAYNGLPSKTYLSKTLAQYTSKTCSNCGFTITSADYDRVLEKLKKTATGWMTTINGKELKVEGQITYYNRYKRQNVVKDLSVELDRLSEESVNNDISSWTKGRSGEALSLLKKRFSHRPVQEKFVCLNCGFETHADEQAALNIARSWLFLRSQEYKKYQTNKTTGNTDKRAFVETWQSFYRKKLKEVWKPAV

SEQ ID NO: 44026 - protein, 978 aa, synthetic construct
  REGION 1..978: note = engineered CasX variant
QEIKRINKIRRRLVKDSNTKKAGKTGPMKTLLVRVMTPDLRERLENLRKKPENIPQPISNTSRANLNKLLTDYTEMKKAILHVYWEEFQKDPVGLMSRVAQPASKKIDQNKLKPEMDEKGNLTTAGFACSQCGQPLFVYKLEQVSEKGKAYTNYFGRCNVAEHEKLILLAQLKPEKDSDEAVTYSLGKFGQRALDFYSIHVTKESTHPVKPLAQIAGNRYASSPVGKALSDACMGTIASFLSKYQDIIIEHQKVVKGNQKRLESLRELAGKENLEYPSVTLPPQPHTKEGVDAYNEVIARVRWWVNLNLWQKLKLSRDDAKPLLRLKGFPSFPLVERQANEVDWWDMVCNVKKLINEKKEDGKVFWQNLAGYKRQEALRPYLSSEEDRKKGKKFARYQLGDLLLHLEKKHGEDWGKVYDEAWERIDKKVEGLSKHIKLEEERRSEDAQSKAALTDWLRAKASFVIEGLKEADKDEFCRCELKLQKWYGDLRGKPFAIEAENSILDISGFSKQYNCAFIWQKDGVKKLNLYLIINYFKGGKLRFKKIKPEAFEANRFYTVINKKSGEIVPMEVNFNFDDPNLIILPLAFGKRQGREFIWNDLLSLETGSLKLANGRVIEKTLYNRRTRQDEPALFVALTFERREVLDSSNIKPMNLIGVDRGENIPAVIALTDPEGCPLSRFKDSLGNPTHILRIGESYKEKQRTIQAKKEVEQRRAGGYSRKYASKAKNLADDMVRNTARDLLYYAVTQDAMLIFENLSRGFGRQGKRTFMAERQYTRMEDWLTAKLAYNGLPSKTYLSKTLAQYTSKTCSNCGFTITSADYDRVLEKLKKTATGWMTTINGKELKVEGQITYYNRYKRQNVVKDLSVELDRLSEESVNNDISSWTKGRSGEALSLLKKRFSHRPVQEKFVCLNCGFETHADEQAALNIARSWLFLRSQEYKKYQTNKTTGNTDKRAFVETWQSFYRKKLKEVWKPAV

SEQ ID NO: 44027 - protein, 978 aa, synthetic construct
  REGION 1..978: note = engineered CasX variant
QEIKRINKIRRRLVKDSNTKKAGKTGPMKTLLVRVMTPDLRERLENLRKKPENIPQPISNTSRANLNKLLTDYTEMKKAILHVYWEEFQKDPVGLMSRVAQPASKKIDQNKLKPEMDEKGNLTTAGFACSQCGQPLFVYKLEQVSEKGKAYTNYFGRCNVAEHEKLILLAQLKPEKDSDEAVTYSLGKFGQRALDFYSIHVTKESTHPVKPLAQIAGNRYASTPVGKALSDACMGTIASFLSKYQDIIIEHQKVVKGNQKRLESLRELAGKENLEYPSVTLPPQPHTKEGVDAYNEVIARVRWWVNLNLWQKLKLSRDDAKPLLRLKGFPSFPLVERQANEVDWWDMVCNVKKLINEKKEDGKVFWQNLAGYKRQEALRPYLSSEEDRKKGKKFARYQLGDLLLHLEKKHGEDWGKVYDEAWERIDKKVEGLSKHIKLEEERRSEDAQSKAALTDWLRAKASFVIEGLKEADKDEFCRCELKLQKWYGDLRGKPFAIEAENSILDISGFSKQYNCAFIWQKDGVKKLNLYLIINYFKGGKLRFKKIKPEAFEANRFYTVINKKSGEIVPMEVNFNFDDPNLIILPLAFGKRQGREFIWNDLLSLETGSLKLANGRVIEKTLYNRRTRQDEPALFVALTFERREVLDSSNIKPMNLIGVDRGENIPAVIALTDPEGCPLSRFKDSLGNPTHILRIGESYKEKQRTIQAKKEVEQRRAGGYSRKYASKAKNLADDMVRNTARDLLYYAVTQDAMLIFENLSRGFGRQGKRTFMAERQYTRMEDWLTAKLAYNGLPSKTYLSKTLAQYTSKTCSNCGFTITSADYDRVLEKLKKTATGWMTTINGKELKVEGQITYYNRYKRQNVVKDLSVELDRLSEESVNNDISSWTKGRSGEALSLLKKRFSHRPVQEKFVCLNCGFETHADEQAALNIARSWLFLRSQEYKKYQTNKTTGNTDKRAFVETWQSFYRKKLKEVWKPAV

SEQ ID NO: 44028 - protein, 978 aa, synthetic construct
  REGION 1..978: note = engineered CasX variant
QEIKRINKIRRRLVKDSNTKKAGKTGPMKTLLVRVMTPDLRERLENLRKKPENIPQPISNTSRANLNKLLTDYTEMKKAILHVYWEEFQKDPVGLMSRVAQPASKKIDQNKLKPEMDEKGNLTTAGFACSQCGQPLFVYKLEQVSEKGKAYTNYFGRCNVAEHEKLILLAQLKPEKDSDEAVTYSLGKFGQRALDFYSIHVTKESTHPVKPLAQIAGNRYASAPVGKALSDACMGTIASFLSKYQDIIIEHQKVVKGNQKRLESLRELAGKENLEYPSVTLPPQPHTKEGVDAYNEVIARVRWWVNLNLWQKLKLSRDDAKPLLRLKGFPSFPLVERQANEVDWWDMVCNVKKLINEKKEDGKVFWQNLAGYKRQEALRPYLSSEEDRKKGKKFARYQLGDLLLHLEKKHGEDWGKVYDEAWERIDKKVEGLSKHIKLEEERRSEDAQSKAALTDWLRAKASFVIEGLKEADKDEFCRCELKLQKWYGDLRGKPFAIEAENSILDISGFSKQYNCAFIWQKDGVKKLNLYLIINYFKGGKLRFKKIKPEAFEANRFYTVINKKSGEIVPMEVNFNFDDPNLIILPLAFGKRQGREFIWNDLLSLETGSLKLANGRVIEKTLYNRRTRQDEPALFVALTFERREVLDSSNIKPMNLIGVDRGENIPAVIALTDPEGCPLSRFKDSLGNPTHILRIGESYKEKQRTIQAKKEVEQRRAGGYSRKYASKAKNLADDMVRNTARDLLYYAVTQDAMLIFENLSRGFGRQGKRTFMAERQYTRMEDWLTAKLAYNGLPSKTYLSKTLAQYTSKTCSNCGFTITSADYDRVLEKLKKTATGWMTTINGKELKVEGQITYYNRYKRQNVVKDLSVELDRLSEESVNNDISSWTKGRSGEALSLLKKRFSHRPVQEKFVCLNCGFETHADEQAALNIARSWLFLRSQEYKKYQTNKTTGNTDKRAFVETWQSFYRKKLKEVWKPAV

SEQ ID NO: 44029 - protein, 978 aa, synthetic construct
  REGION 1..978: note = engineered CasX variant
QEIKRINKIRRRLVKDSNTKKAGKTGPMKTLLVRVMTPDLRERLENLRKKPENIPQPISNTSRANLNKLLTDYTEMKKAILHVYWEEFQKDPVGLMSRVAQPASKKIDQNKLKPEMDEKGNLTTAGFACSQCGQPLFVYKLEQVSEKGKAYTNYFGRCNVAEHEKLILLAQLKPEKDSDEAVTYSLGKFGQRALDFYSIHVTKESTHPVKPLAQIAGNRYASVPVGKALSDACMGTIASFLSKYQDIIIEHQKVVKGNQKRLESLRELAGKENLEYPSVTLPPQPHTKEGVDAYNEVIARVRWWVNLNLWQKLKLSRDDAKPLLRLKGFPSFPLVERQANEVDWWDMVCNVKKLINEKKEDGKVFWQNLAGYKRQEALRPYLSSEEDRKKGKKFARYQLGDLLLHLEKKHGEDWGKVYDEAWERIDKKVEGLSKHIKLEEERRSEDAQSKAALTDWLRAKASFVIEGLKEADKDEFCRCELKLQKWYGDLRGKPFAIEAENSILDISGFSKQYNCAFIWQKDGVKKLNLYLIINYFKGGKLRFKKIKPEAFEANRFYTVINKKSGEIVPMEVNFNFDDPNLIILPLAFGKRQGREFIWNDLLSLETGSLKLANGRVIEKTLYNRRTRQDEPALFVALTFERREVLDSSNIKPMNLIGVDRGENIPAVIALTDPEGCPLSRFKDSLGNPTHILRIGESYKEKQRTIQAKKEVEQRRAGGYSRKYASKAKNLADDMVRNTARDLLYYAVTQDAMLIFENLSRGFGRQGKRTFMAERQYTRMEDWLTAKLAYNGLPSKTYLSKTLAQYTSKTCSNCGFTITSADYDRVLEKLKKTATGWMTTINGKELKVEGQITYYNRYKRQNVVKDLSVELDRLSEESVNNDISSWTKGRSGEALSLLKKRFSHRPVQEKFVCLNCGFETHADEQAALNIARSWLFLRSQEYKKYQTNKTTGNTDKRAFVETWQSFYRKKLKEVWKPAV

SEQ ID NO: 44030 - protein, 978 aa, synthetic construct
  REGION 1..978: note = engineered CasX variant
QEIKRINKIRRRLVKDSNTKKAGKTGPMKTLLVRVMTPDLRERLENLRKKPENIPQPISNTSRANLNKLLTDYTEMKKAILHVYWEEFQKDPVGLMSRVAQPASKKIDQNKLKPEMDEKGNLTTAGFACSQCGQPLFVYKLEQVSEKGKAYTNYFGRCNVAEHEKLIKLAQLKPEKDSDEAVTYSLGKFGQRALDFYSIHVTKESTHPVKPLAQIAGNRYASGPVGKALSDACMGTIASFLSKYQDIIIEHQKVVKGNQKRLESLRELAGKENLEYPSVTLPPQPHTKEGVDAYNEVIARVRWWVNLNLWQKLKLSRDDAKPLLRLKGFPSFPLVERQANEVDWWDMVCNVKKLINEKKEDGKVFWQNLAGYKRQEALRPYLSSEEDRKKGKKFARYQLGDLLLHLEKKHGEDWGKVYDEAWERIDKKVEGLSKHIKLEEERRSEDAQSKAALTDWLRAKASFVIEGLKEADKDEFCRCELKLQKWYGDLRGKPFAIEAENSILDISGFSKQYNCAFIWQKDGVKKLNLYLIINYFKGGKLRFKKIKPEAFEANRFYTVINKKSGEIVPMEVNFNFDDPNLIILPLAFGKRQGREFIWNDLLSLETGSLKLANGRVIEKTLYNRRTRQDEPALFVALTFERREVLDSSNIKPMNLIGVDRGENIPAVIALTDPEGCPLSRFKDSLGNPTHILRIGESYKEKQRTIQAKKEVEQRRAGGYSRKYASKAKNLADDMVRNTARDLLYYAVTQDAMLIFENLSRGFGRQGKRTFMAERQYTRMEDWLTAKLAYNGLPSKTYLSKTLAQYTSKTCSNCGFTITSADYDRVLEKLKKTATGWMTTINGKELKVEGQITYYNRYKRQNVVKDLSVELDRLSEESVNNDISSWTKGRSGEALSLLKKRFSHRPVQEKFVCLNCGFETHADEQAALNIARSWLFLRSQEYKKYQTNKTTGNTDKRAFVETWQSFYRKKLKEVWKPAV

SEQ ID NO: 44031 - protein, 977 aa, synthetic construct
  REGION 1..977: note = engineered CasX variant
QEIKRINKIRRRLVKDSNTKKAGKTGPMKTLLVRVMTPDLRERLENLRKKPENIPQPISNTSRANLNKLLTDYTEMKKAILHVYWEEFQKDPVGLMSRVAQPASKKIDQNKLKPEMDEKGNLTTAGFACSQCGQPLFVYKLEQVSEKGKAYTNYFGRCNVAEHEKLILLAQLKPEKDSDEAVTYSLGKFGQRALDFYSIHVTKESTHPVKPLAQIAGNRYASPVGKALSDACMGTIASFLSKYQDIIIEHQKVVKGNQKRLESLRELAGKENLEYPSVTLPPQPHTKEGVDAYNEVIARVRWWVNLNLWQKLKLSRDDAKPLLRLKGFPSFPLVERQANEVDWWDMVCNVKKLINEKKEDGKVFWQNLAGYKRQEALRPYLSSEEDRKKGKKFARYQLGDLLLHLEKKHGEDWGKVYDEAWERIDKKVEGLSKHIKLEEERRSEDAQSKAALTDWLRAKASFVIEGLKEADKDEFCRCELKLQKWYGDLRGKPFAIEAENSILDISGFSKQYNCAFIWQKDGVKKLNLYLIINYFKGGKLRFKKIKPEAFEANRFYTVINKKSGEIVPMEVNFNFDDPNLIILPLAFGKRQGREFIWNDLLSLETGSLKLANGRVIEKTLYNRRTRQDEPALFVALTFERREVLDSSNIKPMNLIGVDRGENIPAVIALTDPEGCPLSRFKDSLGNPTHILRIGESYKEKQRTIQAKKEVEQRRAGGYSRKYASKAKNLADDMVRNTARDLLYYAVTQDAMLIFENLSRGFGRQGKRTFMAERQYTRMEDWLTAKLAYNGLPSKTYLSKTLAQYTSKTCSNCGFTITSADYDRVLEKLKKTATGWMTTINGKELKVEGQITYYNRYKRQNVVKDLSVELDRLSEESVNNDISSWTKGRSGEALSLLKKRFSHRPVQEKFVCLNCGFETHADEQAALNIARSWLFLRSQEYKKYQTNKTTGNTDKRAFVETWQSFYRKKLKEVWKPAV

SEQ ID NO: 44032 - protein, 978 aa, synthetic construct
  REGION 1..978: note = engineered CasX variant
QEIKRINKIRRRLVKDSNTKKAGKTGPMKTLLVRVMTPDLRERLENLRKKPENIPQPISNTSRANLNKLLTDYTEMKKAILHVYWEEFQKDPVGLMSRVAQPASKKIDQNKLKPEMDEKGNLTTAGFACSQCGQPLFVYKLEQVSEKGKAYTNYFGRCNVAEHEKLIQLAQLKPEKDSDEAVTYSLGKFGQRALDFYSIHVTKESTHPVKPLAQIAGNRYASYPVGKALSDACMGTIASFLSKYQDIIIEHQKVVKGNQKRLESLRELAGKENLEYPSVTLPPQPHTKEGVDAYNEVIARVRWWVNLNLWQKLKLSRDDAKPLLRLKGFPSFPLVERQANEVDWWDMVCNVKKLINEKKEDGKVFWQNLAGYKRQEALRPYLSSEEDRKKGKKFARYQLGDLLLHLEKKHGEDWGKVYDEAWERIDKKVEGLSKHIKLEEERRSEDAQSKAALTDWLRAKASFVIEGLKEADKDEFCRCELKLQKWYGDLRGKPFAIEAENSILDISGFSKQYNCAFIWQKDGVKKLNLYLIINYFKGGKLRFKKIKPEAFEANRFYTVINKKSGEIVPMEVNFNFDDPNLIILPLAFGKRQGREFIWNDLLSLETGSLKLANGRVIEKTLYNRRTRQDEPALFVALTFERREVLDSSNIKPMNLIGVDRGENIPAVIALTDPEGCPLSRFKDSLGNPTHILRIGESYKEKQRTIQAKKEVEQRRAGGYSRKYASKAKNLADDMVRNTARDLLYYAVTQDAMLIFENLSRGFGRQGKRTFMAERQYTRMEDWLTAKLAYEGLPSKTYLSKTLAQYTSKTCSNCGFTITSADYDRVLEKLKKTATGWMTTINGKELKVEGQITYYNRYKRQNVVKDLSVELDRLSEESVNNDISSWTKGRSGEALSLLKKRFSHRPVQEKFVCLNCGFETHADEQAALNIARSWLFLRSQEYKKYQTNKTTGNTDKRAFVETWQSFYRKKLKEVWKPAV

SEQ ID NO: 44033 - protein, 978 aa, synthetic construct
  REGION 1..978: note = engineered CasX variant
QEIKRINKIRRRLVKDSNTKKAGKTGPMKTLLVRVMTPDLRERLENLRKKPENIPQPISNTSRANLNKLLTDYTEMKKAILHVYWEEFQKDPVGLMSRVAQPASKKIDQNKLKPEMDEKGNLTTAGFACSQCGQPLFVYKLEQVSEKGKAYTNYFGRCNVAEHEKLIQLAQLKPEKDSDEAVTYSLGKFGQRALDFYSIHVTKESTHPVKPLAQIAGNRYASHPVGKALSDACMGTIASFLSKYQDIIIEHQKVVKGNQKRLESLRELAGKENLEYPSVTLPPQPHTKEGVDAYNEVIARVRWWVNLNLWQKLKLSRDDAKPLLRLKGFPSFPLVERQANEVDWWDMVCNVKKLINEKKEDGKVFWQNLAGYKRQEALRPYLSSEEDRKKGKKFARYQLGDLLLHLEKKHGEDWGKVYDEAWERIDKKVEGLSKHIKLEEERRSEDAQSKAALTDWLRAKASFVIEGLKEADKDEFCRCELKLQKWYGDLRGKPFAIEAENSILDISGFSKQYNCAFIWQKDGVKKLNLYLIINYFKGGKLRFKKIKPEAFEANRFYTVINKKSGEIVPMEVNFNFDDPNLIILPLAFGKRQGREFIWNDLLSLETGSLKLANGRVIEKTLYNRRTRQDEPALFVALTFERREVLDSSNIKPMNLIGVDRGENIPAVIALTDPEGCPLSRFKDSLGNPTHILRIGESYKEKQRTIQAKKEVEQRRAGGYSRKYASKAKNLADDMVRNTARDLLYYAVTQDAMLIFENLSRGFGRQGKRTFMAERQYTRMEDWLTAKLAYEGLPSKTYLSKTLAQYTSKTCSNCGFTITSADYDRVLEKLKKTATGWMTTINGKELKVEGQITYYNRYKRQNVVKDLSVELDRLSEESVNNDISSWTKGRSGEALSLLKKRFSHRPVQEKFVCLNCGFETHADEQAALNIARSWLFLRSQEYKKYQTNKTTGNTDKRAFVETWQSFYRKKLKEVWKPAV

SEQ ID NO: 44034 - protein, 978 aa, synthetic construct
  REGION 1..978: note = engineered CasX variant
QEIKRINKIRRRLVKDSNTKKAGKTGPMKTLLVRVMTPDLRERLENLRKKPENIPQPISNTSRANLNKLLTDYTEMKKAILHVYWEEFQKDPVGLMSRVAQPASKKIDQNKLKPEMDEKGNLTTAGFACSQCGQPLFVYKLEQVSEKGKAYTNYFGRCNVAEHEKLIQLAQLKPEKDSDEAVTYSLGKFGQRALDFYSIHVTKESTHPVKPLAQIAGNRYASSPVGKALSDACMGTIASFLSKYQDIIIEHQKVVKGNQKRLESLRELAGKENLEYPSVTLPPQPHTKEGVDAYNEVIARVRWWVNLNLWQKLKLSRDDAKPLLRLKGFPSFPLVERQANEVDWWDMVCNVKKLINEKKEDGKVFWQNLAGYKRQEALRPYLSSEEDRKKGKKFARYQLGDLLLHLEKKHGEDWGKVYDEAWERIDKKVEGLSKHIKLEEERRSEDAQSKAALTDWLRAKASFVIEGLKEADKDEFCRCELKLQKWYGDLRGKPFAIEAENSILDISGFSKQYNCAFIWQKDGVKKLNLYLIINYFKGGKLRFKKIKPEAFEANRFYTVINKKSGEIVPMEVNFNFDDPNLIILPLAFGKRQGREFIWNDLLSLETGSLKLANGRVIEKTLYNRRTRQDEPALFVALTFERREVLDSSNIKPMNLIGVDRGENIPAVIALTDPEGCPLSRFKDSLGNPTHILRIGESYKEKQRTIQAKKEVEQRRAGGYSRKYASKAKNLADDMVRNTARDLLYYAVTQDAMLIFENLSRGFGRQGKRTFMAERQYTRMEDWLTAKLAYEGLPSKTYLSKTLAQYTSKTCSNCGFTITSADYDRVLEKLKKTATGWMTTINGKELKVEGQITYYNRYKRQNVVKDLSVELDRLSEESVNNDISSWTKGRSGEALSLLKKRFSHRPVQEKFVCLNCGFETHADEQAALNIARSWLFLRSQEYKKYQTNKTTGNTDKRAFVETWQSFYRKKLKEVWKPAV

SEQ ID NO: 44035 - protein, 978 aa, synthetic construct
  REGION 1..978: note = engineered CasX variant
QEIKRINKIRRRLVKDSNTKKAGKTGPMKTLLVRVMTPDLRERLENLRKKPENIPQPISNTSRANLNKLLTDYTEMKKAILHVYWEEFQKDPVGLMSRVAQPASKKIDQNKLKPEMDEKGNLTTAGFACSQCGQPLFVYKLEQVSEKGKAYTNYFGRCNVAEHEKLIQLAQLKPEKDSDEAVTYSLGKFGQRALDFYSIHVTKESTHPVKPLAQIAGNRYASTPVGKALSDACMGTIASFLSKYQDIIIEHQKVVKGNQKRLESLRELAGKENLEYPSVTLPPQPHTKEGVDAYNEVIARVRWWVNLNLWQKLKLSRDDAKPLLRLKGFPSFPLVERQANEVDWWDMVCNVKKLINEKKEDGKVFWQNLAGYKRQEALRPYLSSEEDRKKGKKFARYQLGDLLLHLEKKHGEDWGKVYDEAWERIDKKVEGLSKHIKLEEERRSEDAQSKAALTDWLRAKASFVIEGLKEADKDEFCRCELKLQKWYGDLRGKPFAIEAENSILDISGFSKQYNCAFIWQKDGVKKLNLYLIINYFKGGKLRFKKIKPEAFEANRFYTVINKKSGEIVPMEVNFNFDDPNLIILPLAFGKRQGREFIWNDLLSLETGSLKLANGRVIEKTLYNRRTRQDEPALFVALTFERREVLDSSNIKPMNLIGVDRGENIPAVIALTDPEGCPLSRFKDSLGNPTHILRIGESYKEKQRTIQAKKEVEQRRAGGYSRKYASKAKNLADDMVRNTARDLLYYAVTQDAMLIFENLSRGFGRQGKRTFMAERQYTRMEDWLTAKLAYEGLPSKTYLSKTLAQYTSKTCSNCGFTITSADYDRVLEKLKKTATGWMTTINGKELKVEGQITYYNRYKRQNVVKDLSVELDRLSEESVNNDISSWTKGRSGEALSLLKKRFSHRPVQEKFVCLNCGFETHADEQAALNIARSWLFLRSQEYKKYQTNKTTGNTDKRAFVETWQSFYRKKLKEVWKPAV

SEQ ID NO: 44036 - protein, 978 aa, synthetic construct
  REGION 1..978: note = engineered CasX variant
QEIKRINKIRRRLVKDSNTKKAGKTGPMKTLLVRVMTPDLRERLENLRKKPENIPQPISNTSRANLNKLLTDYTEMKKAILHVYWEEFQKDPVGLMSRVAQPASKKIDQNKLKPEMDEKGNLTTAGFACSQCGQPLFVYKLEQVSEKGKAYTNYFGRCNVAEHEKLIQLAQLKPEKDSDEAVTYSLGKFGQRALDFYSIHVTKESTHPVKPLAQIAGNRYASAPVGKALSDACMGTIASFLSKYQDIIIEHQKVVKGNQKRLESLRELAGKENLEYPSVTLPPQPHTKEGVDAYNEVIARVRWWVNLNLWQKLKLSRDDAKPLLRLKGFPSFPLVERQANEVDWWDMVCNVKKLINEKKEDGKVFWQNLAGYKRQEALRPYLSSEEDRKKGKKFARYQLGDLLLHLEKKHGEDWGKVYDEAWERIDKKVEGLSKHIKLEEERRSEDAQSKAALTDWLRAKASFVIEGLKEADKDEFCRCELKLQKWYGDLRGKPFAIEAENSILDISGFSKQYNCAFIWQKDGVKKLNLYLIINYFKGGKLRFKKIKPEAFEANRFYTVINKKSGEIVPMEVNFNFDDPNLIILPLAFGKRQGREFIWNDLLSLETGSLKLANGRVIEKTLYNRRTRQDEPALFVALTFERREVLDSSNIKPMNLIGVDRGENIPAVIALTDPEGCPLSRFKDSLGNPTHILRIGESYKEKQRTIQAKKEVEQRRAGGYSRKYASKAKNLADDMVRNTARDLLYYAVTQDAMLIFENLSRGFGRQGKRTFMAERQYTRMEDWLTAKLAYEGLPSKTYLSKTLAQYTSKTCSNCGFTITSADYDRVLEKLKKTATGWMTTINGKELKVEGQITYYNRYKRQNVVKDLSVELDRLSEESVNNDISSWTKGRSGEALSLLKKRFSHRPVQEKFVCLNCGFETHADEQAALNIARSWLFLRSQEYKKYQTNKTTGNTDKRAFVETWQSFYRKKLKEVWKPAV

SEQ ID NO: 44037 - protein, 978 aa, synthetic construct
  REGION 1..978: note = engineered CasX variant
QEIKRINKIRRRLVKDSNTKKAGKTGPMKTLLVRVMTPDLRERLENLRKKPENIPQPISNTSRANLNKLLTDYTEMKKAILHVYWEEFQKDPVGLMSRVAQPASKKIDQNKLKPEMDEKGNLTTAGFACSQCGQPLFVYKLEQVSEKGKAYTNYFGRCNVAEHEKLIQLAQLKPEKDSDEAVTYSLGKFGQRALDFYSIHVTKESTHPVKPLAQIAGNRYASVPVGKALSDACMGTIASFLSKYQDIIIEHQKVVKGNQKRLESLRELAGKENLEYPSVTLPPQPHTKEGVDAYNEVIARVRWWVNLNLWQKLKLSRDDAKPLLRLKGFPSFPLVERQANEVDWWDMVCNVKKLINEKKEDGKVFWQNLAGYKRQEALRPYLSSEEDRKKGKKFARYQLGDLLLHLEKKHGEDWGKVYDEAWERIDKKVEGLSKHIKLEEERRSEDAQSKAALTDWLRAKASFVIEGLKEADKDEFCRCELKLQKWYGDLRGKPFAIEAENSILDISGFSKQYNCAFIWQKDGVKKLNLYLIINYFKGGKLRFKKIKPEAFEANRFYTVINKKSGEIVPMEVNFNFDDPNLIILPLAFGKRQGREFIWNDLLSLETGSLKLANGRVIEKTLYNRRTRQDEPALFVALTFERREVLDSSNIKPMNLIGVDRGENIPAVIALTDPEGCPLSRFKDSLGNPTHILRIGESYKEKQRTIQAKKEVEQRRAGGYSRKYASKAKNLADDMVRNTARDLLYYAVTQDAMLIFENLSRGFGRQGKRTFMAERQYTRMEDWLTAKLAYEGLPSKTYLSKTLAQYTSKTCSNCGFTITSADYDRVLEKLKKTATGWMTTINGKELKVEGQITYYNRYKRQNVVKDLSVELDRLSEESVNNDISSWTKGRSGEALSLLKKRFSHRPVQEKFVCLNCGFETHADEQAALNIARSWLFLRSQEYKKYQTNKTTGNTDKRAFVETWQSFYRKKLKEVWKPAV

SEQ ID NO: 44038 - protein, 979 aa, synthetic construct
  REGION 1..979: note = engineered CasX variant
QEIKRINKIRRRLVKDSNTKKAGKTGPMKTLLVRVMTPDLRERLENLRKKPENIPQPISNTSRANLNKLLTDYTEMKKAILHVYWEEFQKDPVGLMSRVAQPASKKIDQNKLKPEMDEKGNLTTAGFACSQCGQPLFVYKLEQVSEKGKAYTNYFGRCNVAEHEKLIQKLAQLKPEKDSDEAVTYSLGKFGQRALDFYSIHVTKESTHPVKPLAQIAGNRYASGPVGKALSDACMGTIASFLSKYQDIIIEHQKVVKGNQKRLESLRELAGKENLEYPSVTLPPQPHTKEGVDAYNEVIARVRWWVNLNLWQKLKLSRDDAKPLLRLKGFPSFPLVERQANEVDWWDMVCNVKKLINEKKEDGKVFWQNLAGYKRQEALRPYLSSEEDRKKGKKFARYQLGDLLLHLEKKHGEDWGKVYDEAWERIDKKVEGLSKHIKLEEERRSEDAQSKAALTDWLRAKASFVIEGLKEADKDEFCRCELKLQKWYGDLRGKPFAIEAENSILDISGFSKQYNCAFIWQKDGVKKLNLYLIINYFKGGKLRFKKIKPEAFEANRFYTVINKKSGEIVPMEVNFNFDDPNLIILPLAFGKRQGREFIWNDLLSLETGSLKLANGRVIEKTLYNRRTRQDEPALFVALTFERREVLDSSNIKPMNLIGVDRGENIPAVIALTDPEGCPLSRFKDSLGNPTHILRIGESYKEKQRTIQAKKEVEQRRAGGYSRKYASKAKNLADDMVRNTARDLLYYAVTQDAMLIFENLSRGFGRQGKRTFMAERQYTRMEDWLTAKLAYEGLPSKTYLSKTLAQYTSKTCSNCGFTITSADYDRVLEKLKKTATGWMTTINGKELKVEGQITYYNRYKRQNVVKDLSVELDRLSEESVNNDISSWTKGRSGEALSLLKKRFSHRPVQEKFVCLNCGFETHADEQAALNIARSWLFLRSQEYKKYQTNKTTGNTDKRAFVETWQSFYRKKLKEVWKPAV

SEQ ID NO: 44039 - protein, 977 aa, synthetic construct
  REGION 1..977: note = engineered CasX variant
QEIKRINKIRRRLVKDSNTKKAGKTGPMKTLLVRVMTPDLRERLENLRKKPENIPQPISNTSRANLNKLLTDYTEMKKAILHVYWEEFQKDPVGLMSRVAQPASKKIDQNKLKPEMDEKGNLTTAGFACSQCGQPLFVYKLEQVSEKGKAYTNYFGRCNVAEHEKLIQLAQLKPEKDSDEAVTYSLGKFGQRALDFYSIHVTKESTHPVKPLAQIAGNRYASPVGKALSDACMGTIASFLSKYQDIIIEHQKVVKGNQKRLESLRELAGKENLEYPSVTLPPQPHTKEGVDAYNEVIARVRWWVNLNLWQKLKLSRDDAKPLLRLKGFPSFPLVERQANEVDWWDMVCNVKKLINEKKEDGKVFWQNLAGYKRQEALRPYLSSEEDRKKGKKFARYQLGDLLLHLEKKHGEDWGKVYDEAWERIDKKVEGLSKHIKLEEERRSEDAQSKAALTDWLRAKASFVIEGLKEADKDEFCRCELKLQKWYGDLRGKPFAIEAENSILDISGFSKQYNCAFIWQKDGVKKLNLYLIINYFKGGKLRFKKIKPEAFEANRFYTVINKKSGEIVPMEVNFNFDDPNLIILPLAFGKRQGREFIWNDLLSLETGSLKLANGRVIEKTLYNRRTRQDEPALFVALTFERREVLDSSNIKPMNLIGVDRGENIPAVIALTDPEGCPLSRFKDSLGNPTHILRIGESYKEKQRTIQAKKEVEQRRAGGYSRKYASKAKNLADDMVRNTARDLLYYAVTQDAMLIFENLSRGFGRQGKRTFMAERQYTRMEDWLTAKLAYEGLPSKTYLSKTLAQYTSKTCSNCGFTITSADYDRVLEKLKKTATGWMTTINGKELKVEGQITYYNRYKRQNVVKDLSVELDRLSEESVNNDISSWTKGRSGEALSLLKKRFSHRPVQEKFVCLNCGFETHADEQAALNIARSWLFLRSQEYKKYQTNKTTGNTDKRAFVETWQSFYRKKLKEVWKPAV

SEQ ID NO: 44040 - protein, 978 aa, synthetic construct
  REGION 1..978: note = engineered CasX variant
QEIKRINKIRRRLVKDSNTKKAGKTGPMKTLLVRVMTPDLRERLENLRKKPENIPQPISNTSRANLNKLLTDYTEMKKAILHVYWEEFQKDPVGLMSRVAQPASKKIDQNKLKPEMDEKGNLTTAGFACSQCGQPLFVYKLEQVSEKGKAYTNYFGRCNVAEHEKLILLAQLKPEKDSDEAVTYSLGKFGQRALDFYSIHVTKESTHPVKPLAQIAGNRYASYPVGKALSDACMGTIASFLSKYQDIIIEHQKVVKGNQKRLESLRELAGKENLEYPSVTLPPQPHTKEGVDAYNEVIARVRWWVNLNLWQKLKLSRDDAKPLLRLKGFPSFPLVERQANEVDWWDMVCNVKKLINEKKEDGKVFWQNLAIYKRQEALRPYLSSEEDRKKGKKFARYQLGDLLLHLEKKHGEDWGKVYDEAWERIDKKVEGLSKHIKLEEERRSEDAQSKAALTDWLRAKASFVIEGLKEADKDEFCRCELKLQKWYGDLRGKPFAIEAENSILDISGFSKQYNCAFIWQKDGVKKLNLYLIINYFKGGKLRFKKIKPEAFEANRFYTVINKKSGEIVPMEVNFNFDDPNLIILPLAFGKRQGREFIWNDLLSLETGSLKLANGRVIEKTLYNRRTRQDEPALFVALTFERREVLDSSNIKPMNLIGVDRGENIPAVIALTDPEGCPLSRFKDSLGNPTHILRIGESYKEKQRTIQAKKEVEQRRAGGYSRKYASKAKNLADDMVRNTARDLLYYAVTQDAMLIFENLSRGFGRQGKRTFMAERQYTRMEDWLTAKLAYEGLPSKTYLSKTLAQYTSKTCSNCGFTITSADYDRVLEKLKKTATGWMTTINGKELKVEGQITYYNRYKRQNVVKDLSVELDRLSEESVNNDISSWTKGRSGEALSLLKKRFSHRPVQEKFVCLNCGFETHADEQAALNIARSWLFLRSQEYKKYQTNKTTGNTDKRAFVETWQSFYRKKLKEVWKPAV

SEQ ID NO: 44041 - protein, 978 aa, synthetic construct
  REGION 1..978: note = engineered CasX variant
QEIKRINKIRRRLVKDSNTKKAGKTGPMKTLLVRVMTPDLRERLENLRKKPENIPQPISNTSRANLNKLLTDYTEMKKAILHVYWEEFQKDPVGLMSRVAQPASKKIDQNKLKPEMDEKGNLTTAGFACSQCGQPLFVYKLEQVSEKGKAYTNYFGRCNVAEHEKLILLAQLKPEKDSDEAVTYSLGKFGQRALDFYSIHVTKESTHPVKPLAQIAGNRYASHPVGKALSDACMGTIASFLSKYQDIIIEHQKVVKGNQKRLESLRELAGKENLEYPSVTLPPQPHTKEGVDAYNEVIARVRWWVNLNLWQKLKLSRDDAKPLLRLKGFPSFPLVERQANEVDWWDMVCNVKKLINEKKEDGKVFWQNLAIYKRQEALRPYLSSEEDRKKGKKFARYQLGDLLLHLEKKHGEDWGKVYDEAWERIDKKVEGLSKHIKLEEERRSEDAQSKAALTDWLRAKASFVIEGLKEADKDEFCRCELKLQKWYGDLRGKPFAIEAENSILDISGFSKQYNCAFIWQKDGVKKLNLYLIINYFKGGKLRFKKIKPEAFEANRFYTVINKKSGEIVPMEVNFNFDDPNLIILPLAFGKRQGREFIWNDLLSLETGSLKLANGRVIEKTLYNRRTRQDEPALFVALTFERREVLDSSNIKPMNLIGVDRGENIPAVIALTDPEGCPLSRFKDSLGNPTHILRIGESYKEKQRTIQAKKEVEQRRAGGYSRKYASKAKNLADDMVRNTARDLLYYAVTQDAMLIFENLSRGFGRQGKRTFMAERQYTRMEDWLTAKLAYEGLPSKTYLSKTLAQYTSKTCSNCGFTITSADYDRVLEKLKKTATGWMTTINGKELKVEGQITYYNRYKRQNVVKDLSVELDRLSEESVNNDISSWTKGRSGEALSLLKKRFSHRPVQEKFVCLNCGFETHADEQAALNIARSWLFLRSQEYKKYQTNKTTGNTDKRAFVETWQSFYRKKLKEVWKPAV

SEQ ID NO: 44042 - protein, 978 aa, synthetic construct
  REGION 1..978: note = engineered CasX variant
QEIKRINKIRRRLVKDSNTKKAGKTGPMKTLLVRVMTPDLRERLENLRKKPENIPQPISNTSRANLNKLLTDYTEMKKAILHVYWEEFQKDPVGLMSRVAQPASKKIDQNKLKPEMDEKGNLTTAGFACSQCGQPLFVYKLEQVSEKGKAYTNYFGRCNVAEHEKLILLAQLKPEKDSDEAVTYSLGKFGQRALDFYSIHVTKESTHPVKPLAQIAGNRYASSPVGKALSDACMGTIASFLSKYQDIIIEHQKVVKGNQKRLESLRELAGKENLEYPSVTLPPQPHTKEGVDAYNEVIARVRWWVNLNLWQKLKLSRDDAKPLLRLKGFPSFPLVERQANEVDWWDMVCNVKKLINEKKEDGKVFWQNLAIYKRQEALRPYLSSEEDRKKGKKFARYQLGDLLLHLEKKHGEDWGKVYDEAWERIDKKVEGLSKHIKLEEERRSEDAQSKAALTDWLRAKASFVIEGLKEADKDEFCRCELKLQKWYGDLRGKPFAIEAENSILDISGFSKQYNCAFIWQKDGVKKLNLYLIINYFKGGKLRFKKIKPEAFEANRFYTVINKKSGEIVPMEVNFNFDDPNLIILPLAFGKRQGREFIWNDLLSLETGSLKLANGRVIEKTLYNRRTRQDEPALFVALTFERREVLDSSNIKPMNLIGVDRGENIPAVIALTDPEGCPLSRFKDSLGNPTHILRIGESYKEKQRTIQAKKEVEQRRAGGYSRKYASKAKNLADDMVRNTARDLLYYAVTQDAMLIFENLSRGFGRQGKRTFMAERQYTRMEDWLTAKLAYEGLPSKTYLSKTLAQYTSKTCSNCGFTITSADYDRVLEKLKKTATGWMTTINGKELKVEGQITYYNRYKRQNVVKDLSVELDRLSEESVNNDISSWTKGRSGEALSLLKKRFSHRPVQEKFVCLNCGFETHADEQAALNIARSWLFLRSQEYKKYQTNKTTGNTDKRAFVETWQSFYRKKLKEVWKPAV

SEQ ID NO: 44043 - protein, 978 aa, synthetic construct
  REGION 1..978: note = engineered CasX variant
QEIKRINKIRRRLVKDSNTKKAGKTGPMKTLLVRVMTPDLRERLENLRKKPENIPQPISNTSRANLNKLLTDYTEMKKAILHVYWEEFQKDPVGLMSRVAQPASKKIDQNKLKPEMDEKGNLTTAGFACSQCGQPLFVYKLEQVSEKGKAYTNYFGRCNVAEHEKLILLAQLKPEKDSDEAVTYSLGKFGQRALDFYSIHVTKESTHPVKPLAQIAGNRYASTPVGKALSDACMGTIASFLSKYQDIIIEHQKVVKGNQKRLESLRELAGKENLEYPSVTLPPQPHTKEGVDAYNEVIARVRWWVNLNLWQKLKLSRDDAKPLLRLKGFPSFPLVERQANEVDWWDMVCNVKKLINEKKEDGKVFWQNLAIYKRQEALRPYLSSEEDRKKGKKFARYQLGDLLLHLEKKHGEDWGKVYDEAWERIDKKVEGLSKHIKLEEERRSEDAQSKAALTDWLRAKASFVIEGLKEADKDEFCRCELKLQKWYGDLRGKPFAIEAENSILDISGFSKQYNCAFIWQKDGVKKLNLYLIINYFKGGKLRFKKIKPEAFEANRFYTVINKKSGEIVPMEVNFNFDDPNLIILPLAFGKRQGREFIWNDLLSLETGSLKLANGRVIEKTLYNRRTRQDEPALFVALTFERREVLDSSNIKPMNLIGVDRGENIPAVIALTDPEGCPLSRFKDSLGNPTHILRIGESYKEKQRTIQAKKEVEQRRAGGYSRKYASKAKNLADDMVRNTARDLLYYAVTQDAMLIFENLSRGFGRQGKRTFMAERQYTRMEDWLTAKLAYEGLPSKTYLSKTLAQYTSKTCSNCGFTITSADYDRVLEKLKKTATGWMTTINGKELKVEGQITYYNRYKRQNVVKDLSVELDRLSEESVNNDISSWTKGRSGEALSLLKKRFSHRPVQEKFVCLNCGFETHADEQAALNIARSWLFLRSQEYKKYQTNKTTGNTDKRAFVETWQSFYRKKLKEVWKPAV

SEQ ID NO: 44044 - protein, 978 aa, synthetic construct
  REGION 1..978: note = engineered CasX variant
QEIKRINKIRRRLVKDSNTKKAGKTGPMKTLLVRVMTPDLRERLENLRKKPENIPQPISNTSRANLNKLLTDYTEMKKAILHVYWEEFQKDPVGLMSRVAQPASKKIDQNKLKPEMDEKGNLTTAGFACSQCGQPLFVYKLEQVSEKGKAYTNYFGRCNVAEHEKLILLAQLKPEKDSDEAVTYSLGKFGQRALDFYSIHVTKESTHPVKPLAQIAGNRYASAPVGKALSDACMGTIASFLSKYQDIIIEHQKVVKGNQKRLESLRELAGKENLEYPSVTLPPQPHTKEGVDAYNEVIARVRWWVNLNLWQKLKLSRDDAKPLLRLKGFPSFPLVERQANEVDWWDMVCNVKKLINEKKEDGKVFWQNLAIYKRQEALRPYLSSEEDRKKGKKFARYQLGDLLLHLEKKHGEDWGKVYDEAWERIDKKVEGLSKHIKLEEERRSEDAQSKAALTDWLRAKASFVIEGLKEADKDEFCRCELKLQKWYGDLRGKPFAIEAENSILDISGFSKQYNCAFIWQKDGVKKLNLYLIINYFKGGKLRFKKIKPEAFEANRFYTVINKKSGEIVPMEVNFNFDDPNLIILPLAFGKRQGREFIWNDLLSLETGSLKLANGRVIEKTLYNRRTRQDEPALFVALTFERREVLDSSNIKPMNLIGVDRGENIPAVIALTDPEGCPLSRFKDSLGNPTHILRIGESYKEKQRTIQAKKEVEQRRAGGYSRKYASKAKNLADDMVRNTARDLLYYAVTQDAMLIFENLSRGFGRQGKRTFMAERQYTRMEDWLTAKLAYEGLPSKTYLSKTLAQYTSKTCSNCGFTITSADYDRVLEKLKKTATGWMTTINGKELKVEGQITYYNRYKRQNVVKDLSVELDRLSEESVNNDISSWTKGRSGEALSLLKKRFSHRPVQEKFVCLNCGFETHADEQAALNIARSWLFLRSQEYKKYQTNKTTGNTDKRAFVETWQSFYRKKLKEVWKPAV

SEQ ID NO: 44045 - protein, 978 aa, synthetic construct
  REGION 1..978: note = engineered CasX variant
QEIKRINKIRRRLVKDSNTKKAGKTGPMKTLLVRVMTPDLRERLENLRKKPENIPQPISNTSRANLNKLLTDYTEMKKAILHVYWEEFQKDPVGLMSRVAQPASKKIDQNKLKPEMDEKGNLTTAGFACSQCGQPLFVYKLEQVSEKGKAYTNYFGRCNVAEHEKLILLAQLKPEKDSDEAVTYSLGKFGQRALDFYSIHVTKESTHPVKPLAQIAGNRYASVPVGKALSDACMGTIASFLSKYQDIIIEHQKVVKGNQKRLESLRELAGKENLEYPSVTLPPQPHTKEGVDAYNEVIARVRWWVNLNLWQKLKLSRDDAKPLLRLKGFPSFPLVERQANEVDWWDMVCNVKKLINEKKEDGKVFWQNLAIYKRQEALRPYLSSEEDRKKGKKFARYQLGDLLLHLEKKHGEDWGKVYDEAWERIDKKVEGLSKHIKLEEERRSEDAQSKAALTDWLRAKASFVIEGLKEADKDEFCRCELKLQKWYGDLRGKPFAIEAENSILDISGFSKQYNCAFIWQKDGVKKLNLYLIINYFKGGKLRFKKIKPEAFEANRFYTVINKKSGEIVPMEVNFNFDDPNLIILPLAFGKRQGREFIWNDLLSLETGSLKLANGRVIEKTLYNRRTRQDEPALFVALTFERREVLDSSNIKPMNLIGVDRGENIPAVIALTDPEGCPLSRFKDSLGNPTHILRIGESYKEKQRTIQAKKEVEQRRAGGYSRKYASKAKNLADDMVRNTARDLLYYAVTQDAMLIFENLSRGFGRQGKRTFMAERQYTRMEDWLTAKLAYEGLPSKTYLSKTLAQYTSKTCSNCGFTITSADYDRVLEKLKKTATGWMTTINGKELKVEGQITYYNRYKRQNVVKDLSVELDRLSEESVNNDISSWTKGRSGEALSLLKKRFSHRPVQEKFVCLNCGFETHADEQAALNIARSWLFLRSQEYKKYQTNKTTGNTDKRAFVETWQSFYRKKLKEVWKPAV

SEQ ID NO: 44046 - protein, 978 aa, synthetic construct
  REGION 1..978: note = engineered CasX variant
QEIKRINKIRRRLVKDSNTKKAGKTGPMKTLLVRVMTPDLRERLENLRKKPENIPQPISNTSRANLNKLLTDYTEMKKAILHVYWEEFQKDPVGLMSRVAQPASKKIDQNKLKPEMDEKGNLTTAGFACSQCGQPLFVYKLEQVSEKGKAYTNYFGRCNVAEHEKLIKLAQLKPEKDSDEAVTYSLGKFGQRALDFYSIHVTKESTHPVKPLAQIAGNRYASGPVGKALSDACMGTIASFLSKYQDIIIEHQKVVKGNQKRLESLRELAGKENLEYPSVTLPPQPHTKEGVDAYNEVIARVRWWVNLNLWQKLKLSRDDAKPLLRLKGFPSFPLVERQANEVDWWDMVCNVKKLINEKKEDGKVFWQNLAIYKRQEALRPYLSSEEDRKKGKKFARYQLGDLLLHLEKKHGEDWGKVYDEAWERIDKKVEGLSKHIKLEEERRSEDAQSKAALTDWLRAKASFVIEGLKEADKDEFCRCELKLQKWYGDLRGKPFAIEAENSILDISGFSKQYNCAFIWQKDGVKKLNLYLIINYFKGGKLRFKKIKPEAFEANRFYTVINKKSGEIVPMEVNFNFDDPNLIILPLAFGKRQGREFIWNDLLSLETGSLKLANGRVIEKTLYNRRTRQDEPALFVALTFERREVLDSSNIKPMNLIGVDRGENIPAVIALTDPEGCPLSRFKDSLGNPTHILRIGESYKEKQRTIQAKKEVEQRRAGGYSRKYASKAKNLADDMVRNTARDLLYYAVTQDAMLIFENLSRGFGRQGKRTFMAERQYTRMEDWLTAKLAYEGLPSKTYLSKTLAQYTSKTCSNCGFTITSADYDRVLEKLKKTATGWMTTINGKELKVEGQITYYNRYKRQNVVKDLSVELDRLSEESVNNDISSWTKGRSGEALSLLKKRFSHRPVQEKFVCLNCGFETHADEQAALNIARSWLFLRSQEYKKYQTNKTTGNTDKRAFVETWQSFYRKKLKEVWKPAV

SEQ ID NO: 44047 - protein, 977 aa, synthetic construct
  REGION 1..977: note = engineered CasX variant
QEIKRINKIRRRLVKDSNTKKAGKTGPMKTLLVRVMTPDLRERLENLRKKPENIPQPISNTSRANLNKLLTDYTEMKKAILHVYWEEFQKDPVGLMSRVAQPASKKIDQNKLKPEMDEKGNLTTAGFACSQCGQPLFVYKLEQVSEKGKAYTNYFGRCNVAEHEKLILLAQLKPEKDSDEAVTYSLGKFGQRALDFYSIHVTKESTHPVKPLAQIAGNRYASPVGKALSDACMGTIASFLSKYQDIIIEHQKVVKGNQKRLESLRELAGKENLEYPSVTLPPQPHTKEGVDAYNEVIARVRWWVNLNLWQKLKLSRDDAKPLLRLKGFPSFPLVERQANEVDWWDMVCNVKKLINEKKEDGKVFWQNLAIYKRQEALRPYLSSEEDRKKGKKFARYQLGDLLLHLEKKHGEDWGKVYDEAWERIDKKVEGLSKHIKLEEERRSEDAQSKAALTDWLRAKASFVIEGLKEADKDEFCRCELKLQKWYGDLRGKPFAIEAENSILDISGFSKQYNCAFIWQKDGVKKLNLYLIINYFKGGKLRFKKIKPEAFEANRFYTVINKKSGEIVPMEVNFNFDDPNLIILPLAFGKRQGREFIWNDLLSLETGSLKLANGRVIEKTLYNRRTRQDEPALFVALTFERREVLDSSNIKPMNLIGVDRGENIPAVIALTDPEGCPLSRFKDSLGNPTHILRIGESYKEKQRTIQAKKEVEQRRAGGYSRKYASKAKNLADDMVRNTARDLLYYAVTQDAMLIFENLSRGFGRQGKRTFMAERQYTRMEDWLTAKLAYEGLPSKTYLSKTLAQYTSKTCSNCGFTITSADYDRVLEKLKKTATGWMTTINGKELKVEGQITYYNRYKRQNVVKDLSVELDRLSEESVNNDISSWTKGRSGEALSLLKKRFSHRPVQEKFVCLNCGFETHADEQAALNIARSWLFLRSQEYKKYQTNKTTGNTDKRAFVETWQSFYRKKLKEVWKPAV

SEQ ID NO: 44048 - protein, 978 aa, synthetic construct
  REGION 1..978: note = engineered CasX variant
QEIKRINKIRRRLVKDSNTKKAGKTGPMKTLLVRVMTPDLRERLENLRKKPENIPQPISNTSRANLNKLLTDYTEMKKAILHVYWEEFQKDPVGLMSRVAQPASKKIDQNKLKPEMDEKGNLTTAGFACSQCGQPLFVYKLEQVSEKGKAYTNYFGRCNVAEHEKLILLAQLKPEKDSDEAVTYSLGKFGQRALDFYSIHVTKESTHPVKPLAQIAGNRYASYPVGKALSDACMGTIASFLSKYQDIIIEHQKVVKGNQKRLESLRELAGKENLEYPSVTLPPQPHTKEGVDAYNEVIARVRWWVNLNLWQKLKLSRDDAKPLLRLKGFPSFPLVERQANEVDWWDMVCNVKKLINEKKEDGKVFWQNLAGYKRQEALRPYLSSEEDREKGKKFARYQLGDLLLHLEKKHGEDWGKVYDEAWERIDKKVEGLSKHIKLEEERRSEDAQSKAALTDWLRAKASFVIEGLKEADKDEFCRCELKLQKWYGDLRGKPFAIEAENSILDISGFSKQYNCAFIWQKDGVKKLNLYLIINYFKGGKLRFKKIKPEAFEANRFYTVINKKSGEIVPMEVNFNFDDPNLIILPLAFGKRQGREFIWNDLLSLETGSLKLANGRVIEKTLYNRRTRQDEPALFVALTFERREVLDSSNIKPMNLIGVDRGENIPAVIALTDPEGCPLSRFKDSLGNPTHILRIGESYKEKQRTIQAKKEVEQRRAGGYSRKYASKAKNLADDMVRNTARDLLYYAVTQDAMLIFENLSRGFGRQGKRTFMAERQYTRMEDWLTAKLAYEGLPSKTYLSKTLAQYTSKTCSNCGFTITSADYDRVLEKLKKTATGWMTTINGKELKVEGQITYYNRYKRQNVVKDLSVELDRLSEESVNNDISSWTKGRSGEALSLLKKRFSHRPVQEKFVCLNCGFETHADEQAALNIARSWLFLRSQEYKKYQTNKTTGNTDKRAFVETWQSFYRKKLKEVWKPAV

SEQ ID NO: 44049 - protein, 978 aa, synthetic construct
  REGION 1..978: note = engineered CasX variant
QEIKRINKIRRRLVKDSNTKKAGKTGPMKTLLVRVMTPDLRERLENLRKKPENIPQPISNTSRANLNKLLTDYTEMKKAILHVYWEEFQKDPVGLMSRVAQPASKKIDQNKLKPEMDEKGNLTTAGFACSQCGQPLFVYKLEQVSEKGKAYTNYFGRCNVAEHEKLILLAQLKPEKDSDEAVTYSLGKFGQRALDFYSIHVTKESTHPVKPLAQIAGNRYASHPVGKALSDACMGTIASFLSKYQDIIIEHQKVVKGNQKRLESLRELAGKENLEYPSVTLPPQPHTKEGVDAYNEVIARVRWWVNLNLWQKLKLSRDDAKPLLRLKGFPSFPLVERQANEVDWWDMVCNVKKLINEKKEDGKVFWQNLAGYKRQEALRPYLSSEEDREKGKKFARYQLGDLLLHLEKKHGEDWGKVYDEAWERIDKKVEGLSKHIKLEEERRSEDAQSKAALTDWLRAKASFVIEGLKEADKDEFCRCELKLQKWYGDLRGKPFAIEAENSILDISGFSKQYNCAFIWQKDGVKKLNLYLIINYFKGGKLRFKKIKPEAFEANRFYTVINKKSGEIVPMEVNFNFDDPNLIILPLAFGKRQGREFIWNDLLSLETGSLKLANGRVIEKTLYNRRTRQDEPALFVALTFERREVLDSSNIKPMNLIGVDRGENIPAVIALTDPEGCPLSRFKDSLGNPTHILRIGESYKEKQRTIQAKKEVEQRRAGGYSRKYASKAKNLADDMVRNTARDLLYYAVTQDAMLIFENLSRGFGRQGKRTFMAERQYTRMEDWLTAKLAYEGLPSKTYLSKTLAQYTSKTCSNCGFTITSADYDRVLEKLKKTATGWMTTINGKELKVEGQITYYNRYKRQNVVKDLSVELDRLSEESVNNDISSWTKGRSGEALSLLKKRFSHRPVQEKFVCLNCGFETHADEQAALNIARSWLFLRSQEYKKYQTNKTTGNTDKRAFVETWQSFYRKKLKEVWKPAV

SEQ ID NO: 44050 - protein, 978 aa, synthetic construct
  REGION 1..978: note = engineered CasX variant
QEIKRINKIRRRLVKDSNTKKAGKTGPMKTLLVRVMTPDLRERLENLRKKPENIPQPISNTSRANLNKLLTDYTEMKKAILHVYWEEFQKDPVGLMSRVAQPASKKIDQNKLKPEMDEKGNLTTAGFACSQCGQPLFVYKLEQVSEKGKAYTNYFGRCNVAEHEKLILLAQLKPEKDSDEAVTYSLGKFGQRALDFYSIHVTKESTHPVKPLAQIAGNRYASSPVGKALSDACMGTIASFLSKYQDIIIEHQKVVKGNQKRLESLRELAGKENLEYPSVTLPPQPHTKEGVDAYNEVIARVRWWVNLNLWQKLKLSRDDAKPLLRLKGFPSFPLVERQANEVDWWDMVCNVKKLINEKKEDGKVFWQNLAGYKRQEALRPYLSSEEDREKGKKFARYQLGDLLLHLEKKHGEDWGKVYDEAWERIDKKVEGLSKHIKLEEERRSEDAQSKAALTDWLRAKASFVIEGLKEADKDEFCRCELKLQKWYGDLRGKPFAIEAENSILDISGFSKQYNCAFIWQKDGVKKLNLYLIINYFKGGKLRFKKIKPEAFEANRFYTVINKKSGEIVPMEVNFNFDDPNLIILPLAFGKRQGREFIWNDLLSLETGSLKLANGRVIEKTLYNRRTRQDEPALFVALTFERREVLDSSNIKPMNLIGVDRGENIPAVIALTDPEGCPLSRFKDSLGNPTHILRIGESYKEKQRTIQAKKEVEQRRAGGYSRKYASKAKNLADDMVRNTARDLLYYAVTQDAMLIFENLSRGFGRQGKRTFMAERQYTRMEDWLTAKLAYEGLPSKTYLSKTLAQYTSKTCSNCGFTITSADYDRVLEKLKKTATGWMTTINGKELKVEGQITYYNRYKRQNVVKDLSVELDRLSEESVNNDISSWTKGRSGEALSLLKKRFSHRPVQEKFVCLNCGFETHADEQAALNIARSWLFLRSQEYKKYQTNKTTGNTDKRAFVETWQSFYRKKLKEVWKPAV

SEQ ID NO: 44051 - protein, 978 aa, synthetic construct
  REGION 1..978: note = engineered CasX variant
QEIKRINKIRRRLVKDSNTKKAGKTGPMKTLLVRVMTPDLRERLENLRKKPENIPQPISNTSRANLNKLLTDYTEMKKAILHVYWEEFQKDPVGLMSRVAQPASKKIDQNKLKPEMDEKGNLTTAGFACSQCGQPLFVYKLEQVSEKGKAYTNYFGRCNVAEHEKLILLAQLKPEKDSDEAVTYSLGKFGQRALDFYSIHVTKESTHPVKPLAQIAGNRYASTPVGKALSDACMGTIASFLSKYQDIIIEHQKVVKGNQKRLESLRELAGKENLEYPSVTLPPQPHTKEGVDAYNEVIARVRWWVNLNLWQKLKLSRDDAKPLLRLKGFPSFPLVERQANEVDWWDMVCNVKKLINEKKEDGKVFWQNLAGYKRQEALRPYLSSEEDREKGKKFARYQLGDLLLHLEKKHGEDWGKVYDEAWERIDKKVEGLSKHIKLEEERRSEDAQSKAALTDWLRAKASFVIEGLKEADKDEFCRCELKLQKWYGDLRGKPFAIEAENSILDISGFSKQYNCAFIWQKDGVKKLNLYLIINYFKGGKLRFKKIKPEAFEANRFYTVINKKSGEIVPMEVNFNFDDPNLIILPLAFGKRQGREFIWNDLLSLETGSLKLANGRVIEKTLYNRRTRQDEPALFVALTFERREVLDSSNIKPMNLIGVDRGENIPAVIALTDPEGCPLSRFKDSLGNPTHILRIGESYKEKQRTIQAKKEVEQRRAGGYSRKYASKAKNLADDMVRNTARDLLYYAVTQDAMLIFENLSRGFGRQGKRTFMAERQYTRMEDWLTAKLAYEGLPSKTYLSKTLAQYTSKTCSNCGFTITSADYDRVLEKLKKTATGWMTTINGKELKVEGQITYYNRYKRQNVVKDLSVELDRLSEESVNNDISSWTKGRSGEALSLLKKRFSHRPVQEKFVCLNCGFETHADEQAALNIARSWLFLRSQEYKKYQTNKTTGNTDKRAFVETWQSFYRKKLKEVWKPAV

SEQ ID NO: 44052 - protein, 978 aa, synthetic construct
  REGION 1..978: note = engineered CasX variant
QEIKRINKIRRRLVKDSNTKKAGKTGPMKTLLVRVMTPDLRERLENLRKKPENIPQPISNTSRANLNKLLTDYTEMKKAILHVYWEEFQKDPVGLMSRVAQPASKKIDQNKLKPEMDEKGNLTTAGFACSQCGQPLFVYKLEQVSEKGKAYTNYFGRCNVAEHEKLILLAQLKPEKDSDEAVTYSLGKFGQRALDFYSIHVTKESTHPVKPLAQIAGNRYASAPVGKALSDACMGTIASFLSKYQDIIIEHQKVVKGNQKRLESLRELAGKENLEYPSVTLPPQPHTKEGVDAYNEVIARVRWWVNLNLWQKLKLSRDDAKPLLRLKGFPSFPLVERQANEVDWWDMVCNVKKLINEKKEDGKVFWQNLAGYKRQEALRPYLSSEEDREKGKKFARYQLGDLLLHLEKKHGEDWGKVYDEAWERIDKKVEGLSKHIKLEEERRSEDAQSKAALTDWLRAKASFVIEGLKEADKDEFCRCELKLQKWYGDLRGKPFAIEAENSILDISGFSKQYNCAFIWQKDGVKKLNLYLIINYFKGGKLRFKKIKPEAFEANRFYTVINKKSGEIVPMEVNFNFDDPNLIILPLAFGKRQGREFIWNDLLSLETGSLKLANGRVIEKTLYNRRTRQDEPALFVALTFERREVLDSSNIKPMNLIGVDRGENIPAVIALTDPEGCPLSRFKDSLGNPTHILRIGESYKEKQRTIQAKKEVEQRRAGGYSRKYASKAKNLADDMVRNTARDLLYYAVTQDAMLIFENLSRGFGRQGKRTFMAERQYTRMEDWLTAKLAYEGLPSKTYLSKTLAQYTSKTCSNCGFTITSADYDRVLEKLKKTATGWMTTINGKELKVEGQITYYNRYKRQNVVKDLSVELDRLSEESVNNDISSWTKGRSGEALSLLKKRFSHRPVQEKFVCLNCGFETHADEQAALNIARSWLFLRSQEYKKYQTNKTTGNTDKRAFVETWQSFYRKKLKEVWKPAV

SEQ ID NO: 44053 - protein, 978 aa, synthetic construct
  REGION 1..978: note = engineered CasX variant
QEIKRINKIRRRLVKDSNTKKAGKTGPMKTLLVRVMTPDLRERLENLRKKPENIPQPISNTSRANLNKLLTDYTEMKKAILHVYWEEFQKDPVGLMSRVAQPASKKIDQNKLKPEMDEKGNLTTAGFACSQCGQPLFVYKLEQVSEKGKAYTNYFGRCNVAEHEKLILLAQLKPEKDSDEAVTYSLGKFGQRALDFYSIHVTKESTHPVKPLAQIAGNRYASVPVGKALSDACMGTIASFLSKYQDIIIEHQKVVKGNQKRLESLRELAGKENLEYPSVTLPPQPHTKEGVDAYNEVIARVRWWVNLNLWQKLKLSRDDAKPLLRLKGFPSFPLVERQANEVDWWDMVCNVKKLINEKKEDGKVFWQNLAGYKRQEALRPYLSSEEDREKGKKFARYQLGDLLLHLEKKHGEDWGKVYDEAWERIDKKVEGLSKHIKLEEERRSEDAQSKAALTDWLRAKASFVIEGLKEADKDEFCRCELKLQKWYGDLRGKPFAIEAENSILDISGFSKQYNCAFIWQKDGVKKLNLYLIINYFKGGKLRFKKIKPEAFEANRFYTVINKKSGEIVPMEVNFNFDDPNLIILPLAFGKRQGREFIWNDLLSLETGSLKLANGRVIEKTLYNRRTRQDEPALFVALTFERREVLDSSNIKPMNLIGVDRGENIPAVIALTDPEGCPLSRFKDSLGNPTHILRIGESYKEKQRTIQAKKEVEQRRAGGYSRKYASKAKNLADDMVRNTARDLLYYAVTQDAMLIFENLSRGFGRQGKRTFMAERQYTRMEDWLTAKLAYEGLPSKTYLSKTLAQYTSKTCSNCGFTITSADYDRVLEKLKKTATGWMTTINGKELKVEGQITYYNRYKRQNVVKDLSVELDRLSEESVNNDISSWTKGRSGEALSLLKKRFSHRPVQEKFVCLNCGFETHADEQAALNIARSWLFLRSQEYKKYQTNKTTGNTDKRAFVETWQSFYRKKLKEVWKPAV

SEQ ID NO: 44054 - protein, 978 aa, synthetic construct
  REGION 1..978: note = engineered CasX variant
QEIKRINKIRRRLVKDSNTKKAGKTGPMKTLLVRVMTPDLRERLENLRKKPENIPQPISNTSRANLNKLLTDYTEMKKAILHVYWEEFQKDPVGLMSRVAQPASKKIDQNKLKPEMDEKGNLTTAGFACSQCGQPLFVYKLEQVSEKGKAYTNYFGRCNVAEHEKLIKLAQLKPEKDSDEAVTYSLGKFGQRALDFYSIHVTKESTHPVKPLAQIAGNRYASGPVGKALSDACMGTIASFLSKYQDIIIEHQKVVKGNQKRLESLRELAGKENLEYPSVTLPPQPHTKEGVDAYNEVIARVRWWVNLNLWQKLKLSRDDAKPLLRLKGFPSFPLVERQANEVDWWDMVCNVKKLINEKKEDGKVFWQNLAGYKRQEALRPYLSSEEDREKGKKFARYQLGDLLLHLEKKHGEDWGKVYDEAWERIDKKVEGLSKHIKLEEERRSEDAQSKAALTDWLRAKASFVIEGLKEADKDEFCRCELKLQKWYGDLRGKPFAIEAENSILDISGFSKQYNCAFIWQKDGVKKLNLYLIINYFKGGKLRFKKIKPEAFEANRFYTVINKKSGEIVPMEVNFNFDDPNLIILPLAFGKRQGREFIWNDLLSLETGSLKLANGRVIEKTLYNRRTRQDEPALFVALTFERREVLDSSNIKPMNLIGVDRGENIPAVIALTDPEGCPLSRFKDSLGNPTHILRIGESYKEKQRTIQAKKEVEQRRAGGYSRKYASKAKNLADDMVRNTARDLLYYAVTQDAMLIFENLSRGFGRQGKRTFMAERQYTRMEDWLTAKLAYEGLPSKTYLSKTLAQYTSKTCSNCGFTITSADYDRVLEKLKKTATGWMTTINGKELKVEGQITYYNRYKRQNVVKDLSVELDRLSEESVNNDISSWTKGRSGEALSLLKKRFSHRPVQEKFVCLNCGFETHADEQAALNIARSWLFLRSQEYKKYQTNKTTGNTDKRAFVETWQSFYRKKLKEVWKPAV

SEQ ID NO: 44055 - protein, 977 aa, synthetic construct
  REGION 1..977: note = engineered CasX variant
QEIKRINKIRRRLVKDSNTKKAGKTGPMKTLLVRVMTPDLRERLENLRKKPENIPQPISNTSRANLNKLLTDYTEMKKAILHVYWEEFQKDPVGLMSRVAQPASKKIDQNKLKPEMDEKGNLTTAGFACSQCGQPLFVYKLEQVSEKGKAYTNYFGRCNVAEHEKLILLAQLKPEKDSDEAVTYSLGKFGQRALDFYSIHVTKESTHPVKPLAQIAGNRYASPVGKALSDACMGTIASFLSKYQDIIIEHQKVVKGNQKRLESLRELAGKENLEYPSVTLPPQPHTKEGVDAYNEVIARVRWWVNLNLWQKLKLSRDDAKPLLRLKGFPSFPLVERQANEVDWWDMVCNVKKLINEKKEDGKVFWQNLAGYKRQEALRPYLSSEEDREKGKKFARYQLGDLLLHLEKKHGEDWGKVYDEAWERIDKKVEGLSKHIKLEEERRSEDAQSKAALTDWLRAKASFVIEGLKEADKDEFCRCELKLQKWYGDLRGKPFAIEAENSILDISGFSKQYNCAFIWQKDGVKKLNLYLIINYFKGGKLRFKKIKPEAFEANRFYTVINKKSGEIVPMEVNFNFDDPNLIILPLAFGKRQGREFIWNDLLSLETGSLKLANGRVIEKTLYNRRTRQDEPALFVALTFERREVLDSSNIKPMNLIGVDRGENIPAVIALTDPEGCPLSRFKDSLGNPTHILRIGESYKEKQRTIQAKKEVEQRRAGGYSRKYASKAKNLADDMVRNTARDLLYYAVTQDAMLIFENLSRGFGRQGKRTFMAERQYTRMEDWLTAKLAYEGLPSKTYLSKTLAQYTSKTCSNCGFTITSADYDRVLEKLKKTATGWMTTINGKELKVEGQITYYNRYKRQNVVKDLSVELDRLSEESVNNDISSWTKGRSGEALSLLKKRFSHRPVQEKFVCLNCGFETHADEQAALNIARSWLFLRSQEYKKYQTNKTTGNTDKRAFVETWQSFYRKKLKEVWKPAV

SEQ ID NO: 44056 - protein, 978 aa, synthetic construct
  REGION 1..978: note = engineered CasX variant
QEIKRINKIRRRLVKDSNTKKAGKTGPMKTLLVRVMTPDLRERLENLRKKPENIPQPISNTSRANLNKLLTDYTEMKKAILHVYWEEFQKDPVGLMSRVAQPASKKIDQNKLKPEMDEKGNLTTAGFACSQCGQPLFVYKLEQVSEKGKAYTNYFGRCNVAEHEKLILLAQLKPEKDSDEAVTYSLGKFGQRALDFYSIHVTKESTHPVKPLAQIAGNRYASYPVGKALSDACMGTIASFLSKYQDIIIEHQKVVKGNQKRLESLRELAGKENLEYPSVTLPPQPHTKEGVDAYNEVIARVRWWVNLNLWQKLKLSRDDAKPLLRLKGFPSFPLVERQANEVDWWDMVCNVKKLINEKKEDGKVFWQNLAGYKRQEALRPYLSSEEDRKKGKKFARYQLGDLLLHLEKKHGEDWGKVYDEAWERIDKKVEGLSKHIKLEEERRSEDAQSKAALTDWLRAKASFVIEGLKEADKDEFCRCELKLQKWYGDLRGKPFAIEAENSILDISGFSKQYNCAFIWQKDGVKKLNLYLIINYFKGGKLRFKKIKPEAFEANRFYTVINKKSGEIVIMEVNFNFDDPNLIILPLAFGKRQGREFIWNDLLSLETGSLKLANGRVIEKTLYNRRTRQDEPALFVALTFERREVLDSSNIKPMNLIGVDRGENIPAVIALTDPEGCPLSRFKDSLGNPTHILRIGESYKEKQRTIQAKKEVEQRRAGGYSRKYASKAKNLADDMVRNTARDLLYYAVTQDAMLIFENLSRGFGRQGKRTFMAERQYTRMEDWLTAKLAYEGLPSKTYLSKTLAQYTSKTCSNCGFTITSADYDRVLEKLKKTATGWMTTINGKELKVEGQITYYNRYKRQNVVKDLSVELDRLSEESVNNDISSWTKGRSGEALSLLKKRFSHRPVQEKFVCLNCGFETHADEQAALNIARSWLFLRSQEYKKYQTNKTTGNTDKRAFVETWQSFYRKKLKEVWKPAV

SEQ ID NO: 44057 - protein, 978 aa, synthetic construct
  REGION 1..978: note = engineered CasX variant
QEIKRINKIRRRLVKDSNTKKAGKTGPMKTLLVRVMTPDLRERLENLRKKPENIPQPISNTSRANLNKLLTDYTEMKKAILHVYWEEFQKDPVGLMSRVAQPASKKIDQNKLKPEMDEKGNLTTAGFACSQCGQPLFVYKLEQVSEKGKAYTNYFGRCNVAEHEKLILLAQLKPEKDSDEAVTYSLGKFGQRALDFYSIHVTKESTHPVKPLAQIAGNRYASHPVGKALSDACMGTIASFLSKYQDIIIEHQKVVKGNQKRLESLRELAGKENLEYPSVTLPPQPHTKEGVDAYNEVIARVRWWVNLNLWQKLKLSRDDAKPLLRLKGFPSFPLVERQANEVDWWDMVCNVKKLINEKKEDGKVFWQNLAGYKRQEALRPYLSSEEDRKKGKKFARYQLGDLLLHLEKKHGEDWGKVYDEAWERIDKKVEGLSKHIKLEEERRSEDAQSKAALTDWLRAKASFVIEGLKEADKDEFCRCELKLQKWYGDLRGKPFAIEAENSILDISGFSKQYNCAFIWQKDGVKKLNLYLIINYFKGGKLRFKKIKPEAFEANRFYTVINKKSGEIVIMEVNFNFDDPNLIILPLAFGKRQGREFIWNDLLSLETGSLKLANGRVIEKTLYNRRTRQDEPALFVALTFERREVLDSSNIKPMNLIGVDRGENIPAVIALTDPEGCPLSRFKDSLGNPTHILRIGESYKEKQRTIQAKKEVEQRRAGGYSRKYASKAKNLADDMVRNTARDLLYYAVTQDAMLIFENLSRGFGRQGKRTFMAERQYTRMEDWLTAKLAYEGLPSKTYLSKTLAQYTSKTCSNCGFTITSADYDRVLEKLKKTATGWMTTINGKELKVEGQITYYNRYKRQNVVKDLSVELDRLSEESVNNDISSWTKGRSGEALSLLKKRFSHRPVQEKFVCLNCGFETHADEQAALNIARSWLFLRSQEYKKYQTNKTTGNTDKRAFVETWQSFYRKKLKEVWKPAV

SEQ ID NO: 44058 - protein, 978 aa, synthetic construct
  REGION 1..978: note = engineered CasX variant
QEIKRINKIRRRLVKDSNTKKAGKTGPMKTLLVRVMTPDLRERLENLRKKPENIPQPISNTSRANLNKLLTDYTEMKKAILHVYWEEFQKDPVGLMSRVAQPASKKIDQNKLKPEMDEKGNLTTAGFACSQCGQPLFVYKLEQVSEKGKAYTNYFGRCNVAEHEKLILLAQLKPEKDSDEAVTYSLGKFGQRALDFYSIHVTKESTHPVKPLAQIAGNRYASSPVGKALSDACMGTIASFLSKYQDIIIEHQKVVKGNQKRLESLRELAGKENLEYPSVTLPPQPHTKEGVDAYNEVIARVRWWVNLNLWQKLKLSRDDAKPLLRLKGFPSFPLVERQANEVDWWDMVCNVKKLINEKKEDGKVFWQNLAGYKRQEALRPYLSSEEDRKKGKKFARYQLGDLLLHLEKKHGEDWGKVYDEAWERIDKKVEGLSKHIKLEEERRSEDAQSKAALTDWLRAKASFVIEGLKEADKDEFCRCELKLQKWYGDLRGKPFAIEAENSILDISGFSKQYNCAFIWQKDGVKKLNLYLIINYFKGGKLRFKKIKPEAFEANRFYTVINKKSGEIVIMEVNFNFDDPNLIILPLAFGKRQGREFIWNDLLSLETGSLKLANGRVIEKTLYNRRTRQDEPALFVALTFERREVLDSSNIKPMNLIGVDRGENIPAVIALTDPEGCPLSRFKDSLGNPTHILRIGESYKEKQRTIQAKKEVEQRRAGGYSRKYASKAKNLADDMVRNTARDLLYYAVTQDAMLIFENLSRGFGRQGKRTFMAERQYTRMEDWLTAKLAYEGLPSKTYLSKTLAQYTSKTCSNCGFTITSADYDRVLEKLKKTATGWMTTINGKELKVEGQITYYNRYKRQNVVKDLSVELDRLSEESVNNDISSWTKGRSGEALSLLKKRFSHRPVQEKFVCLNCGFETHADEQAALNIARSWLFLRSQEYKKYQTNKTTGNTDKRAFVETWQSFYRKKLKEVWKPAV

SEQ ID NO: 44059 - protein, 978 aa, synthetic construct
  REGION 1..978: note = engineered CasX variant
QEIKRINKIRRRLVKDSNTKKAGKTGPMKTLLVRVMTPDLRERLENLRKKPENIPQPISNTSRANLNKLLTDYTEMKKAILHVYWEEFQKDPVGLMSRVAQPASKKIDQNKLKPEMDEKGNLTTAGFACSQCGQPLFVYKLEQVSEKGKAYTNYFGRCNVAEHEKLILLAQLKPEKDSDEAVTYSLGKFGQRALDFYSIHVTKESTHPVKPLAQIAGNRYASTPVGKALSDACMGTIASFLSKYQDIIIEHQKVVKGNQKRLESLRELAGKENLEYPSVTLPPQPHTKEGVDAYNEVIARVRWWVNLNLWQKLKLSRDDAKPLLRLKGFPSFPLVERQANEVDWWDMVCNVKKLINEKKEDGKVFWQNLAGYKRQEALRPYLSSEEDRKKGKKFARYQLGDLLLHLEKKHGEDWGKVYDEAWERIDKKVEGLSKHIKLEEERRSEDAQSKAALTDWLRAKASFVIEGLKEADKDEFCRCELKLQKWYGDLRGKPFAIEAENSILDISGFSKQYNCAFIWQKDGVKKLNLYLIINYFKGGKLRFKKIKPEAFEANRFYTVINKKSGEIVIMEVNFNFDDPNLIILPLAFGKRQGREFIWNDLLSLETGSLKLANGRVIEKTLYNRRTRQDEPALFVALTFERREVLDSSNIKPMNLIGVDRGENIPAVIALTDPEGCPLSRFKDSLGNPTHILRIGESYKEKQRTIQAKKEVEQRRAGGYSRKYASKAKNLADDMVRNTARDLLYYAVTQDAMLIFENLSRGFGRQGKRTFMAERQYTRMEDWLTAKLAYEGLPSKTYLSKTLAQYTSKTCSNCGFTITSADYDRVLEKLKKTATGWMTTINGKELKVEGQITYYNRYKRQNVVKDLSVELDRLSEESVNNDISSWTKGRSGEALSLLKKRFSHRPVQEKFVCLNCGFETHADEQAALNIARSWLFLRSQEYKKYQTNKTTGNTDKRAFVETWQSFYRKKLKEVWKPAV

SEQ ID NO: 44060 - protein, 978 aa, synthetic construct
  REGION 1..978: note = engineered CasX variant
QEIKRINKIRRRLVKDSNTKKAGKTGPMKTLLVRVMTPDLRERLENLRKKPENIPQPISNTSRANLNKLLTDYTEMKKAILHVYWEEFQKDPVGLMSRVAQPASKKIDQNKLKPEMDEKGNLTTAGFACSQCGQPLFVYKLEQVSEKGKAYTNYFGRCNVAEHEKLILLAQLKPEKDSDEAVTYSLGKFGQRALDFYSIHVTKESTHPVKPLAQIAGNRYASAPVGKALSDACMGTIASFLSKYQDIIIEHQKVVKGNQKRLESLRELAGKENLEYPSVTLPPQPHTKEGVDAYNEVIARVRWWVNLNLWQKLKLSRDDAKPLLRLKGFPSFPLVERQANEVDWWDMVCNVKKLINEKKEDGKVFWQNLAGYKRQEALRPYLSSEEDRKKGKKFARYQLGDLLLHLEKKHGEDWGKVYDEAWERIDKKVEGLSKHIKLEEERRSEDAQSKAALTDWLRAKASFVIEGLKEADKDEFCRCELKLQKWYGDLRGKPFAIEAENSILDISGFSKQYNCAFIWQKDGVKKLNLYLIINYFKGGKLRFKKIKPEAFEANRFYTVINKKSGEIVIMEVNFNFDDPNLIILPLAFGKRQGREFIWNDLLSLETGSLKLANGRVIEKTLYNRRTRQDEPALFVALTFERREVLDSSNIKPMNLIGVDRGENIPAVIALTDPEGCPLSRFKDSLGNPTHILRIGESYKEKQRTIQAKKEVEQRRAGGYSRKYASKAKNLADDMVRNTARDLLYYAVTQDAMLIFENLSRGFGRQGKRTFMAERQYTRMEDWLTAKLAYEGLPSKTYLSKTLAQYTSKTCSNCGFTITSADYDRVLEKLKKTATGWMTTINGKELKVEGQITYYNRYKRQNVVKDLSVELDRLSEESVNNDISSWTKGRSGEALSLLKKRFSHRPVQEKFVCLNCGFETHADEQAALNIARSWLFLRSQEYKKYQTNKTTGNTDKRAFVETWQSFYRKKLKEVWKPAV

SEQ ID NO: 44061 - protein, 978 aa, synthetic construct
  REGION 1..978: note = engineered CasX variant
QEIKRINKIRRRLVKDSNTKKAGKTGPMKTLLVRVMTPDLRERLENLRKKPENIPQPISNTSRANLNKLLTDYTEMKKAILHVYWEEFQKDPVGLMSRVAQPASKKIDQNKLKPEMDEKGNLTTAGFACSQCGQPLFVYKLEQVSEKGKAYTNYFGRCNVAEHEKLILLAQLKPEKDSDEAVTYSLGKFGQRALDFYSIHVTKESTHPVKPLAQIAGNRYASVPVGKALSDACMGTIASFLSKYQDIIIEHQKVVKGNQKRLESLRELAGKENLEYPSVTLPPQPHTKEGVDAYNEVIARVRWWVNLNLWQKLKLSRDDAKPLLRLKGFPSFPLVERQANEVDWWDMVCNVKKLINEKKEDGKVFWQNLAGYKRQEALRPYLSSEEDRKKGKKFARYQLGDLLLHLEKKHGEDWGKVYDEAWERIDKKVEGLSKHIKLEEERRSEDAQSKAALTDWLRAKASFVIEGLKEADKDEFCRCELKLQKWYGDLRGKPFAIEAENSILDISGFSKQYNCAFIWQKDGVKKLNLYLIINYFKGGKLRFKKIKPEAFEANRFYTVINKKSGEIVIMEVNFNFDDPNLIILPLAFGKRQGREFIWNDLLSLETGSLKLANGRVIEKTLYNRRTRQDEPALFVALTFERREVLDSSNIKPMNLIGVDRGENIPAVIALTDPEGCPLSRFKDSLGNPTHILRIGESYKEKQRTIQAKKEVEQRRAGGYSRKYASKAKNLADDMVRNTARDLLYYAVTQDAMLIFENLSRGFGRQGKRTFMAERQYTRMEDWLTAKLAYEGLPSKTYLSKTLAQYTSKTCSNCGFTITSADYDRVLEKLKKTATGWMTTINGKELKVEGQITYYNRYKRQNVVKDLSVELDRLSEESVNNDISSWTKGRSGEALSLLKKRFSHRPVQEKFVCLNCGFETHADEQAALNIARSWLFLRSQEYKKYQTNKTTGNTDKRAFVETWQSFYRKKLKEVWKPAV

SEQ ID NO: 44062 - protein, 978 aa, synthetic construct
  REGION 1..978: note = engineered CasX variant
QEIKRINKIRRRLVKDSNTKKAGKTGPMKTLLVRVMTPDLRERLENLRKKPENIPQPISNTSRANLNKLLTDYTEMKKAILHVYWEEFQKDPVGLMSRVAQPASKKIDQNKLKPEMDEKGNLTTAGFACSQCGQPLFVYKLEQVSEKGKAYTNYFGRCNVAEHEKLIKLAQLKPEKDSDEAVTYSLGKFGQRALDFYSIHVTKESTHPVKPLAQIAGNRYASGPVGKALSDACMGTIASFLSKYQDIIIEHQKVVKGNQKRLESLRELAGKENLEYPSVTLPPQPHTKEGVDAYNEVIARVRWWVNLNLWQKLKLSRDDAKPLLRLKGFPSFPLVERQANEVDWWDMVCNVKKLINEKKEDGKVFWQNLAGYKRQEALRPYLSSEEDRKKGKKFARYQLGDLLLHLEKKHGEDWGKVYDEAWERIDKKVEGLSKHIKLEEERRSEDAQSKAALTDWLRAKASFVIEGLKEADKDEFCRCELKLQKWYGDLRGKPFAIEAENSILDISGFSKQYNCAFIWQKDGVKKLNLYLIINYFKGGKLRFKKIKPEAFEANRFYTVINKKSGEIVIMEVNFNFDDPNLIILPLAFGKRQGREFIWNDLLSLETGSLKLANGRVIEKTLYNRRTRQDEPALFVALTFERREVLDSSNIKPMNLIGVDRGENIPAVIALTDPEGCPLSRFKDSLGNPTHILRIGESYKEKQRTIQAKKEVEQRRAGGYSRKYASKAKNLADDMVRNTARDLLYYAVTQDAMLIFENLSRGFGRQGKRTFMAERQYTRMEDWLTAKLAYEGLPSKTYLSKTLAQYTSKTCSNCGFTITSADYDRVLEKLKKTATGWMTTINGKELKVEGQITYYNRYKRQNVVKDLSVELDRLSEESVNNDISSWTKGRSGEALSLLKKRFSHRPVQEKFVCLNCGFETHADEQAALNIARSWLFLRSQEYKKYQTNKTTGNTDKRAFVETWQSFYRKKLKEVWKPAV

SEQ ID NO: 44063 - protein, 977 aa, synthetic construct
  REGION 1..977: note = engineered CasX variant
QEIKRINKIRRRLVKDSNTKKAGKTGPMKTLLVRVMTPDLRERLENLRKKPENIPQPISNTSRANLNKLLTDYTEMKKAILHVYWEEFQKDPVGLMSRVAQPASKKIDQNKLKPEMDEKGNLTTAGFACSQCGQPLFVYKLEQVSEKGKAYTNYFGRCNVAEHEKLILLAQLKPEKDSDEAVTYSLGKFGQRALDFYSIHVTKESTHPVKPLAQIAGNRYASPVGKALSDACMGTIASFLSKYQDIIIEHQKVVKGNQKRLESLRELAGKENLEYPSVTLPPQPHTKEGVDAYNEVIARVRWWVNLNLWQKLKLSRDDAKPLLRLKGFPSFPLVERQANEVDWWDMVCNVKKLINEKKEDGKVFWQNLAGYKRQEALRPYLSSEEDRKKGKKFARYQLGDLLLHLEKKHGEDWGKVYDEAWERIDKKVEGLSKHIKLEEERRSEDAQSKAALTDWLRAKASFVIEGLKEADKDEFCRCELKLQKWYGDLRGKPFAIEAENSILDISGFSKQYNCAFIWQKDGVKKLNLYLIINYFKGGKLRFKKIKPEAFEANRFYTVINKKSGEIVIMEVNFNFDDPNLIILPLAFGKRQGREFIWNDLLSLETGSLKLANGRVIEKTLYNRRTRQDEPALFVALTFERREVLDSSNIKPMNLIGVDRGENIPAVIALTDPEGCPLSRFKDSLGNPTHILRIGESYKEKQRTIQAKKEVEQRRAGGYSRKYASKAKNLADDMVRNTARDLLYYAVTQDAMLIFENLSRGFGRQGKRTFMAERQYTRMEDWLTAKLAYEGLPSKTYLSKTLAQYTSKTCSNCGFTITSADYDRVLEKLKKTATGWMTTINGKELKVEGQITYYNRYKRQNVVKDLSVELDRLSEESVNNDISSWTKGRSGEALSLLKKRFSHRPVQEKFVCLNCGFETHADEQAALNIARSWLFLRSQEYKKYQTNKTTGNTDKRAFVETWQSFYRKKLKEVWKPAV

SEQ ID NO: 44064 - protein, 979 aa, synthetic construct
  REGION 1..979: note = engineered CasX variant
QEIKRINKIRRRLVKDSNTKKAGKTGPMKTLLVRVMTPDLRERLENLRKKPENIPQPISNTSRANLNKLLTDYTEMKKAILHVYWEEFQKDPVGLMSRVAQPASKKIDQNKLKPEMDEKGNLTTAGFACSQCGQPLFVYKLEQVSEKGKAYTNYFGRCNVAEHEKLILLAQLKPEKDSDEAVTYSLGKFGQRALDFYSIHVTKESTHPVKPLAQIAGNRYASYPVGKALSGACMGTIASFLSKYQDIIIEHQKVVKGNQKRLESLRELAGKENLEYPSVTLPPQPHTKEGVDAYNEVIARVRMWVNLNLWQKLKLSRDDAKPLLRLKGFPSFPLVERQQANEVDWWDMVCNVKKLINEKKEDGKVFWQNLAGYKRQEALRPYLSSEEDRKKGKKFARYQLGDLLLHLEKKHGEDWGKVYDEAWERIDKKVEGLSKHIKLEEERRSEDAQSKAALTDWLRAKASFVIEGLKEADKDEFCRCELKLQKWYGDLRGKPFAIEAENSILDISGFSKQYNCAFIWQKDGVKKLNLYLIINYFKGGKLRFKKIKPEAFEANRFYTVINKKSGEIVPMEVNFNFDDPNLIILPLAFGKRQGREFIWNDLLSLETGSLKLANGRVIEKTLYNRRTRQDEPALFVALTFERREVLDSSNIKPMNLIGVDRGENIPAVIALTDPEGCPLSRFKDSLGNPTHILRIGESYKEKQRTIQAKKEVEQRRAGGYSRKYASKAKNLADDMVRNTARDLLYYAVTQDAMLIFENLSRGFGRQGKRTFMAERQYTRMEDWLTAKLAYEGLPSKTYLSKTLAQYTSKTCSNCGFTITSADYDRVLEKLKKTATGWMTTINGKELKVEGQITYYNRYKRQNVVKDLSVELDRLSEESVNNDISSWTKGRSGEALSLLKKRFSHRPVQEKFVCLNCGFETHADEQAALNIARSWLFLRSQEYKKYQTNKTTGNTDKRAFVETWQSFYRKKLKEVWKPAV

SEQ ID NO: 44065 - protein, 979 aa, synthetic construct
  REGION 1..979: note = engineered CasX variant
QEIKRINKIRRRLVKDSNTKKAGKTGPMKTLLVRVMTPDLRERLENLRKKPENIPQPISNTSRANLNKLLTDYTEMKKAILHVYWEEFQKDPVGLMSRVAQPASKKIDQNKLKPEMDEKGNLTTAGFACSQCGQPLFVYKLEQVSEKGKAYTNYFGRCNVAEHEKLILLAQLKPEKDSDEAVTYSLGKFGQRALDFYSIHVTKESTHPVKPLAQIAGNRYASHPVGKALSGACMGTIASFLSKYQDIIIEHQKVVKGNQKRLESLRELAGKENLEYPSVTLPPQPHTKEGVDAYNEVIARVRMWVNLNLWQKLKLSRDDAKPLLRLKGFPSFPLVERQQANEVDWWDMVCNVKKLINEKKEDGKVFWQNLAGYKRQEALRPYLSSEEDRKKGKKFARYQLGDLLLHLEKKHGEDWGKVYDEAWERIDKKVEGLSKHIKLEEERRSEDAQSKAALTDWLRAKASFVIEGLKEADKDEFCRCELKLQKWYGDLRGKPFAIEAENSILDISGFSKQYNCAFIWQKDGVKKLNLYLIINYFKGGKLRFKKIKPEAFEANRFYTVINKKSGEIVPMEVNFNFDDPNLIILPLAFGKRQGREFIWNDLLSLETGSLKLANGRVIEKTLYNRRTRQDEPALFVALTFERREVLDSSNIKPMNLIGVDRGENIPAVIALTDPEGCPLSRFKDSLGNPTHILRIGESYKEKQRTIQAKKEVEQRRAGGYSRKYASKAKNLADDMVRNTARDLLYYAVTQDAMLIFENLSRGFGRQGKRTFMAERQYTRMEDWLTAKLAYEGLPSKTYLSKTLAQYTSKTCSNCGFTITSADYDRVLEKLKKTATGWMTTINGKELKVEGQITYYNRYKRQNVVKDLSVELDRLSEESVNNDISSWTKGRSGEALSLLKKRFSHRPVQEKFVCLNCGFETHADEQAALNIARSWLFLRSQEYKKYQTNKTTGNTDKRAFVETWQSFYRKKLKEVWKPAV

SEQ ID NO: 44066 - protein, 979 aa, synthetic construct
  REGION 1..979: note = engineered CasX variant
QEIKRINKIRRRLVKDSNTKKAGKTGPMKTLLVRVMTPDLRERLENLRKKPENIPQPISNTSRANLNKLLTDYTEMKKAILHVYWEEFQKDPVGLMSRVAQPASKKIDQNKLKPEMDEKGNLTTAGFACSQCGQPLFVYKLEQVSEKGKAYTNYFGRCNVAEHEKLILLAQLKPEKDSDEAVTYSLGKFGQRALDFYSIHVTKESTHPVKPLAQIAGNRYASSPVGKALSGACMGTIASFLSKYQDIIIEHQKVVKGNQKRLESLRELAGKENLEYPSVTLPPQPHTKEGVDAYNEVIARVRMWVNLNLWQKLKLSRDDAKPLLRLKGFPSFPLVERQQANEVDWWDMVCNVKKLINEKKEDGKVFWQNLAGYKRQEALRPYLSSEEDRKKGKKFARYQLGDLLLHLEKKHGEDWGKVYDEAWERIDKKVEGLSKHIKLEEERRSEDAQSKAALTDWLRAKASFVIEGLKEADKDEFCRCELKLQKWYGDLRGKPFAIEAENSILDISGFSKQYNCAFIWQKDGVKKLNLYLIINYFKGGKLRFKKIKPEAFEANRFYTVINKKSGEIVPMEVNFNFDDPNLIILPLAFGKRQGREFIWNDLLSLETGSLKLANGRVIEKTLYNRRTRQDEPALFVALTFERREVLDSSNIKPMNLIGVDRGENIPAVIALTDPEGCPLSRFKDSLGNPTHILRIGESYKEKQRTIQAKKEVEQRRAGGYSRKYASKAKNLADDMVRNTARDLLYYAVTQDAMLIFENLSRGFGRQGKRTFMAERQYTRMEDWLTAKLAYEGLPSKTYLSKTLAQYTSKTCSNCGFTITSADYDRVLEKLKKTATGWMTTINGKELKVEGQITYYNRYKRQNVVKDLSVELDRLSEESVNNDISSWTKGRSGEALSLLKKRFSHRPVQEKFVCLNCGFETHADEQAALNIARSWLFLRSQEYKKYQTNKTTGNTDKRAFVETWQSFYRKKLKEVWKPAV

SEQ ID NO: 44067 - protein, 979 aa, synthetic construct
  REGION 1..979: note = engineered CasX variant
QEIKRINKIRRRLVKDSNTKKAGKTGPMKTLLVRVMTPDLRERLENLRKKPENIPQPISNTSRANLNKLLTDYTEMKKAILHVYWEEFQKDPVGLMSRVAQPASKKIDQNKLKPEMDEKGNLTTAGFACSQCGQPLFVYKLEQVSEKGKAYTNYFGRCNVAEHEKLILLAQLKPEKDSDEAVTYSLGKFGQRALDFYSIHVTKESTHPVKPLAQIAGNRYASTPVGKALSGACMGTIASFLSKYQDIIIEHQKVVKGNQKRLESLRELAGKENLEYPSVTLPPQPHTKEGVDAYNEVIARVRMWVNLNLWQKLKLSRDDAKPLLRLKGFPSFPLVERQQANEVDWWDMVCNVKKLINEKKEDGKVFWQNLAGYKRQEALRPYLSSEEDRKKGKKFARYQLGDLLLHLEKKHGEDWGKVYDEAWERIDKKVEGLSKHIKLEEERRSEDAQSKAALTDWLRAKASFVIEGLKEADKDEFCRCELKLQKWYGDLRGKPFAIEAENSILDISGFSKQYNCAFIWQKDGVKKLNLYLIINYFKGGKLRFKKIKPEAFEANRFYTVINKKSGEIVPMEVNFNFDDPNLIILPLAFGKRQGREFIWNDLLSLETGSLKLANGRVIEKTLYNRRTRQDEPALFVALTFERREVLDSSNIKPMNLIGVDRGENIPAVIALTDPEGCPLSRFKDSLGNPTHILRIGESYKEKQRTIQAKKEVEQRRAGGYSRKYASKAKNLADDMVRNTARDLLYYAVTQDAMLIFENLSRGFGRQGKRTFMAERQYTRMEDWLTAKLAYEGLPSKTYLSKTLAQYTSKTCSNCGFTITSADYDRVLEKLKKTATGWMTTINGKELKVEGQITYYNRYKRQNVVKDLSVELDRLSEESVNNDISSWTKGRSGEALSLLKKRFSHRPVQEKFVCLNCGFETHADEQAALNIARSWLFLRSQEYKKYQTNKTTGNTDKRAFVETWQSFYRKKLKEVWKPAV

SEQ ID NO: 44068 - protein, 979 aa, synthetic construct
  REGION 1..979: note = engineered CasX variant
QEIKRINKIRRRLVKDSNTKKAGKTGPMKTLLVRVMTPDLRERLENLRKKPENIPQPISNTSRANLNKLLTDYTEMKKAILHVYWEEFQKDPVGLMSRVAQPASKKIDQNKLKPEMDEKGNLTTAGFACSQCGQPLFVYKLEQVSEKGKAYTNYFGRCNVAEHEKLILLAQLKPEKDSDEAVTYSLGKFGQRALDFYSIHVTKESTHPVKPLAQIAGNRYASAPVGKALSGACMGTIASFLSKYQDIIIEHQKVVKGNQKRLESLRELAGKENLEYPSVTLPPQPHTKEGVDAYNEVIARVRMWVNLNLWQKLKLSRDDAKPLLRLKGFPSFPLVERQQANEVDWWDMVCNVKKLINEKKEDGKVFWQNLAGYKRQEALRPYLSSEEDRKKGKKFARYQLGDLLLHLEKKHGEDWGKVYDEAWERIDKKVEGLSKHIKLEEERRSEDAQSKAALTDWLRAKASFVIEGLKEADKDEFCRCELKLQKWYGDLRGKPFAIEAENSILDISGFSKQYNCAFIWQKDGVKKLNLYLIINYFKGGKLRFKKIKPEAFEANRFYTVINKKSGEIVPMEVNFNFDDPNLIILPLAFGKRQGREFIWNDLLSLETGSLKLANGRVIEKTLYNRRTRQDEPALFVALTFERREVLDSSNIKPMNLIGVDRGENIPAVIALTDPEGCPLSRFKDSLGNPTHILRIGESYKEKQRTIQAKKEVEQRRAGGYSRKYASKAKNLADDMVRNTARDLLYYAVTQDAMLIFENLSRGFGRQGKRTFMAERQYTRMEDWLTAKLAYEGLPSKTYLSKTLAQYTSKTCSNCGFTITSADYDRVLEKLKKTATGWMTTINGKELKVEGQITYYNRYKRQNVVKDLSVELDRLSEESVNNDISSWTKGRSGEALSLLKKRFSHRPVQEKFVCLNCGFETHADEQAALNIARSWLFLRSQEYKKYQTNKTTGNTDKRAFVETWQSFYRKKLKEVWKPAV

SEQ ID NO: 44069 - protein, 979 aa, synthetic construct
  REGION 1..979: note = engineered CasX variant
QEIKRINKIRRRLVKDSNTKKAGKTGPMKTLLVRVMTPDLRERLENLRKKPENIPQPISNTSRANLNKLLTDYTEMKKAILHVYWEEFQKDPVGLMSRVAQPASKKIDQNKLKPEMDEKGNLTTAGFACSQCGQPLFVYKLEQVSEKGKAYTNYFGRCNVAEHEKLILLAQLKPEKDSDEAVTYSLGKFGQRALDFYSIHVTKESTHPVKPLAQIAGNRYASVPVGKALSGACMGTIASFLSKYQDIIIEHQKVVKGNQKRLESLRELAGKENLEYPSVTLPPQPHTKEGVDAYNEVIARVRMWVNLNLWQKLKLSRDDAKPLLRLKGFPSFPLVERQQANEVDWWDMVCNVKKLINEKKEDGKVFWQNLAGYKRQEALRPYLSSEEDRKKGKKFARYQLGDLLLHLEKKHGEDWGKVYDEAWERIDKKVEGLSKHIKLEEERRSEDAQSKAALTDWLRAKASFVIEGLKEADKDEFCRCELKLQKWYGDLRGKPFAIEAENSILDISGFSKQYNCAFIWQKDGVKKLNLYLIINYFKGGKLRFKKIKPEAFEANRFYTVINKKSGEIVPMEVNFNFDDPNLIILPLAFGKRQGREFIWNDLLSLETGSLKLANGRVIEKTLYNRRTRQDEPALFVALTFERREVLDSSNIKPMNLIGVDRGENIPAVIALTDPEGCPLSRFKDSLGNPTHILRIGESYKEKQRTIQAKKEVEQRRAGGYSRKYASKAKNLADDMVRNTARDLLYYAVTQDAMLIFENLSRGFGRQGKRTFMAERQYTRMEDWLTAKLAYEGLPSKTYLSKTLAQYTSKTCSNCGFTITSADYDRVLEKLKKTATGWMTTINGKELKVEGQITYYNRYKRQNVVKDLSVELDRLSEESVNNDISSWTKGRSGEALSLLKKRFSHRPVQEKFVCLNCGFETHADEQAALNIARSWLFLRSQEYKKYQTNKTTGNTDKRAFVETWQSFYRKKLKEVWKPAV

SEQ ID NO: 44070 - protein, 979 aa, synthetic construct
  REGION 1..979: note = engineered CasX variant
QEIKRINKIRRRLVKDSNTKKAGKTGPMKTLLVRVMTPDLRERLENLRKKPENIPQPISNTSRANLNKLLTDYTEMKKAILHVYWEEFQKDPVGLMSRVAQPASKKIDQNKLKPEMDEKGNLTTAGFACSQCGQPLFVYKLEQVSEKGKAYTNYFGRCNVAEHEKLIKLAQLKPEKDSDEAVTYSLGKFGQRALDFYSIHVTKESTHPVKPLAQIAGNRYASGPVGKALSGACMGTIASFLSKYQDIIIEHQKVVKGNQKRLESLRELAGKENLEYPSVTLPPQPHTKEGVDAYNEVIARVRMWVNLNLWQKLKLSRDDAKPLLRLKGFPSFPLVERQQANEVDWWDMVCNVKKLINEKKEDGKVFWQNLAGYKRQEALRPYLSSEEDRKKGKKFARYQLGDLLLHLEKKHGEDWGKVYDEAWERIDKKVEGLSKHIKLEEERRSEDAQSKAALTDWLRAKASFVIEGLKEADKDEFCRCELKLQKWYGDLRGKPFAIEAENSILDISGFSKQYNCAFIWQKDGVKKLNLYLIINYFKGGKLRFKKIKPEAFEANRFYTVINKKSGEIVPMEVNFNFDDPNLIILPLAFGKRQGREFIWNDLLSLETGSLKLANGRVIEKTLYNRRTRQDEPALFVALTFERREVLDSSNIKPMNLIGVDRGENIPAVIALTDPEGCPLSRFKDSLGNPTHILRIGESYKEKQRTIQAKKEVEQRRAGGYSRKYASKAKNLADDMVRNTARDLLYYAVTQDAMLIFENLSRGFGRQGKRTFMAERQYTRMEDWLTAKLAYEGLPSKTYLSKTLAQYTSKTCSNCGFTITSADYDRVLEKLKKTATGWMTTINGKELKVEGQITYYNRYKRQNVVKDLSVELDRLSEESVNNDISSWTKGRSGEALSLLKKRFSHRPVQEKFVCLNCGFETHADEQAALNIARSWLFLRSQEYKKYQTNKTTGNTDKRAFVETWQSFYRKKLKEVWKPAV

SEQ ID NO: 44071 - protein, 978 aa, synthetic construct
  REGION 1..978: note = engineered CasX variant
QEIKRINKIRRRLVKDSNTKKAGKTGPMKTLLVRVMTPDLRERLENLRKKPENIPQPISNTSRANLNKLLTDYTEMKKAILHVYWEEFQKDPVGLMSRVAQPASKKIDQNKLKPEMDEKGNLTTAGFACSQCGQPLFVYKLEQVSEKGKAYTNYFGRCNVAEHEKLILLAQLKPEKDSDEAVTYSLGKFGQRALDFYSIHVTKESTHPVKPLAQIAGNRYASPVGKALSGACMGTIASFLSKYQDIIIEHQKVVKGNQKRLESLRELAGKENLEYPSVTLPPQPHTKEGVDAYNEVIARVRMWVNLNLWQKLKLSRDDAKPLLRLKGFPSFPLVERQQANEVDWWDMVCNVKKLINEKKEDGKVFWQNLAGYKRQEALRPYLSSEEDRKKGKKFARYQLGDLLLHLEKKHGEDWGKVYDEAWERIDKKVEGLSKHIKLEEERRSEDAQSKAALTDWLRAKASFVIEGLKEADKDEFCRCELKLQKWYGDLRGKPFAIEAENSILDISGFSKQYNCAFIWQKDGVKKLNLYLIINYFKGGKLRFKKIKPEAFEANRFYTVINKKSGEIVPMEVNFNFDDPNLIILPLAFGKRQGREFIWNDLLSLETGSLKLANGRVIEKTLYNRRTRQDEPALFVALTFERREVLDSSNIKPMNLIGVDRGENIPAVIALTDPEGCPLSRFKDSLGNPTHILRIGESYKEKQRTIQAKKEVEQRRAGGYSRKYASKAKNLADDMVRNTARDLLYYAVTQDAMLIFENLSRGFGRQGKRTFMAERQYTRMEDWLTAKLAYEGLPSKTYLSKTLAQYTSKTCSNCGFTITSADYDRVLEKLKKTATGWMTTINGKELKVEGQITYYNRYKRQNVVKDLSVELDRLSEESVNNDISSWTKGRSGEALSLLKKRFSHRPVQEKFVCLNCGFETHADEQAALNIARSWLFLRSQEYKKYQTNKTTGNTDKRAFVETWQSFYRKKLKEVWKPAV

SEQ ID NO: 44072 - protein, 979 aa, synthetic construct
  REGION 1..979: note = engineered CasX variant
QEIKRINKIRRRLVKDSNTKKAGKTGPMKTLLVRVMTPDLRERLENLRKKPENIPQPISNTSRANLNKLLTDYTEMKKAILHVYWEEFQKDPVGLMSRVAQPASKKIDQNKLKPEMDEKGNLTTAGFACSQCGQPLFVYKLEQVSEKGKAYTNYFGRCNVAEHEKLILLAQLKPEKDSDEAVTYSLGKFGQRALDFYSIHVTKESTHPVKPLAQIAGNRYASYPVGKALSDACMGTIASFLSKYQDIIIEHQKVVKGNQKRLESLRELAGKENLEYPSVTLPPQPHTKEGVDAYNEVIARVRMWVNLNLWQKLKLSRDDAKPLLRLKNFPSFPLVERQQANEVDWWDMVCNVKKLINEKKEDGKVFWQNLAGYKRQEALRPYLSSEEDRKKGKKFARYQLGDLLLHLEKKHGEDWGKVYDEAWERIDKKVEGLSKHIKLEEERRSEDAQSKAALTDWLRAKASFVIEGLKEADKDEFCRCELKLQKWYGDLRGKPFAIEAENSILDISGFSKQYNCAFIWQKDGVKKLNLYLIINYFKGGKLRFKKIKPEAFEANRFYTVINKKSGEIVPMEVNFNFDDPNLIILPLAFGKRQGREFIWNDLLSLETGSLKLANGRVIEKTLYNRRTRQDEPALFVALTFERREVLDSSNIKPMNLIGVDRGENIPAVIALTDPEGCPLSRFKDSLGNPTHILRIGESYKEKQRTIQAKKEVEQRRAGGYSRKYASKAKNLADDMVRNTARDLLYYAVTQDAMLIFENLSRGFGRQGKRTFMAERQYTRMEDWLTAKLAYEGLPSKTYLSKTLAQYTSKTCSNCGFTITSADYDRVLEKLKKTATGWMTTINGKELKVEGQITYYNRYKRQNVVKDLSVELDRLSEESVNNDISSWTKGRSGEALSLLKKRFSHRPVQEKFVCLNCGFETHADEQAALNIARSWLFLRSQEYKKYQTNKTTGNTDKRAFVETWQSFYRKKLKEVWKPAV

SEQ ID NO: 44073 - protein, 979 aa, synthetic construct
  REGION 1..979: note = engineered CasX variant
QEIKRINKIRRRLVKDSNTKKAGKTGPMKTLLVRVMTPDLRERLENLRKKPENIPQPISNTSRANLNKLLTDYTEMKKAILHVYWEEFQKDPVGLMSRVAQPASKKIDQNKLKPEMDEKGNLTTAGFACSQCGQPLFVYKLEQVSEKGKAYTNYFGRCNVAEHEKLILLAQLKPEKDSDEAVTYSLGKFGQRALDFYSIHVTKESTHPVKPLAQIAGNRYASHPVGKALSDACMGTIASFLSKYQDIIIEHQKVVKGNQKRLESLRELAGKENLEYPSVTLPPQPHTKEGVDAYNEVIARVRMWVNLNLWQKLKLSRDDAKPLLRLKNFPSFPLVERQQANEVDWWDMVCNVKKLINEKKEDGKVFWQNLAGYKRQEALRPYLSSEEDRKKGKKFARYQLGDLLLHLEKKHGEDWGKVYDEAWERIDKKVEGLSKHIKLEEERRSEDAQSKAALTDWLRAKASFVIEGLKEADKDEFCRCELKLQKWYGDLRGKPFAIEAENSILDISGFSKQYNCAFIWQKDGVKKLNLYLIINYFKGGKLRFKKIKPEAFEANRFYTVINKKSGEIVPMEVNFNFDDPNLIILPLAFGKRQGREFIWNDLLSLETGSLKLANGRVIEKTLYNRRTRQDEPALFVALTFERREVLDSSNIKPMNLIGVDRGENIPAVIALTDPEGCPLSRFKDSLGNPTHILRIGESYKEKQRTIQAKKEVEQRRAGGYSRKYASKAKNLADDMVRNTARDLLYYAVTQDAMLIFENLSRGFGRQGKRTFMAERQYTRMEDWLTAKLAYEGLPSKTYLSKTLAQYTSKTCSNCGFTITSADYDRVLEKLKKTATGWMTTINGKELKVEGQITYYNRYKRQNVVKDLSVELDRLSEESVNNDISSWTKGRSGEALSLLKKRFSHRPVQEKFVCLNCGFETHADEQAALNIARSWLFLRSQEYKKYQTNKTTGNTDKRAFVETWQSFYRKKLKEVWKPAV

SEQ ID NO: 44074 - protein, 979 aa, synthetic construct
  REGION 1..979: note = engineered CasX variant
QEIKRINKIRRRLVKDSNTKKAGKTGPMKTLLVRVMTPDLRERLENLRKKPENIPQPISNTSRANLNKLLTDYTEMKKAILHVYWEEFQKDPVGLMSRVAQPASKKIDQNKLKPEMDEKGNLTTAGFACSQCGQPLFVYKLEQVSEKGKAYTNYFGRCNVAEHEKLILLAQLKPEKDSDEAVTYSLGKFGQRALDFYSIHVTKESTHPVKPLAQIAGNRYASSPVGKALSDACMGTIASFLSKYQDIIIEHQKVVKGNQKRLESLRELAGKENLEYPSVTLPPQPHTKEGVDAYNEVIARVRMWVNLNLWQKLKLSRDDAKPLLRLKNFPSFPLVERQQANEVDWWDMVCNVKKLINEKKEDGKVFWQNLAGYKRQEALRPYLSSEEDRKKGKKFARYQLGDLLLHLEKKHGEDWGKVYDEAWERIDKKVEGLSKHIKLEEERRSEDAQSKAALTDWLRAKASFVIEGLKEADKDEFCRCELKLQKWYGDLRGKPFAIEAENSILDISGFSKQYNCAFIWQKDGVKKLNLYLIINYFKGGKLRFKKIKPEAFEANRFYTVINKKSGEIVPMEVNFNFDDPNLIILPLAFGKRQGREFIWNDLLSLETGSLKLANGRVIEKTLYNRRTRQDEPALFVALTFERREVLDSSNIKPMNLIGVDRGENIPAVIALTDPEGCPLSRFKDSLGNPTHILRIGESYKEKQRTIQAKKEVEQRRAGGYSRKYASKAKNLADDMVRNTARDLLYYAVTQDAMLIFENLSRGFGRQGKRTFMAERQYTRMEDWLTAKLAYEGLPSKTYLSKTLAQYTSKTCSNCGFTITSADYDRVLEKLKKTATGWMTTINGKELKVEGQITYYNRYKRQNVVKDLSVELDRLSEESVNNDISSWTKGRSGEALSLLKKRFSHRPVQEKFVCLNCGFETHADEQAALNIARSWLFLRSQEYKKYQTNKTTGNTDKRAFVETWQSFYRKKLKEVWKPAV

SEQ ID NO: 44075 - protein, 979 aa, synthetic construct
  REGION 1..979: note = engineered CasX variant
QEIKRINKIRRRLVKDSNTKKAGKTGPMKTLLVRVMTPDLRERLENLRKKPENIPQPISNTSRANLNKLLTDYTEMKKAILHVYWEEFQKDPVGLMSRVAQPASKKIDQNKLKPEMDEKGNLTTAGFACSQCGQPLFVYKLEQVSEKGKAYTNYFGRCNVAEHEKLILLAQLKPEKDSDEAVTYSLGKFGQRALDFYSIHVTKESTHPVKPLAQIAGNRYASTPVGKALSDACMGTIASFLSKYQDIIIEHQKVVKGNQKRLESLRELAGKENLEYPSVTLPPQPHTKEGVDAYNEVIARVRMWVNLNLWQKLKLSRDDAKPLLRLKNFPSFPLVERQQANEVDWWDMVCNVKKLINEKKEDGKVFWQNLAGYKRQEALRPYLSSEEDRKKGKKFARYQLGDLLLHLEKKHGEDWGKVYDEAWERIDKKVEGLSKHIKLEEERRSEDAQSKAALTDWLRAKASFVIEGLKEADKDEFCRCELKLQKWYGDLRGKPFAIEAENSILDISGFSKQYNCAFIWQKDGVKKLNLYLIINYFKGGKLRFKKIKPEAFEANRFYTVINKKSGEIVPMEVNFNFDDPNLIILPLAFGKRQGREFIWNDLLSLETGSLKLANGRVIEKTLYNRRTRQDEPALFVALTFERREVLDSSNIKPMNLIGVDRGENIPAVIALTDPEGCPLSRFKDSLGNPTHILRIGESYKEKQRTIQAKKEVEQRRAGGYSRKYASKAKNLADDMVRNTARDLLYYAVTQDAMLIFENLSRGFGRQGKRTFMAERQYTRMEDWLTAKLAYEGLPSKTYLSKTLAQYTSKTCSNCGFTITSADYDRVLEKLKKTATGWMTTINGKELKVEGQITYYNRYKRQNVVKDLSVELDRLSEESVNNDISSWTKGRSGEALSLLKKRFSHRPVQEKFVCLNCGFETHADEQAALNIARSWLFLRSQEYKKYQTNKTTGNTDKRAFVETWQSFYRKKLKEVWKPAV

SEQ ID NO: 44076 - protein, 979 aa, synthetic construct
  REGION 1..979: note = engineered CasX variant
QEIKRINKIRRRLVKDSNTKKAGKTGPMKTLLVRVMTPDLRERLENLRKKPENIPQPISNTSRANLNKLLTDYTEMKKAILHVYWEEFQKDPVGLMSRVAQPASKKIDQNKLKPEMDEKGNLTTAGFACSQCGQPLFVYKLEQVSEKGKAYTNYFGRCNVAEHEKLILLAQLKPEKDSDEAVTYSLGKFGQRALDFYSIHVTKESTHPVKPLAQIAGNRYASAPVGKALSDACMGTIASFLSKYQDIIIEHQKVVKGNQKRLESLRELAGKENLEYPSVTLPPQPHTKEGVDAYNEVIARVRMWVNLNLWQKLKLSRDDAKPLLRLKNFPSFPLVERQQANEVDWWDMVCNVKKLINEKKEDGKVFWQNLAGYKRQEALRPYLSSEEDRKKGKKFARYQLGDLLLHLEKKHGEDWGKVYDEAWERIDKKVEGLSKHIKLEEERRSEDAQSKAALTDWLRAKASFVIEGLKEADKDEFCRCELKLQKWYGDLRGKPFAIEAENSILDISGFSKQYNCAFIWQKDGVKKLNLYLIINYFKGGKLRFKKIKPEAFEANRFYTVINKKSGEIVPMEVNFNFDDPNLIILPLAFGKRQGREFIWNDLLSLETGSLKLANGRVIEKTLYNRRTRQDEPALFVALTFERREVLDSSNIKPMNLIGVDRGENIPAVIALTDPEGCPLSRFKDSLGNPTHILRIGESYKEKQRTIQAKKEVEQRRAGGYSRKYASKAKNLADDMVRNTARDLLYYAVTQDAMLIFENLSRGFGRQGKRTFMAERQYTRMEDWLTAKLAYEGLPSKTYLSKTLAQYTSKTCSNCGFTITSADYDRVLEKLKKTATGWMTTINGKELKVEGQITYYNRYKRQNVVKDLSVELDRLSEESVNNDISSWTKGRSGEALSLLKKRFSHRPVQEKFVCLNCGFETHADEQAALNIARSWLFLRSQEYKKYQTNKTTGNTDKRAFVETWQSFYRKKLKEVWKPAV

SEQ ID NO: 44077 - protein, 979 aa, synthetic construct
  REGION 1..979: note = engineered CasX variant
QEIKRINKIRRRLVKDSNTKKAGKTGPMKTLLVRVMTPDLRERLENLRKKPENIPQPISNTSRANLNKLLTDYTEMKKAILHVYWEEFQKDPVGLMSRVAQPASKKIDQNKLKPEMDEKGNLTTAGFACSQCGQPLFVYKLEQVSEKGKAYTNYFGRCNVAEHEKLILLAQLKPEKDSDEAVTYSLGKFGQRALDFYSIHVTKESTHPVKPLAQIAGNRYASVPVGKALSDACMGTIASFLSKYQDIIIEHQKVVKGNQKRLESLRELAGKENLEYPSVTLPPQPHTKEGVDAYNEVIARVRMWVNLNLWQKLKLSRDDAKPLLRLKNFPSFPLVERQQANEVDWWDMVCNVKKLINEKKEDGKVFWQNLAGYKRQEALRPYLSSEEDRKKGKKFARYQLGDLLLHLEKKHGEDWGKVYDEAWERIDKKVEGLSKHIKLEEERRSEDAQSKAALTDWLRAKASFVIEGLKEADKDEFCRCELKLQKWYGDLRGKPFAIEAENSILDISGFSKQYNCAFIWQKDGVKKLNLYLIINYFKGGKLRFKKIKPEAFEANRFYTVINKKSGEIVPMEVNFNFDDPNLIILPLAFGKRQGREFIWNDLLSLETGSLKLANGRVIEKTLYNRRTRQDEPALFVALTFERREVLDSSNIKPMNLIGVDRGENIPAVIALTDPEGCPLSRFKDSLGNPTHILRIGESYKEKQRTIQAKKEVEQRRAGGYSRKYASKAKNLADDMVRNTARDLLYYAVTQDAMLIFENLSRGFGRQGKRTFMAERQYTRMEDWLTAKLAYEGLPSKTYLSKTLAQYTSKTCSNCGFTITSADYDRVLEKLKKTATGWMTTINGKELKVEGQITYYNRYKRQNVVKDLSVELDRLSEESVNNDISSWTKGRSGEALSLLKKRFSHRPVQEKFVCLNCGFETHADEQAALNIARSWLFLRSQEYKKYQTNKTTGNTDKRAFVETWQSFYRKKLKEVWKPAV

SEQ ID NO: 44078 - protein, 979 aa, synthetic construct
  REGION 1..979: note = engineered CasX variant
QEIKRINKIRRRLVKDSNTKKAGKTGPMKTLLVRVMTPDLRERLENLRKKPENIPQPISNTSRANLNKLLTDYTEMKKAILHVYWEEFQKDPVGLMSRVAQPASKKIDQNKLKPEMDEKGNLTTAGFACSQCGQPLFVYKLEQVSEKGKAYTNYFGRCNVAEHEKLIKLAQLKPEKDSDEAVTYSLGKFGQRALDFYSIHVTKESTHPVKPLAQIAGNRYASGPVGKALSDACMGTIASFLSKYQDIIIEHQKVVKGNQKRLESLRELAGKENLEYPSVTLPPQPHTKEGVDAYNEVIARVRMWVNLNLWQKLKLSRDDAKPLLRLKNFPSFPLVERQQANEVDWWDMVCNVKKLINEKKEDGKVFWQNLAGYKRQEALRPYLSSEEDRKKGKKFARYQLGDLLLHLEKKHGEDWGKVYDEAWERIDKKVEGLSKHIKLEEERRSEDAQSKAALTDWLRAKASFVIEGLKEADKDEFCRCELKLQKWYGDLRGKPFAIEAENSILDISGFSKQYNCAFIWQKDGVKKLNLYLIINYFKGGKLRFKKIKPEAFEANRFYTVINKKSGEIVPMEVNFNFDDPNLIILPLAFGKRQGREFIWNDLLSLETGSLKLANGRVIEKTLYNRRTRQDEPALFVALTFERREVLDSSNIKPMNLIGVDRGENIPAVIALTDPEGCPLSRFKDSLGNPTHILRIGESYKEKQRTIQAKKEVEQRRAGGYSRKYASKAKNLADDMVRNTARDLLYYAVTQDAMLIFENLSRGFGRQGKRTFMAERQYTRMEDWLTAKLAYEGLPSKTYLSKTLAQYTSKTCSNCGFTITSADYDRVLEKLKKTATGWMTTINGKELKVEGQITYYNRYKRQNVVKDLSVELDRLSEESVNNDISSWTKGRSGEALSLLKKRFSHRPVQEKFVCLNCGFETHADEQAALNIARSWLFLRSQEYKKYQTNKTTGNTDKRAFVETWQSFYRKKLKEVWKPAV

SEQ ID NO: 44079 - protein, 978 aa, synthetic construct
  REGION 1..978: note = engineered CasX variant
QEIKRINKIRRRLVKDSNTKKAGKTGPMKTLLVRVMTPDLRERLENLRKKPENIPQPISNTSRANLNKLLTDYTEMKKAILHVYWEEFQKDPVGLMSRVAQPASKKIDQNKLKPEMDEKGNLTTAGFACSQCGQPLFVYKLEQVSEKGKAYTNYFGRCNVAEHEKLILLAQLKPEKDSDEAVTYSLGKFGQRALDFYSIHVTKESTHPVKPLAQIAGNRYASPVGKALSDACMGTIASFLSKYQDIIIEHQKVVKGNQKRLESLRELAGKENLEYPSVTLPPQPHTKEGVDAYNEVIARVRMWVNLNLWQKLKLSRDDAKPLLRLKNFPSFPLVERQQANEVDWWDMVCNVKKLINEKKEDGKVFWQNLAGYKRQEALRPYLSSEEDRKKGKKFARYQLGDLLLHLEKKHGEDWGKVYDEAWERIDKKVEGLSKHIKLEEERRSEDAQSKAALTDWLRAKASFVIEGLKEADKDEFCRCELKLQKWYGDLRGKPFAIEAENSILDISGFSKQYNCAFIWQKDGVKKLNLYLIINYFKGGKLRFKKIKPEAFEANRFYTVINKKSGEIVPMEVNFNFDDPNLIILPLAFGKRQGREFIWNDLLSLETGSLKLANGRVIEKTLYNRRTRQDEPALFVALTFERREVLDSSNIKPMNLIGVDRGENIPAVIALTDPEGCPLSRFKDSLGNPTHILRIGESYKEKQRTIQAKKEVEQRRAGGYSRKYASKAKNLADDMVRNTARDLLYYAVTQDAMLIFENLSRGFGRQGKRTFMAERQYTRMEDWLTAKLAYEGLPSKTYLSKTLAQYTSKTCSNCGFTITSADYDRVLEKLKKTATGWMTTINGKELKVEGQITYYNRYKRQNVVKDLSVELDRLSEESVNNDISSWTKGRSGEALSLLKKRFSHRPVQEKFVCLNCGFETHADEQAALNIARSWLFLRSQEYKKYQTNKTTGNTDKRAFVETWQSFYRKKLKEVWKPAV

SEQ ID NO: 44080 - protein, 979 aa, synthetic construct
  REGION 1..979: note = engineered CasX variant
QEIKRINKIRRRLVKDSNTKKAGKTGPMKTLLVRVMTPDLRERLENLRKKPENIPQPISNTSRANLNKLLTDYTEMKKAILHVYWEEFQKDPVGLMSRVAQPASKKIDQNKLKPEMDEKGNLTTAGFACSQCGQPLFVYKLEQVSEKGKAYTNYFGRCNVAEHEKLILLAQLKPEKDSDEAVTYSLGKFGQRALDFYSIHVTKESTHPVKPLAQIAGNRYASYPVGKALSDACMGTIASFLSKYQDIIIEHQKVVKGNQKRLESLRELAGKENLEYPSVTLPPQPHTKEGVDAYNEVIARVRMWVNLNLWQKLKLSRDDAKPLLRLKGFPSFPLVERQQANEVDWWDMVCNVKKLINEKKEDGKVFWQNLAGYKRQEALRPYLSSEEDRKKGKKFARYQLGDLLNHLEKKHGEDWGKVYDEAWERIDKKVEGLSKHIKLEEERRSEDAQSKAALTDWLRAKASFVIEGLKEADKDEFCRCELKLQKWYGDLRGKPFAIEAENSILDISGFSKQYNCAFIWQKDGVKKLNLYLIINYFKGGKLRFKKIKPEAFEANRFYTVINKKSGEIVPMEVNFNFDDPNLIILPLAFGKRQGREFIWNDLLSLETGSLKLANGRVIEKTLYNRRTRQDEPALFVALTFERREVLDSSNIKPMNLIGVDRGENIPAVIALTDPEGCPLSRFKDSLGNPTHILRIGESYKEKQRTIQAKKEVEQRRAGGYSRKYASKAKNLADDMVRNTARDLLYYAVTQDAMLIFENLSRGFGRQGKRTFMAERQYTRMEDWLTAKLAYEGLPSKTYLSKTLAQYTSKTCSNCGFTITSADYDRVLEKLKKTATGWMTTINGKELKVEGQITYYNRYKRQNVVKDLSVELDRLSEESVNNDISSWTKGRSGEALSLLKKRFSHRPVQEKFVCLNCGFETHADEQAALNIARSWLFLRSQEYKKYQTNKTTGNTDKRAFVETWQSFYRKKLKEVWKPAV

SEQ ID NO: 44081 - protein, 979 aa, synthetic construct
  REGION 1..979: note = engineered CasX variant
QEIKRINKIRRRLVKDSNTKKAGKTGPMKTLLVRVMTPDLRERLENLRKKPENIPQPISNTSRANLNKLLTDYTEMKKAILHVYWEEFQKDPVGLMSRVAQPASKKIDQNKLKPEMDEKGNLTTAGFACSQCGQPLFVYKLEQVSEKGKAYTNYFGRCNVAEHEKLILLAQLKPEKDSDEAVTYSLGKFGQRALDFYSIHVTKESTHPVKPLAQIAGNRYASHPVGKALSDACMGTIASFLSKYQDIIIEHQKVVKGNQKRLESLRELAGKENLEYPSVTLPPQPHTKEGVDAYNEVIARVRMWVNLNLWQKLKLSRDDAKPLLRLKGFPSFPLVERQQANEVDWWDMVCNVKKLINEKKEDGKVFWQNLAGYKRQEALRPYLSSEEDRKKGKKFARYQLGDLLNHLEKKHGEDWGKVYDEAWERIDKKVEGLSKHIKLEEERRSEDAQSKAALTDWLRAKASFVIEGLKEADKDEFCRCELKLQKWYGDLRGKPFAIEAENSILDISGFSKQYNCAFIWQKDGVKKLNLYLIINYFKGGKLRFKKIKPEAFEANRFYTVINKKSGEIVPMEVNFNFDDPNLIILPLAFGKRQGREFIWNDLLSLETGSLKLANGRVIEKTLYNRRTRQDEPALFVALTFERREVLDSSNIKPMNLIGVDRGENIPAVIALTDPEGCPLSRFKDSLGNPTHILRIGESYKEKQRTIQAKKEVEQRRAGGYSRKYASKAKNLADDMVRNTARDLLYYAVTQDAMLIFENLSRGFGRQGKRTFMAERQYTRMEDWLTAKLAYEGLPSKTYLSKTLAQYTSKTCSNCGFTITSADYDRVLEKLKKTATGWMTTINGKELKVEGQITYYNRYKRQNVVKDLSVELDRLSEESVNNDISSWTKGRSGEALSLLKKRFSHRPVQEKFVCLNCGFETHADEQAALNIARSWLFLRSQEYKKYQTNKTTGNTDKRAFVETWQSFYRKKLKEVWKPAV

SEQ ID NO: 44082 - protein, 979 aa, synthetic construct
  REGION 1..979: note = engineered CasX variant
QEIKRINKIRRRLVKDSNTKKAGKTGPMKTLLVRVMTPDLRERLENLRKKPENIPQPISNTSRANLNKLLTDYTEMKKAILHVYWEEFQKDPVGLMSRVAQPASKKIDQNKLKPEMDEKGNLTTAGFACSQCGQPLFVYKLEQVSEKGKAYTNYFGRCNVAEHEKLILLAQLKPEKDSDEAVTYSLGKFGQRALDFYSIHVTKESTHPVKPLAQIAGNRYASSPVGKALSDACMGTIASFLSKYQDIIIEHQKVVKGNQKRLESLRELAGKENLEYPSVTLPPQPHTKEGVDAYNEVIARVRMWVNLNLWQKLKLSRDDAKPLLRLKGFPSFPLVERQQANEVDWWDMVCNVKKLINEKKEDGKVFWQNLAGYKRQEALRPYLSSEEDRKKGKKFARYQLGDLLNHLEKKHGEDWGKVYDEAWERIDKKVEGLSKHIKLEEERRSEDAQSKAALTDWLRAKASFVIEGLKEADKDEFCRCELKLQKWYGDLRGKPFAIEAENSILDISGFSKQYNCAFIWQKDGVKKLNLYLIINYFKGGKLRFKKIKPEAFEANRFYTVINKKSGEIVPMEVNFNFDDPNLIILPLAFGKRQGREFIWNDLLSLETGSLKLANGRVIEKTLYNRRTRQDEPALFVALTFERREVLDSSNIKPMNLIGVDRGENIPAVIALTDPEGCPLSRFKDSLGNPTHILRIGESYKEKQRTIQAKKEVEQRRAGGYSRKYASKAKNLADDMVRNTARDLLYYAVTQDAMLIFENLSRGFGRQGKRTFMAERQYTRMEDWLTAKLAYEGLPSKTYLSKTLAQYTSKTCSNCGFTITSADYDRVLEKLKKTATGWMTTINGKELKVEGQITYYNRYKRQNVVKDLSVELDRLSEESVNNDISSWTKGRSGEALSLLKKRFSHRPVQEKFVCLNCGFETHADEQAALNIARSWLFLRSQEYKKYQTNKTTGNTDKRAFVETWQSFYRKKLKEVWKPAV

SEQ ID NO: 44083 - protein, 979 aa, synthetic construct
  REGION 1..979: note = engineered CasX variant
QEIKRINKIRRRLVKDSNTKKAGKTGPMKTLLVRVMTPDLRERLENLRKKPENIPQPISNTSRANLNKLLTDYTEMKKAILHVYWEEFQKDPVGLMSRVAQPASKKIDQNKLKPEMDEKGNLTTAGFACSQCGQPLFVYKLEQVSEKGKAYTNYFGRCNVAEHEKLILLAQLKPEKDSDEAVTYSLGKFGQRALDFYSIHVTKESTHPVKPLAQIAGNRYASTPVGKALSDACMGTIASFLSKYQDIIIEHQKVVKGNQKRLESLRELAGKENLEYPSVTLPPQPHTKEGVDAYNEVIARVRMWVNLNLWQKLKLSRDDAKPLLRLKGFPSFPLVERQQANEVDWWDMVCNVKKLINEKKEDGKVFWQNLAGYKRQEALRPYLSSEEDRKKGKKFARYQLGDLLNHLEKKHGEDWGKVYDEAWERIDKKVEGLSKHIKLEEERRSEDAQSKAALTDWLRAKASFVIEGLKEADKDEFCRCELKLQKWYGDLRGKPFAIEAENSILDISGFSKQYNCAFIWQKDGVKKLNLYLIINYFKGGKLRFKKIKPEAFEANRFYTVINKKSGEIVPMEVNFNFDDPNLIILPLAFGKRQGREFIWNDLLSLETGSLKLANGRVIEKTLYNRRTRQDEPALFVALTFERREVLDSSNIKPMNLIGVDRGENIPAVIALTDPEGCPLSRFKDSLGNPTHILRIGESYKEKQRTIQAKKEVEQRRAGGYSRKYASKAKNLADDMVRNTARDLLYYAVTQDAMLIFENLSRGFGRQGKRTFMAERQYTRMEDWLTAKLAYEGLPSKTYLSKTLAQYTSKTCSNCGFTITSADYDRVLEKLKKTATGWMTTINGKELKVEGQITYYNRYKRQNVVKDLSVELDRLSEESVNNDISSWTKGRSGEALSLLKKRFSHRPVQEKFVCLNCGFETHADEQAALNIARSWLFLRSQEYKKYQTNKTTGNTDKRAFVETWQSFYRKKLKEVWKPAV

SEQ ID NO: 44084 - protein, 979 aa, synthetic construct
  REGION 1..979: note = engineered CasX variant
QEIKRINKIRRRLVKDSNTKKAGKTGPMKTLLVRVMTPDLRERLENLRKKPENIPQPISNTSRANLNKLLTDYTEMKKAILHVYWEEFQKDPVGLMSRVAQPASKKIDQNKLKPEMDEKGNLTTAGFACSQCGQPLFVYKLEQVSEKGKAYTNYFGRCNVAEHEKLILLAQLKPEKDSDEAVTYSLGKFGQRALDFYSIHVTKESTHPVKPLAQIAGNRYASAPVGKALSDACMGTIASFLSKYQDIIIEHQKVVKGNQKRLESLRELAGKENLEYPSVTLPPQPHTKEGVDAYNEVIARVRMWVNLNLWQKLKLSRDDAKPLLRLKGFPSFPLVERQQANEVDWWDMVCNVKKLINEKKEDGKVFWQNLAGYKRQEALRPYLSSEEDRKKGKKFARYQLGDLLNHLEKKHGEDWGKVYDEAWERIDKKVEGLSKHIKLEEERRSEDAQSKAALTDWLRAKASFVIEGLKEADKDEFCRCELKLQKWYGDLRGKPFAIEAENSILDISGFSKQYNCAFIWQKDGVKKLNLYLIINYFKGGKLRFKKIKPEAFEANRFYTVINKKSGEIVPMEVNFNFDDPNLIILPLAFGKRQGREFIWNDLLSLETGSLKLANGRVIEKTLYNRRTRQDEPALFVALTFERREVLDSSNIKPMNLIGVDRGENIPAVIALTDPEGCPLSRFKDSLGNPTHILRIGESYKEKQRTIQAKKEVEQRRAGGYSRKYASKAKNLADDMVRNTARDLLYYAVTQDAMLIFENLSRGFGRQGKRTFMAERQYTRMEDWLTAKLAYEGLPSKTYLSKTLAQYTSKTCSNCGFTITSADYDRVLEKLKKTATGWMTTINGKELKVEGQITYYNRYKRQNVVKDLSVELDRLSEESVNNDISSWTKGRSGEALSLLKKRFSHRPVQEKFVCLNCGFETHADEQAALNIARSWLFLRSQEYKKYQTNKTTGNTDKRAFVETWQSFYRKKLKEVWKPAV

SEQ ID NO: 44085 - protein, 979 aa, synthetic construct
  REGION 1..979: note = engineered CasX variant
QEIKRINKIRRRLVKDSNTKKAGKTGPMKTLLVRVMTPDLRERLENLRKKPENIPQPISNTSRANLNKLLTDYTEMKKAILHVYWEEFQKDPVGLMSRVAQPASKKIDQNKLKPEMDEKGNLTTAGFACSQCGQPLFVYKLEQVSEKGKAYTNYFGRCNVAEHEKLILLAQLKPEKDSDEAVTYSLGKFGQRALDFYSIHVTKESTHPVKPLAQIAGNRYASVPVGKALSDACMGTIASFLSKYQDIIIEHQKVVKGNQKRLESLRELAGKENLEYPSVTLPPQPHTKEGVDAYNEVIARVRMWVNLNLWQKLKLSRDDAKPLLRLKGFPSFPLVERQQANEVDWWDMVCNVKKLINEKKEDGKVFWQNLAGYKRQEALRPYLSSEEDRKKGKKFARYQLGDLLNHLEKKHGEDWGKVYDEAWERIDKKVEGLSKHIKLEEERRSEDAQSKAALTDWLRAKASFVIEGLKEADKDEFCRCELKLQKWYGDLRGKPFAIEAENSILDISGFSKQYNCAFIWQKDGVKKLNLYLIINYFKGGKLRFKKIKPEAFEANRFYTVINKKSGEIVPMEVNFNFDDPNLIILPLAFGKRQGREFIWNDLLSLETGSLKLANGRVIEKTLYNRRTRQDEPALFVALTFERREVLDSSNIKPMNLIGVDRGENIPAVIALTDPEGCPLSRFKDSLGNPTHILRIGESYKEKQRTIQAKKEVEQRRAGGYSRKYASKAKNLADDMVRNTARDLLYYAVTQDAMLIFENLSRGFGRQGKRTFMAERQYTRMEDWLTAKLAYEGLPSKTYLSKTLAQYTSKTCSNCGFTITSADYDRVLEKLKKTATGWMTTINGKELKVEGQITYYNRYKRQNVVKDLSVELDRLSEESVNNDISSWTKGRSGEALSLLKKRFSHRPVQEKFVCLNCGFETHADEQAALNIARSWLFLRSQEYKKYQTNKTTGNTDKRAFVETWQSFYRKKLKEVWKPAV

SEQ ID NO: 44086 - protein, 979 aa, synthetic construct
  REGION 1..979: note = engineered CasX variant
QEIKRINKIRRRLVKDSNTKKAGKTGPMKTLLVRVMTPDLRERLENLRKKPENIPQPISNTSRANLNKLLTDYTEMKKAILHVYWEEFQKDPVGLMSRVAQPASKKIDQNKLKPEMDEKGNLTTAGFACSQCGQPLFVYKLEQVSEKGKAYTNYFGRCNVAEHEKLIKLAQLKPEKDSDEAVTYSLGKFGQRALDFYSIHVTKESTHPVKPLAQIAGNRYASGPVGKALSDACMGTIASFLSKYQDIIIEHQKVVKGNQKRLESLRELAGKENLEYPSVTLPPQPHTKEGVDAYNEVIARVRMWVNLNLWQKLKLSRDDAKPLLRLKGFPSFPLVERQQANEVDWWDMVCNVKKLINEKKEDGKVFWQNLAGYKRQEALRPYLSSEEDRKKGKKFARYQLGDLLNHLEKKHGEDWGKVYDEAWERIDKKVEGLSKHIKLEEERRSEDAQSKAALTDWLRAKASFVIEGLKEADKDEFCRCELKLQKWYGDLRGKPFAIEAENSILDISGFSKQYNCAFIWQKDGVKKLNLYLIINYFKGGKLRFKKIKPEAFEANRFYTVINKKSGEIVPMEVNFNFDDPNLIILPLAFGKRQGREFIWNDLLSLETGSLKLANGRVIEKTLYNRRTRQDEPALFVALTFERREVLDSSNIKPMNLIGVDRGENIPAVIALTDPEGCPLSRFKDSLGNPTHILRIGESYKEKQRTIQAKKEVEQRRAGGYSRKYASKAKNLADDMVRNTARDLLYYAVTQDAMLIFENLSRGFGRQGKRTFMAERQYTRMEDWLTAKLAYEGLPSKTYLSKTLAQYTSKTCSNCGFTITSADYDRVLEKLKKTATGWMTTINGKELKVEGQITYYNRYKRQNVVKDLSVELDRLSEESVNNDISSWTKGRSGEALSLLKKRFSHRPVQEKFVCLNCGFETHADEQAALNIARSWLFLRSQEYKKYQTNKTTGNTDKRAFVETWQSFYRKKLKEVWKPAV

SEQ ID NO: 44087 - protein, 978 aa, synthetic construct
  REGION 1..978: note = engineered CasX variant
QEIKRINKIRRRLVKDSNTKKAGKTGPMKTLLVRVMTPDLRERLENLRKKPENIPQPISNTSRANLNKLLTDYTEMKKAILHVYWEEFQKDPVGLMSRVAQPASKKIDQNKLKPEMDEKGNLTTAGFACSQCGQPLFVYKLEQVSEKGKAYTNYFGRCNVAEHEKLILLAQLKPEKDSDEAVTYSLGKFGQRALDFYSIHVTKESTHPVKPLAQIAGNRYASPVGKALSDACMGTIASFLSKYQDIIIEHQKVVKGNQKRLESLRELAGKENLEYPSVTLPPQPHTKEGVDAYNEVIARVRMWVNLNLWQKLKLSRDDAKPLLRLKGFPSFPLVERQQANEVDWWDMVCNVKKLINEKKEDGKVFWQNLAGYKRQEALRPYLSSEEDRKKGKKFARYQLGDLLNHLEKKHGEDWGKVYDEAWERIDKKVEGLSKHIKLEEERRSEDAQSKAALTDWLRAKASFVIEGLKEADKDEFCRCELKLQKWYGDLRGKPFAIEAENSILDISGFSKQYNCAFIWQKDGVKKLNLYLIINYFKGGKLRFKKIKPEAFEANRFYTVINKKSGEIVPMEVNFNFDDPNLIILPLAFGKRQGREFIWNDLLSLETGSLKLANGRVIEKTLYNRRTRQDEPALFVALTFERREVLDSSNIKPMNLIGVDRGENIPAVIALTDPEGCPLSRFKDSLGNPTHILRIGESYKEKQRTIQAKKEVEQRRAGGYSRKYASKAKNLADDMVRNTARDLLYYAVTQDAMLIFENLSRGFGRQGKRTFMAERQYTRMEDWLTAKLAYEGLPSKTYLSKTLAQYTSKTCSNCGFTITSADYDRVLEKLKKTATGWMTTINGKELKVEGQITYYNRYKRQNVVKDLSVELDRLSEESVNNDISSWTKGRSGEALSLLKKRFSHRPVQEKFVCLNCGFETHADEQAALNIARSWLFLRSQEYKKYQTNKTTGNTDKRAFVETWQSFYRKKLKEVWKPAV

SEQ ID NO: 44088 - protein, 979 aa, synthetic construct
  REGION 1..979: note = engineered CasX variant
QEIKRINKIRRRLVKDSNTKKAGKTGPMKTLLVRVMTPDLRERLENLRKKPENIPQPISNTSRANLNKLLTDYTEMKKAILHVYWEEFQKDPVGLMSRVAQPASKKIDQNKLKPEMDEKGNLTTAGFACSQCGQPLFVYKLEQVSEKGKAYTNYFGRCNVAEHEKLILLAQLKPEKDSDEAVTYSLGKFGQRALDFYSIHVTKESTHPVKPLAQIAGNRYASYPVGKALSDACMGTIASFLSKYQDIIIEHQKVVKGNQKRLESLRELAGKENLEYPSVTLPPQPHTKEGVDAYNEVIARVRMWVNLNLWQKLKLSRDDAKPLLRLKGFPSFPLVERQQANEVDWWDMVCNVKKLINEKKEDGKVFWQNLAGYKRQEALRPYLSSEEDRKKGKKFARYQLGDLLWHLEKKHGEDWGKVYDEAWERIDKKVEGLSKHIKLEEERRSEDAQSKAALTDWLRAKASFVIEGLKEADKDEFCRCELKLQKWYGDLRGKPFAIEAENSILDISGFSKQYNCAFIWQKDGVKKLNLYLIINYFKGGKLRFKKIKPEAFEANRFYTVINKKSGEIVPMEVNFNFDDPNLIILPLAFGKRQGREFIWNDLLSLETGSLKLANGRVIEKTLYNRRTRQDEPALFVALTFERREVLDSSNIKPMNLIGVDRGENIPAVIALTDPEGCPLSRFKDSLGNPTHILRIGESYKEKQRTIQAKKEVEQRRAGGYSRKYASKAKNLADDMVRNTARDLLYYAVTQDAMLIFENLSRGFGRQGKRTFMAERQYTRMEDWLTAKLAYEGLPSKTYLSKTLAQYTSKTCSNCGFTITSADYDRVLEKLKKTATGWMTTINGKELKVEGQITYYNRYKRQNVVKDLSVELDRLSEESVNNDISSWTKGRSGEALSLLKKRFSHRPVQEKFVCLNCGFETHADEQAALNIARSWLFLRSQEYKKYQTNKTTGNTDKRAFVETWQSFYRKKLKEVWKPAV

SEQ ID NO: 44089 - protein, 979 aa, synthetic construct
  REGION 1..979: note = engineered CasX variant
QEIKRINKIRRRLVKDSNTKKAGKTGPMKTLLVRVMTPDLRERLENLRKKPENIPQPISNTSRANLNKLLTDYTEMKKAILHVYWEEFQKDPVGLMSRVAQPASKKIDQNKLKPEMDEKGNLTTAGFACSQCGQPLFVYKLEQVSEKGKAYTNYFGRCNVAEHEKLILLAQLKPEKDSDEAVTYSLGKFGQRALDFYSIHVTKESTHPVKPLAQIAGNRYASHPVGKALSDACMGTIASFLSKYQDIIIEHQKVVKGNQKRLESLRELAGKENLEYPSVTLPPQPHTKEGVDAYNEVIARVRMWVNLNLWQKLKLSRDDAKPLLRLKGFPSFPLVERQQANEVDWWDMVCNVKKLINEKKEDGKVFWQNLAGYKRQEALRPYLSSEEDRKKGKKFARYQLGDLLWHLEKKHGEDWGKVYDEAWERIDKKVEGLSKHIKLEEERRSEDAQSKAALTDWLRAKASFVIEGLKEADKDEFCRCELKLQKWYGDLRGKPFAIEAENSILDISGFSKQYNCAFIWQKDGVKKLNLYLIINYFKGGKLRFKKIKPEAFEANRFYTVINKKSGEIVPMEVNFNFDDPNLIILPLAFGKRQGREFIWNDLLSLETGSLKLANGRVIEKTLYNRRTRQDEPALFVALTFERREVLDSSNIKPMNLIGVDRGENIPAVIALTDPEGCPLSRFKDSLGNPTHILRIGESYKEKQRTIQAKKEVEQRRAGGYSRKYASKAKNLADDMVRNTARDLLYYAVTQDAMLIFENLSRGFGRQGKRTFMAERQYTRMEDWLTAKLAYEGLPSKTYLSKTLAQYTSKTCSNCGFTITSADYDRVLEKLKKTATGWMTTINGKELKVEGQITYYNRYKRQNVVKDLSVELDRLSEESVNNDISSWTKGRSGEALSLLKKRFSHRPVQEKFVCLNCGFETHADEQAALNIARSWLFLRSQEYKKYQTNKTTGNTDKRAFVETWQSFYRKKLKEVWKPAV

SEQ ID NO: 44090 - protein, 979 aa, synthetic construct
  REGION 1..979: note = engineered CasX variant
QEIKRINKIRRRLVKDSNTKKAGKTGPMKTLLVRVMTPDLRERLENLRKKPENIPQPISNTSRANLNKLLTDYTEMKKAILHVYWEEFQKDPVGLMSRVAQPASKKIDQNKLKPEMDEKGNLTTAGFACSQCGQPLFVYKLEQVSEKGKAYTNYFGRCNVAEHEKLILLAQLKPEKDSDEAVTYSLGKFGQRALDFYSIHVTKESTHPVKPLAQIAGNRYASSPVGKALSDACMGTIASFLSKYQDIIIEHQKVVKGNQKRLESLRELAGKENLEYPSVTLPPQPHTKEGVDAYNEVIARVRMWVNLNLWQKLKLSRDDAKPLLRLKGFPSFPLVERQQANEVDWWDMVCNVKKLINEKKEDGKVFWQNLAGYKRQEALRPYLSSEEDRKKGKKFARYQLGDLLWHLEKKHGEDWGKVYDEAWERIDKKVEGLSKHIKLEEERRSEDAQSKAALTDWLRAKASFVIEGLKEADKDEFCRCELKLQKWYGDLRGKPFAIEAENSILDISGFSKQYNCAFIWQKDGVKKLNLYLIINYFKGGKLRFKKIKPEAFEANRFYTVINKKSGEIVPMEVNFNFDDPNLIILPLAFGKRQGREFIWNDLLSLETGSLKLANGRVIEKTLYNRRTRQDEPALFVALTFERREVLDSSNIKPMNLIGVDRGENIPAVIALTDPEGCPLSRFKDSLGNPTHILRIGESYKEKQRTIQAKKEVEQRRAGGYSRKYASKAKNLADDMVRNTARDLLYYAVTQDAMLIFENLSRGFGRQGKRTFMAERQYTRMEDWLTAKLAYEGLPSKTYLSKTLAQYTSKTCSNCGFTITSADYDRVLEKLKKTATGWMTTINGKELKVEGQITYYNRYKRQNVVKDLSVELDRLSEESVNNDISSWTKGRSGEALSLLKKRFSHRPVQEKFVCLNCGFETHADEQAALNIARSWLFLRSQEYKKYQTNKTTGNTDKRAFVETWQSFYRKKLKEVWKPAV

SEQ ID NO: 44091 - protein, 979 aa, synthetic construct
  REGION 1..979: note = engineered CasX variant
QEIKRINKIRRRLVKDSNTKKAGKTGPMKTLLVRVMTPDLRERLENLRKKPENIPQPISNTSRANLNKLLTDYTEMKKAILHVYWEEFQKDPVGLMSRVAQPASKKIDQNKLKPEMDEKGNLTTAGFACSQCGQPLFVYKLEQVSEKGKAYTNYFGRCNVAEHEKLILLAQLKPEKDSDEAVTYSLGKFGQRALDFYSIHVTKESTHPVKPLAQIAGNRYASTPVGKALSDACMGTIASFLSKYQDIIIEHQKVVKGNQKRLESLRELAGKENLEYPSVTLPPQPHTKEGVDAYNEVIARVRMWVNLNLWQKLKLSRDDAKPLLRLKGFPSFPLVERQQANEVDWWDMVCNVKKLINEKKEDGKVFWQNLAGYKRQEALRPYLSSEEDRKKGKKFARYQLGDLLWHLEKKHGEDWGKVYDEAWERIDKKVEGLSKHIKLEEERRSEDAQSKAALTDWLRAKASFVIEGLKEADKDEFCRCELKLQKWYGDLRGKPFAIEAENSILDISGFSKQYNCAFIWQKDGVKKLNLYLIINYFKGGKLRFKKIKPEAFEANRFYTVINKKSGEIVPMEVNFNFDDPNLIILPLAFGKRQGREFIWNDLLSLETGSLKLANGRVIEKTLYNRRTRQDEPALFVALTFERREVLDSSNIKPMNLIGVDRGENIPAVIALTDPEGCPLSRFKDSLGNPTHILRIGESYKEKQRTIQAKKEVEQRRAGGYSRKYASKAKNLADDMVRNTARDLLYYAVTQDAMLIFENLSRGFGRQGKRTFMAERQYTRMEDWLTAKLAYEGLPSKTYLSKTLAQYTSKTCSNCGFTITSADYDRVLEKLKKTATGWMTTINGKELKVEGQITYYNRYKRQNVVKDLSVELDRLSEESVNNDISSWTKGRSGEALSLLKKRFSHRPVQEKFVCLNCGFETHADEQAALNIARSWLFLRSQEYKKYQTNKTTGNTDKRAFVETWQSFYRKKLKEVWKPAV

SEQ ID NO: 44092 - protein, 979 aa, synthetic construct
  REGION 1..979: note = engineered CasX variant
QEIKRINKIRRRLVKDSNTKKAGKTGPMKTLLVRVMTPDLRERLENLRKKPENIPQPISNTSRANLNKLLTDYTEMKKAILHVYWEEFQKDPVGLMSRVAQPASKKIDQNKLKPEMDEKGNLTTAGFACSQCGQPLFVYKLEQVSEKGKAYTNYFGRCNVAEHEKLILLAQLKPEKDSDEAVTYSLGKFGQRALDFYSIHVTKESTHPVKPLAQIAGNRYASAPVGKALSDACMGTIASFLSKYQDIIIEHQKVVKGNQKRLESLRELAGKENLEYPSVTLPPQPHTKEGVDAYNEVIARVRMWVNLNLWQKLKLSRDDAKPLLRLKGFPSFPLVERQQANEVDWWDMVCNVKKLINEKKEDGKVFWQNLAGYKRQEALRPYLSSEEDRKKGKKFARYQLGDLLWHLEKKHGEDWGKVYDEAWERIDKKVEGLSKHIKLEEERRSEDAQSKAALTDWLRAKASFVIEGLKEADKDEFCRCELKLQKWYGDLRGKPFAIEAENSILDISGFSKQYNCAFIWQKDGVKKLNLYLIINYFKGGKLRFKKIKPEAFEANRFYTVINKKSGEIVPMEVNFNFDDPNLIILPLAFGKRQGREFIWNDLLSLETGSLKLANGRVIEKTLYNRRTRQDEPALFVALTFERREVLDSSNIKPMNLIGVDRGENIPAVIALTDPEGCPLSRFKDSLGNPTHILRIGESYKEKQRTIQAKKEVEQRRAGGYSRKYASKAKNLADDMVRNTARDLLYYAVTQDAMLIFENLSRGFGRQGKRTFMAERQYTRMEDWLTAKLAYEGLPSKTYLSKTLAQYTSKTCSNCGFTITSADYDRVLEKLKKTATGWMTTINGKELKVEGQITYYNRYKRQNVVKDLSVELDRLSEESVNNDISSWTKGRSGEALSLLKKRFSHRPVQEKFVCLNCGFETHADEQAALNIARSWLFLRSQEYKKYQTNKTTGNTDKRAFVETWQSFYRKKLKEVWKPAV

SEQ ID NO: 44093 - protein, 979 aa, synthetic construct
  REGION 1..979: note = engineered CasX variant
QEIKRINKIRRRLVKDSNTKKAGKTGPMKTLLVRVMTPDLRERLENLRKKPENIPQPISNTSRANLNKLLTDYTEMKKAILHVYWEEFQKDPVGLMSRVAQPASKKIDQNKLKPEMDEKGNLTTAGFACSQCGQPLFVYKLEQVSEKGKAYTNYFGRCNVAEHEKLILLAQLKPEKDSDEAVTYSLGKFGQRALDFYSIHVTKESTHPVKPLAQIAGNRYASVPVGKALSDACMGTIASFLSKYQDIIIEHQKVVKGNQKRLESLRELAGKENLEYPSVTLPPQPHTKEGVDAYNEVIARVRMWVNLNLWQKLKLSRDDAKPLLRLKGFPSFPLVERQQANEVDWWDMVCNVKKLINEKKEDGKVFWQNLAGYKRQEALRPYLSSEEDRKKGKKFARYQLGDLLWHLEKKHGEDWGKVYDEAWERIDKKVEGLSKHIKLEEERRSEDAQSKAALTDWLRAKASFVIEGLKEADKDEFCRCELKLQKWYGDLRGKPFAIEAENSILDISGFSKQYNCAFIWQKDGVKKLNLYLIINYFKGGKLRFKKIKPEAFEANRFYTVINKKSGEIVPMEVNFNFDDPNLIILPLAFGKRQGREFIWNDLLSLETGSLKLANGRVIEKTLYNRRTRQDEPALFVALTFERREVLDSSNIKPMNLIGVDRGENIPAVIALTDPEGCPLSRFKDSLGNPTHILRIGESYKEKQRTIQAKKEVEQRRAGGYSRKYASKAKNLADDMVRNTARDLLYYAVTQDAMLIFENLSRGFGRQGKRTFMAERQYTRMEDWLTAKLAYEGLPSKTYLSKTLAQYTSKTCSNCGFTITSADYDRVLEKLKKTATGWMTTINGKELKVEGQITYYNRYKRQNVVKDLSVELDRLSEESVNNDISSWTKGRSGEALSLLKKRFSHRPVQEKFVCLNCGFETHADEQAALNIARSWLFLRSQEYKKYQTNKTTGNTDKRAFVETWQSFYRKKLKEVWKPAV

SEQ ID NO: 44094 - protein, 979 aa, synthetic construct
  REGION 1..979: note = engineered CasX variant
QEIKRINKIRRRLVKDSNTKKAGKTGPMKTLLVRVMTPDLRERLENLRKKPENIPQPISNTSRANLNKLLTDYTEMKKAILHVYWEEFQKDPVGLMSRVAQPASKKIDQNKLKPEMDEKGNLTTAGFACSQCGQPLFVYKLEQVSEKGKAYTNYFGRCNVAEHEKLIKLAQLKPEKDSDEAVTYSLGKFGQRALDFYSIHVTKESTHPVKPLAQIAGNRYASGPVGKALSDACMGTIASFLSKYQDIIIEHQKVVKGNQKRLESLRELAGKENLEYPSVTLPPQPHTKEGVDAYNEVIARVRMWVNLNLWQKLKLSRDDAKPLLRLKGFPSFPLVERQQANEVDWWDMVCNVKKLINEKKEDGKVFWQNLAGYKRQEALRPYLSSEEDRKKGKKFARYQLGDLLWHLEKKHGEDWGKVYDEAWERIDKKVEGLSKHIKLEEERRSEDAQSKAALTDWLRAKASFVIEGLKEADKDEFCRCELKLQKWYGDLRGKPFAIEAENSILDISGFSKQYNCAFIWQKDGVKKLNLYLIINYFKGGKLRFKKIKPEAFEANRFYTVINKKSGEIVPMEVNFNFDDPNLIILPLAFGKRQGREFIWNDLLSLETGSLKLANGRVIEKTLYNRRTRQDEPALFVALTFERREVLDSSNIKPMNLIGVDRGENIPAVIALTDPEGCPLSRFKDSLGNPTHILRIGESYKEKQRTIQAKKEVEQRRAGGYSRKYASKAKNLADDMVRNTARDLLYYAVTQDAMLIFENLSRGFGRQGKRTFMAERQYTRMEDWLTAKLAYEGLPSKTYLSKTLAQYTSKTCSNCGFTITSADYDRVLEKLKKTATGWMTTINGKELKVEGQITYYNRYKRQNVVKDLSVELDRLSEESVNNDISSWTKGRSGEALSLLKKRFSHRPVQEKFVCLNCGFETHADEQAALNIARSWLFLRSQEYKKYQTNKTTGNTDKRAFVETWQSFYRKKLKEVWKPAV

SEQ ID NO: 44095 - protein, 978 aa, synthetic construct
  REGION 1..978: note = engineered CasX variant
QEIKRINKIRRRLVKDSNTKKAGKTGPMKTLLVRVMTPDLRERLENLRKKPENIPQPISNTSRANLNKLLTDYTEMKKAILHVYWEEFQKDPVGLMSRVAQPASKKIDQNKLKPEMDEKGNLTTAGFACSQCGQPLFVYKLEQVSEKGKAYTNYFGRCNVAEHEKLILLAQLKPEKDSDEAVTYSLGKFGQRALDFYSIHVTKESTHPVKPLAQIAGNRYASPVGKALSDACMGTIASFLSKYQDIIIEHQKVVKGNQKRLESLRELAGKENLEYPSVTLPPQPHTKEGVDAYNEVIARVRMWVNLNLWQKLKLSRDDAKPLLRLKGFPSFPLVERQQANEVDWWDMVCNVKKLINEKKEDGKVFWQNLAGYKRQEALRPYLSSEEDRKKGKKFARYQLGDLLWHLEKKHGEDWGKVYDEAWERIDKKVEGLSKHIKLEEERRSEDAQSKAALTDWLRAKASFVIEGLKEADKDEFCRCELKLQKWYGDLRGKPFAIEAENSILDISGFSKQYNCAFIWQKDGVKKLNLYLIINYFKGGKLRFKKIKPEAFEANRFYTVINKKSGEIVPMEVNFNFDDPNLIILPLAFGKRQGREFIWNDLLSLETGSLKLANGRVIEKTLYNRRTRQDEPALFVALTFERREVLDSSNIKPMNLIGVDRGENIPAVIALTDPEGCPLSRFKDSLGNPTHILRIGESYKEKQRTIQAKKEVEQRRAGGYSRKYASKAKNLADDMVRNTARDLLYYAVTQDAMLIFENLSRGFGRQGKRTFMAERQYTRMEDWLTAKLAYEGLPSKTYLSKTLAQYTSKTCSNCGFTITSADYDRVLEKLKKTATGWMTTINGKELKVEGQITYYNRYKRQNVVKDLSVELDRLSEESVNNDISSWTKGRSGEALSLLKKRFSHRPVQEKFVCLNCGFETHADEQAALNIARSWLFLRSQEYKKYQTNKTTGNTDKRAFVETWQSFYRKKLKEVWKPAV

SEQ ID NO: 44096 - protein, 979 aa, synthetic construct
  REGION 1..979: note = engineered CasX variant
QEIKRINKIRRRLVKDSNTKKAGKTGPMKTLLVRVMTPDLRERLENLRKKPENIPQPISNTSRANLNKLLTDYTEMKKAILHVYWEEFQKDPVGLMSRVAQPASKKIDQNKLKPEMDEKGNLTTAGFACSQCGQPLFVYKLEQVSEKGKAYTNYFGRCNVAEHEKLILLAQLKPEKDSDEAVTYSLGKFGQRALDFYSIHVTKESTHPVKPLAQIAGNRYASYPVGKALSDACMGTIASFLSKYQDIIIEHQKVVKGNQKRLESLRELAGKENLEYPSVTLPPQPHTKEGVDAYNEVIARVRMWVNLNLWQKLKLSRDDAKPLLRLKGFPSFPLVERQQANEVDWWDMVCNVKKLINEKKEDGKVFWQNLAGYKRQEALRPYLSSEEDRKKGKKFARYQLGDLLLHLYKKHGEDWGKVYDEAWERIDKKVEGLSKHIKLEEERRSEDAQSKAALTDWLRAKASFVIEGLKEADKDEFCRCELKLQKWYGDLRGKPFAIEAENSILDISGFSKQYNCAFIWQKDGVKKLNLYLIINYFKGGKLRFKKIKPEAFEANRFYTVINKKSGEIVPMEVNFNFDDPNLIILPLAFGKRQGREFIWNDLLSLETGSLKLANGRVIEKTLYNRRTRQDEPALFVALTFERREVLDSSNIKPMNLIGVDRGENIPAVIALTDPEGCPLSRFKDSLGNPTHILRIGESYKEKQRTIQAKKEVEQRRAGGYSRKYASKAKNLADDMVRNTARDLLYYAVTQDAMLIFENLSRGFGRQGKRTFMAERQYTRMEDWLTAKLAYEGLPSKTYLSKTLAQYTSKTCSNCGFTITSADYDRVLEKLKKTATGWMTTINGKELKVEGQITYYNRYKRQNVVKDLSVELDRLSEESVNNDISSWTKGRSGEALSLLKKRFSHRPVQEKFVCLNCGFETHADEQAALNIARSWLFLRSQEYKKYQTNKTTGNTDKRAFVETWQSFYRKKLKEVWKPAV

SEQ ID NO: 44097 - protein, 979 aa, synthetic construct
  REGION 1..979: note = engineered CasX variant
QEIKRINKIRRRLVKDSNTKKAGKTGPMKTLLVRVMTPDLRERLENLRKKPENIPQPISNTSRANLNKLLTDYTEMKKAILHVYWEEFQKDPVGLMSRVAQPASKKIDQNKLKPEMDEKGNLTTAGFACSQCGQPLFVYKLEQVSEKGKAYTNYFGRCNVAEHEKLILLAQLKPEKDSDEAVTYSLGKFGQRALDFYSIHVTKESTHPVKPLAQIAGNRYASHPVGKALSDACMGTIASFLSKYQDIIIEHQKVVKGNQKRLESLRELAGKENLEYPSVTLPPQPHTKEGVDAYNEVIARVRMWVNLNLWQKLKLSRDDAKPLLRLKGFPSFPLVERQQANEVDWWDMVCNVKKLINEKKEDGKVFWQNLAGYKRQEALRPYLSSEEDRKKGKKFARYQLGDLLLHLYKKHGEDWGKVYDEAWERIDKKVEGLSKHIKLEEERRSEDAQSKAALTDWLRAKASFVIEGLKEADKDEFCRCELKLQKWYGDLRGKPFAIEAENSILDISGFSKQYNCAFIWQKDGVKKLNLYLIINYFKGGKLRFKKIKPEAFEANRFYTVINKKSGEIVPMEVNFNFDDPNLIILPLAFGKRQGREFIWNDLLSLETGSLKLANGRVIEKTLYNRRTRQDEPALFVALTFERREVLDSSNIKPMNLIGVDRGENIPAVIALTDPEGCPLSRFKDSLGNPTHILRIGESYKEKQRTIQAKKEVEQRRAGGYSRKYASKAKNLADDMVRNTARDLLYYAVTQDAMLIFENLSRGFGRQGKRTFMAERQYTRMEDWLTAKLAYEGLPSKTYLSKTLAQYTSKTCSNCGFTITSADYDRVLEKLKKTATGWMTTINGKELKVEGQITYYNRYKRQNVVKDLSVELDRLSEESVNNDISSWTKGRSGEALSLLKKRFSHRPVQEKFVCLNCGFETHADEQAALNIARSWLFLRSQEYKKYQTNKTTGNTDKRAFVETWQSFYRKKLKEVWKPAV

SEQ ID NO: 44098 - protein, 979 aa, synthetic construct
  REGION 1..979: note = engineered CasX variant
QEIKRINKIRRRLVKDSNTKKAGKTGPMKTLLVRVMTPDLRERLENLRKKPENIPQPISNTSRANLNKLLTDYTEMKKAILHVYWEEFQKDPVGLMSRVAQPASKKIDQNKLKPEMDEKGNLTTAGFACSQCGQPLFVYKLEQVSEKGKAYTNYFGRCNVAEHEKLILLAQLKPEKDSDEAVTYSLGKFGQRALDFYSIHVTKESTHPVKPLAQIAGNRYASSPVGKALSDACMGTIASFLSKYQDIIIEHQKVVKGNQKRLESLRELAGKENLEYPSVTLPPQPHTKEGVDAYNEVIARVRMWVNLNLWQKLKLSRDDAKPLLRLKGFPSFPLVERQQANEVDWWDMVCNVKKLINEKKEDGKVFWQNLAGYKRQEALRPYLSSEEDRKKGKKFARYQLGDLLLHLYKKHGEDWGKVYDEAWERIDKKVEGLSKHIKLEEERRSEDAQSKAALTDWLRAKASFVIEGLKEADKDEFCRCELKLQKWYGDLRGKPFAIEAENSILDISGFSKQYNCAFIWQKDGVKKLNLYLIINYFKGGKLRFKKIKPEAFEANRFYTVINKKSGEIVPMEVNFNFDDPNLIILPLAFGKRQGREFIWNDLLSLETGSLKLANGRVIEKTLYNRRTRQDEPALFVALTFERREVLDSSNIKPMNLIGVDRGENIPAVIALTDPEGCPLSRFKDSLGNPTHILRIGESYKEKQRTIQAKKEVEQRRAGGYSRKYASKAKNLADDMVRNTARDLLYYAVTQDAMLIFENLSRGFGRQGKRTFMAERQYTRMEDWLTAKLAYEGLPSKTYLSKTLAQYTSKTCSNCGFTITSADYDRVLEKLKKTATGWMTTINGKELKVEGQITYYNRYKRQNVVKDLSVELDRLSEESVNNDISSWTKGRSGEALSLLKKRFSHRPVQEKFVCLNCGFETHADEQAALNIARSWLFLRSQEYKKYQTNKTTGNTDKRAFVETWQSFYRKKLKEVWKPAV

SEQ ID NO: 44099 - protein, 979 aa, synthetic construct
  REGION 1..979: note = engineered CasX variant
QEIKRINKIRRRLVKDSNTKKAGKTGPMKTLLVRVMTPDLRERLENLRKKPENIPQPISNTSRANLNKLLTDYTEMKKAILHVYWEEFQKDPVGLMSRVAQPASKKIDQNKLKPEMDEKGNLTTAGFACSQCGQPLFVYKLEQVSEKGKAYTNYFGRCNVAEHEKLILLAQLKPEKDSDEAVTYSLGKFGQRALDFYSIHVTKESTHPVKPLAQIAGNRYASTPVGKALSDACMGTIASFLSKYQDIIIEHQKVVKGNQKRLESLRELAGKENLEYPSVTLPPQPHTKEGVDAYNEVIARVRMWVNLNLWQKLKLSRDDAKPLLRLKGFPSFPLVERQQANEVDWWDMVCNVKKLINEKKEDGKVFWQNLAGYKRQEALRPYLSSEEDRKKGKKFARYQLGDLLLHLYKKHGEDWGKVYDEAWERIDKKVEGLSKHIKLEEERRSEDAQSKAALTDWLRAKASFVIEGLKEADKDEFCRCELKLQKWYGDLRGKPFAIEAENSILDISGFSKQYNCAFIWQKDGVKKLNLYLIINYFKGGKLRFKKIKPEAFEANRFYTVINKKSGEIVPMEVNFNFDDPNLIILPLAFGKRQGREFIWNDLLSLETGSLKLANGRVIEKTLYNRRTRQDEPALFVALTFERREVLDSSNIKPMNLIGVDRGENIPAVIALTDPEGCPLSRFKDSLGNPTHILRIGESYKEKQRTIQAKKEVEQRRAGGYSRKYASKAKNLADDMVRNTARDLLYYAVTQDAMLIFENLSRGFGRQGKRTFMAERQYTRMEDWLTAKLAYEGLPSKTYLSKTLAQYTSKTCSNCGFTITSADYDRVLEKLKKTATGWMTTINGKELKVEGQITYYNRYKRQNVVKDLSVELDRLSEESVNNDISSWTKGRSGEALSLLKKRFSHRPVQEKFVCLNCGFETHADEQAALNIARSWLFLRSQEYKKYQTNKTTGNTDKRAFVETWQSFYRKKLKEVWKPAV

SEQ ID NO: 44100 - protein, 979 aa, synthetic construct
  REGION 1..979: note = engineered CasX variant
QEIKRINKIRRRLVKDSNTKKAGKTGPMKTLLVRVMTPDLRERLENLRKKPENIPQPISNTSRANLNKLLTDYTEMKKAILHVYWEEFQKDPVGLMSRVAQPASKKIDQNKLKPEMDEKGNLTTAGFACSQCGQPLFVYKLEQVSEKGKAYTNYFGRCNVAEHEKLILLAQLKPEKDSDEAVTYSLGKFGQRALDFYSIHVTKESTHPVKPLAQIAGNRYASAPVGKALSDACMGTIASFLSKYQDIIIEHQKVVKGNQKRLESLRELAGKENLEYPSVTLPPQPHTKEGVDAYNEVIARVRMWVNLNLWQKLKLSRDDAKPLLRLKGFPSFPLVERQQANEVDWWDMVCNVKKLINEKKEDGKVFWQNLAGYKRQEALRPYLSSEEDRKKGKKFARYQLGDLLLHLYKKHGEDWGKVYDEAWERIDKKVEGLSKHIKLEEERRSEDAQSKAALTDWLRAKASFVIEGLKEADKDEFCRCELKLQKWYGDLRGKPFAIEAENSILDISGFSKQYNCAFIWQKDGVKKLNLYLIINYFKGGKLRFKKIKPEAFEANRFYTVINKKSGEIVPMEVNFNFDDPNLIILPLAFGKRQGREFIWNDLLSLETGSLKLANGRVIEKTLYNRRTRQDEPALFVALTFERREVLDSSNIKPMNLIGVDRGENIPAVIALTDPEGCPLSRFKDSLGNPTHILRIGESYKEKQRTIQAKKEVEQRRAGGYSRKYASKAKNLADDMVRNTARDLLYYAVTQDAMLIFENLSRGFGRQGKRTFMAERQYTRMEDWLTAKLAYEGLPSKTYLSKTLAQYTSKTCSNCGFTITSADYDRVLEKLKKTATGWMTTINGKELKVEGQITYYNRYKRQNVVKDLSVELDRLSEESVNNDISSWTKGRSGEALSLLKKRFSHRPVQEKFVCLNCGFETHADEQAALNIARSWLFLRSQEYKKYQTNKTTGNTDKRAFVETWQSFYRKKLKEVWKPAV

SEQ ID NO: 44101 - protein, 979 aa, synthetic construct
  REGION 1..979: note = engineered CasX variant
QEIKRINKIRRRLVKDSNTKKAGKTGPMKTLLVRVMTPDLRERLENLRKKPENIPQPISNTSRANLNKLLTDYTEMKKAILHVYWEEFQKDPVGLMSRVAQPASKKIDQNKLKPEMDEKGNLTTAGFACSQCGQPLFVYKLEQVSEKGKAYTNYFGRCNVAEHEKLILLAQLKPEKDSDEAVTYSLGKFGQRALDFYSIHVTKESTHPVKPLAQIAGNRYASVPVGKALSDACMGTIASFLSKYQDIIIEHQKVVKGNQKRLESLRELAGKENLEYPSVTLPPQPHTKEGVDAYNEVIARVRMWVNLNLWQKLKLSRDDAKPLLRLKGFPSFPLVERQQANEVDWWDMVCNVKKLINEKKEDGKVFWQNLAGYKRQEALRPYLSSEEDRKKGKKFARYQLGDLLLHLYKKHGEDWGKVYDEAWERIDKKVEGLSKHIKLEEERRSEDAQSKAALTDWLRAKASFVIEGLKEADKDEFCRCELKLQKWYGDLRGKPFAIEAENSILDISGFSKQYNCAFIWQKDGVKKLNLYLIINYFKGGKLRFKKIKPEAFEANRFYTVINKKSGEIVPMEVNFNFDDPNLIILPLAFGKRQGREFIWNDLLSLETGSLKLANGRVIEKTLYNRRTRQDEPALFVALTFERREVLDSSNIKPMNLIGVDRGENIPAVIALTDPEGCPLSRFKDSLGNPTHILRIGESYKEKQRTIQAKKEVEQRRAGGYSRKYASKAKNLADDMVRNTARDLLYYAVTQDAMLIFENLSRGFGRQGKRTFMAERQYTRMEDWLTAKLAYEGLPSKTYLSKTLAQYTSKTCSNCGFTITSADYDRVLEKLKKTATGWMTTINGKELKVEGQITYYNRYKRQNVVKDLSVELDRLSEESVNNDISSWTKGRSGEALSLLKKRFSHRPVQEKFVCLNCGFETHADEQAALNIARSWLFLRSQEYKKYQTNKTTGNTDKRAFVETWQSFYRKKLKEVWKPAV

SEQ ID NO: 44102 - protein, 979 aa, synthetic construct
  REGION 1..979: note = engineered CasX variant
QEIKRINKIRRRLVKDSNTKKAGKTGPMKTLLVRVMTPDLRERLENLRKKPENIPQPISNTSRANLNKLLTDYTEMKKAILHVYWEEFQKDPVGLMSRVAQPASKKIDQNKLKPEMDEKGNLTTAGFACSQCGQPLFVYKLEQVSEKGKAYTNYFGRCNVAEHEKLIKLAQLKPEKDSDEAVTYSLGKFGQRALDFYSIHVTKESTHPVKPLAQIAGNRYASGPVGKALSDACMGTIASFLSKYQDIIIEHQKVVKGNQKRLESLRELAGKENLEYPSVTLPPQPHTKEGVDAYNEVIARVRMWVNLNLWQKLKLSRDDAKPLLRLKGFPSFPLVERQQANEVDWWDMVCNVKKLINEKKEDGKVFWQNLAGYKRQEALRPYLSSEEDRKKGKKFARYQLGDLLLHLYKKHGEDWGKVYDEAWERIDKKVEGLSKHIKLEEERRSEDAQSKAALTDWLRAKASFVIEGLKEADKDEFCRCELKLQKWYGDLRGKPFAIEAENSILDISGFSKQYNCAFIWQKDGVKKLNLYLIINYFKGGKLRFKKIKPEAFEANRFYTVINKKSGEIVPMEVNFNFDDPNLIILPLAFGKRQGREFIWNDLLSLETGSLKLANGRVIEKTLYNRRTRQDEPALFVALTFERREVLDSSNIKPMNLIGVDRGENIPAVIALTDPEGCPLSRFKDSLGNPTHILRIGESYKEKQRTIQAKKEVEQRRAGGYSRKYASKAKNLADDMVRNTARDLLYYAVTQDAMLIFENLSRGFGRQGKRTFMAERQYTRMEDWLTAKLAYEGLPSKTYLSKTLAQYTSKTCSNCGFTITSADYDRVLEKLKKTATGWMTTINGKELKVEGQITYYNRYKRQNVVKDLSVELDRLSEESVNNDISSWTKGRSGEALSLLKKRFSHRPVQEKFVCLNCGFETHADEQAALNIARSWLFLRSQEYKKYQTNKTTGNTDKRAFVETWQSFYRKKLKEVWKPAV

SEQ ID NO: 44103 - protein, 978 aa, synthetic construct
  REGION 1..978: note = engineered CasX variant
QEIKRINKIRRRLVKDSNTKKAGKTGPMKTLLVRVMTPDLRERLENLRKKPENIPQPISNTSRANLNKLLTDYTEMKKAILHVYWEEFQKDPVGLMSRVAQPASKKIDQNKLKPEMDEKGNLTTAGFACSQCGQPLFVYKLEQVSEKGKAYTNYFGRCNVAEHEKLILLAQLKPEKDSDEAVTYSLGKFGQRALDFYSIHVTKESTHPVKPLAQIAGNRYASPVGKALSDACMGTIASFLSKYQDIIIEHQKVVKGNQKRLESLRELAGKENLEYPSVTLPPQPHTKEGVDAYNEVIARVRMWVNLNLWQKLKLSRDDAKPLLRLKGFPSFPLVERQQANEVDWWDMVCNVKKLINEKKEDGKVFWQNLAGYKRQEALRPYLSSEEDRKKGKKFARYQLGDLLLHLYKKHGEDWGKVYDEAWERIDKKVEGLSKHIKLEEERRSEDAQSKAALTDWLRAKASFVIEGLKEADKDEFCRCELKLQKWYGDLRGKPFAIEAENSILDISGFSKQYNCAFIWQKDGVKKLNLYLIINYFKGGKLRFKKIKPEAFEANRFYTVINKKSGEIVPMEVNFNFDDPNLIILPLAFGKRQGREFIWNDLLSLETGSLKLANGRVIEKTLYNRRTRQDEPALFVALTFERREVLDSSNIKPMNLIGVDRGENIPAVIALTDPEGCPLSRFKDSLGNPTHILRIGESYKEKQRTIQAKKEVEQRRAGGYSRKYASKAKNLADDMVRNTARDLLYYAVTQDAMLIFENLSRGFGRQGKRTFMAERQYTRMEDWLTAKLAYEGLPSKTYLSKTLAQYTSKTCSNCGFTITSADYDRVLEKLKKTATGWMTTINGKELKVEGQITYYNRYKRQNVVKDLSVELDRLSEESVNNDISSWTKGRSGEALSLLKKRFSHRPVQEKFVCLNCGFETHADEQAALNIARSWLFLRSQEYKKYQTNKTTGNTDKRAFVETWQSFYRKKLKEVWKPAV

SEQ ID NO: 44104 - protein, 979 aa, synthetic construct
  REGION 1..979: note = engineered CasX variant
QEIKRINKIRRRLVKDSNTKKAGKTGPMKTLLVRVMTPDLRERLENLRKKPENIPQPISNTSRANLNKLLTDYTEMKKAILHVYWEEFQKDPVGLMSRVAQPASKKIDQNKLKPEMDEKGNLTTAGFACSQCGQPLFVYKLEQVSEKGKAYTNYFGRCNVAEHEKLILLAQLKPEKDSDEAVTYSLGKFGQRALDFYSIHVTKESTHPVKPLAQIAGNRYASYPVGKALSDACMGTIASFLSKYQDIIIEHQKVVKGNQKRLESLRELAGKENLEYPSVTLPPQPHTKEGVDAYNEVIARVRMWVNLNLWQKLKLSRDDAKPLLRLKGFPSFPLVERQQANEVDWWDMVCNVKKLINEKKEDGKVFWQNLAGYKRQEALRPYLSSEEDRKKGKKFARYQLGDLLLHLEKKHPEDWGKVYDEAWERIDKKVEGLSKHIKLEEERRSEDAQSKAALTDWLRAKASFVIEGLKEADKDEFCRCELKLQKWYGDLRGKPFAIEAENSILDISGFSKQYNCAFIWQKDGVKKLNLYLIINYFKGGKLRFKKIKPEAFEANRFYTVINKKSGEIVPMEVNFNFDDPNLIILPLAFGKRQGREFIWNDLLSLETGSLKLANGRVIEKTLYNRRTRQDEPALFVALTFERREVLDSSNIKPMNLIGVDRGENIPAVIALTDPEGCPLSRFKDSLGNPTHILRIGESYKEKQRTIQAKKEVEQRRAGGYSRKYASKAKNLADDMVRNTARDLLYYAVTQDAMLIFENLSRGFGRQGKRTFMAERQYTRMEDWLTAKLAYEGLPSKTYLSKTLAQYTSKTCSNCGFTITSADYDRVLEKLKKTATGWMTTINGKELKVEGQITYYNRYKRQNVVKDLSVELDRLSEESVNNDISSWTKGRSGEALSLLKKRFSHRPVQEKFVCLNCGFETHADEQAALNIARSWLFLRSQEYKKYQTNKTTGNTDKRAFVETWQSFYRKKLKEVWKPAV

SEQ ID NO: 44105 - protein, 979 aa, synthetic construct
  REGION 1..979: note = engineered CasX variant
QEIKRINKIRRRLVKDSNTKKAGKTGPMKTLLVRVMTPDLRERLENLRKKPENIPQPISNTSRANLNKLLTDYTEMKKAILHVYWEEFQKDPVGLMSRVAQPASKKIDQNKLKPEMDEKGNLTTAGFACSQCGQPLFVYKLEQVSEKGKAYTNYFGRCNVAEHEKLILLAQLKPEKDSDEAVTYSLGKFGQRALDFYSIHVTKESTHPVKPLAQIAGNRYASHPVGKALSDACMGTIASFLSKYQDIIIEHQKVVKGNQKRLESLRELAGKENLEYPSVTLPPQPHTKEGVDAYNEVIARVRMWVNLNLWQKLKLSRDDAKPLLRLKGFPSFPLVERQQANEVDWWDMVCNVKKLINEKKEDGKVFWQNLAGYKRQEALRPYLSSEEDRKKGKKFARYQLGDLLLHLEKKHPEDWGKVYDEAWERIDKKVEGLSKHIKLEEERRSEDAQSKAALTDWLRAKASFVIEGLKEADKDEFCRCELKLQKWYGDLRGKPFAIEAENSILDISGFSKQYNCAFIWQKDGVKKLNLYLIINYFKGGKLRFKKIKPEAFEANRFYTVINKKSGEIVPMEVNFNFDDPNLIILPLAFGKRQGREFIWNDLLSLETGSLKLANGRVIEKTLYNRRTRQDEPALFVALTFERREVLDSSNIKPMNLIGVDRGENIPAVIALTDPEGCPLSRFKDSLGNPTHILRIGESYKEKQRTIQAKKEVEQRRAGGYSRKYASKAKNLADDMVRNTARDLLYYAVTQDAMLIFENLSRGFGRQGKRTFMAERQYTRMEDWLTAKLAYEGLPSKTYLSKTLAQYTSKTCSNCGFTITSADYDRVLEKLKKTATGWMTTINGKELKVEGQITYYNRYKRQNVVKDLSVELDRLSEESVNNDISSWTKGRSGEALSLLKKRFSHRPVQEKFVCLNCGFETHADEQAALNIARSWLFLRSQEYKKYQTNKTTGNTDKRAFVETWQSFYRKKLKEVWKPAV

SEQ ID NO: 44106 - protein, 979 aa, synthetic construct
  REGION 1..979: note = engineered CasX variant
QEIKRINKIRRRLVKDSNTKKAGKTGPMKTLLVRVMTPDLRERLENLRKKPENIPQPISNTSRANLNKLLTDYTEMKKAILHVYWEEFQKDPVGLMSRVAQPASKKIDQNKLKPEMDEKGNLTTAGFACSQCGQPLFVYKLEQVSEKGKAYTNYFGRCNVAEHEKLILLAQLKPEKDSDEAVTYSLGKFGQRALDFYSIHVTKESTHPVKPLAQIAGNRYASSPVGKALSDACMGTIASFLSKYQDIIIEHQKVVKGNQKRLESLRELAGKENLEYPSVTLPPQPHTKEGVDAYNEVIARVRMWVNLNLWQKLKLSRDDAKPLLRLKGFPSFPLVERQQANEVDWWDMVCNVKKLINEKKEDGKVFWQNLAGYKRQEALRPYLSSEEDRKKGKKFARYQLGDLLLHLEKKHPEDWGKVYDEAWERIDKKVEGLSKHIKLEEERRSEDAQSKAALTDWLRAKASFVIEGLKEADKDEFCRCELKLQKWYGDLRGKPFAIEAENSILDISGFSKQYNCAFIWQKDGVKKLNLYLIINYFKGGKLRFKKIKPEAFEANRFYTVINKKSGEIVPMEVNFNFDDPNLIILPLAFGKRQGREFIWNDLLSLETGSLKLANGRVIEKTLYNRRTRQDEPALFVALTFERREVLDSSNIKPMNLIGVDRGENIPAVIALTDPEGCPLSRFKDSLGNPTHILRIGESYKEKQRTIQAKKEVEQRRAGGYSRKYASKAKNLADDMVRNTARDLLYYAVTQDAMLIFENLSRGFGRQGKRTFMAERQYTRMEDWLTAKLAYEGLPSKTYLSKTLAQYTSKTCSNCGFTITSADYDRVLEKLKKTATGWMTTINGKELKVEGQITYYNRYKRQNVVKDLSVELDRLSEESVNNDISSWTKGRSGEALSLLKKRFSHRPVQEKFVCLNCGFETHADEQAALNIARSWLFLRSQEYKKYQTNKTTGNTDKRAFVETWQSFYRKKLKEVWKPAV

SEQ ID NO: 44107 - protein, 979 aa, synthetic construct
  REGION 1..979: note = engineered CasX variant
QEIKRINKIRRRLVKDSNTKKAGKTGPMKTLLVRVMTPDLRERLENLRKKPENIPQPISNTSRANLNKLLTDYTEMKKAILHVYWEEFQKDPVGLMSRVAQPASKKIDQNKLKPEMDEKGNLTTAGFACSQCGQPLFVYKLEQVSEKGKAYTNYFGRCNVAEHEKLILLAQLKPEKDSDEAVTYSLGKFGQRALDFYSIHVTKESTHPVKPLAQIAGNRYASTPVGKALSDACMGTIASFLSKYQDIIIEHQKVVKGNQKRLESLRELAGKENLEYPSVTLPPQPHTKEGVDAYNEVIARVRMWVNLNLWQKLKLSRDDAKPLLRLKGFPSFPLVERQQANEVDWWDMVCNVKKLINEKKEDGKVFWQNLAGYKRQEALRPYLSSEEDRKKGKKFARYQLGDLLLHLEKKHPEDWGKVYDEAWERIDKKVEGLSKHIKLEEERRSEDAQSKAALTDWLRAKASFVIEGLKEADKDEFCRCELKLQKWYGDLRGKPFAIEAENSILDISGFSKQYNCAFIWQKDGVKKLNLYLIINYFKGGKLRFKKIKPEAFEANRFYTVINKKSGEIVPMEVNFNFDDPNLIILPLAFGKRQGREFIWNDLLSLETGSLKLANGRVIEKTLYNRRTRQDEPALFVALTFERREVLDSSNIKPMNLIGVDRGENIPAVIALTDPEGCPLSRFKDSLGNPTHILRIGESYKEKQRTIQAKKEVEQRRAGGYSRKYASKAKNLADDMVRNTARDLLYYAVTQDAMLIFENLSRGFGRQGKRTFMAERQYTRMEDWLTAKLAYEGLPSKTYLSKTLAQYTSKTCSNCGFTITSADYDRVLEKLKKTATGWMTTINGKELKVEGQITYYNRYKRQNVVKDLSVELDRLSEESVNNDISSWTKGRSGEALSLLKKRFSHRPVQEKFVCLNCGFETHADEQAALNIARSWLFLRSQEYKKYQTNKTTGNTDKRAFVETWQSFYRKKLKEVWKPAV

SEQ ID NO: 44108 - protein, 979 aa, synthetic construct
  REGION 1..979: note = engineered CasX variant
QEIKRINKIRRRLVKDSNTKKAGKTGPMKTLLVRVMTPDLRERLENLRKKPENIPQPISNTSRANLNKLLTDYTEMKKAILHVYWEEFQKDPVGLMSRVAQPASKKIDQNKLKPEMDEKGNLTTAGFACSQCGQPLFVYKLEQVSEKGKAYTNYFGRCNVAEHEKLILLAQLKPEKDSDEAVTYSLGKFGQRALDFYSIHVTKESTHPVKPLAQIAGNRYASAPVGKALSDACMGTIASFLSKYQDIIIEHQKVVKGNQKRLESLRELAGKENLEYPSVTLPPQPHTKEGVDAYNEVIARVRMWVNLNLWQKLKLSRDDAKPLLRLKGFPSFPLVERQQANEVDWWDMVCNVKKLINEKKEDGKVFWQNLAGYKRQEALRPYLSSEEDRKKGKKFARYQLGDLLLHLEKKHPEDWGKVYDEAWERIDKKVEGLSKHIKLEEERRSEDAQSKAALTDWLRAKASFVIEGLKEADKDEFCRCELKLQKWYGDLRGKPFAIEAENSILDISGFSKQYNCAFIWQKDGVKKLNLYLIINYFKGGKLRFKKIKPEAFEANRFYTVINKKSGEIVPMEVNFNFDDPNLIILPLAFGKRQGREFIWNDLLSLETGSLKLANGRVIEKTLYNRRTRQDEPALFVALTFERREVLDSSNIKPMNLIGVDRGENIPAVIALTDPEGCPLSRFKDSLGNPTHILRIGESYKEKQRTIQAKKEVEQRRAGGYSRKYASKAKNLADDMVRNTARDLLYYAVTQDAMLIFENLSRGFGRQGKRTFMAERQYTRMEDWLTAKLAYEGLPSKTYLSKTLAQYTSKTCSNCGFTITSADYDRVLEKLKKTATGWMTTINGKELKVEGQITYYNRYKRQNVVKDLSVELDRLSEESVNNDISSWTKGRSGEALSLLKKRFSHRPVQEKFVCLNCGFETHADEQAALNIARSWLFLRSQEYKKYQTNKTTGNTDKRAFVETWQSFYRKKLKEVWKPAV

SEQ ID NO: 44109 - protein, 979 aa, synthetic construct
  REGION 1..979: note = engineered CasX variant
QEIKRINKIRRRLVKDSNTKKAGKTGPMKTLLVRVMTPDLRERLENLRKKPENIPQPISNTSRANLNKLLTDYTEMKKAILHVYWEEFQKDPVGLMSRVAQPASKKIDQNKLKPEMDEKGNLTTAGFACSQCGQPLFVYKLEQVSEKGKAYTNYFGRCNVAEHEKLILLAQLKPEKDSDEAVTYSLGKFGQRALDFYSIHVTKESTHPVKPLAQIAGNRYASVPVGKALSDACMGTIASFLSKYQDIIIEHQKVVKGNQKRLESLRELAGKENLEYPSVTLPPQPHTKEGVDAYNEVIARVRMWVNLNLWQKLKLSRDDAKPLLRLKGFPSFPLVERQQANEVDWWDMVCNVKKLINEKKEDGKVFWQNLAGYKRQEALRPYLSSEEDRKKGKKFARYQLGDLLLHLEKKHPEDWGKVYDEAWERIDKKVEGLSKHIKLEEERRSEDAQSKAALTDWLRAKASFVIEGLKEADKDEFCRCELKLQKWYGDLRGKPFAIEAENSILDISGFSKQYNCAFIWQKDGVKKLNLYLIINYFKGGKLRFKKIKPEAFEANRFYTVINKKSGEIVPMEVNFNFDDPNLIILPLAFGKRQGREFIWNDLLSLETGSLKLANGRVIEKTLYNRRTRQDEPALFVALTFERREVLDSSNIKPMNLIGVDRGENIPAVIALTDPEGCPLSRFKDSLGNPTHILRIGESYKEKQRTIQAKKEVEQRRAGGYSRKYASKAKNLADDMVRNTARDLLYYAVTQDAMLIFENLSRGFGRQGKRTFMAERQYTRMEDWLTAKLAYEGLPSKTYLSKTLAQYTSKTCSNCGFTITSADYDRVLEKLKKTATGWMTTINGKELKVEGQITYYNRYKRQNVVKDLSVELDRLSEESVNNDISSWTKGRSGEALSLLKKRFSHRPVQEKFVCLNCGFETHADEQAALNIARSWLFLRSQEYKKYQTNKTTGNTDKRAFVETWQSFYRKKLKEVWKPAV

SEQ ID NO: 44110 - protein, 979 aa, synthetic construct
  REGION 1..979: note = engineered CasX variant
QEIKRINKIRRRLVKDSNTKKAGKTGPMKTLLVRVMTPDLRERLENLRKKPENIPQPISNTSRANLNKLLTDYTEMKKAILHVYWEEFQKDPVGLMSRVAQPASKKIDQNKLKPEMDEKGNLTTAGFACSQCGQPLFVYKLEQVSEKGKAYTNYFGRCNVAEHEKLIKLAQLKPEKDSDEAVTYSLGKFGQRALDFYSIHVTKESTHPVKPLAQIAGNRYASGPVGKALSDACMGTIASFLSKYQDIIIEHQKVVKGNQKRLESLRELAGKENLEYPSVTLPPQPHTKEGVDAYNEVIARVRMWVNLNLWQKLKLSRDDAKPLLRLKGFPSFPLVERQQANEVDWWDMVCNVKKLINEKKEDGKVFWQNLAGYKRQEALRPYLSSEEDRKKGKKFARYQLGDLLLHLEKKHPEDWGKVYDEAWERIDKKVEGLSKHIKLEEERRSEDAQSKAALTDWLRAKASFVIEGLKEADKDEFCRCELKLQKWYGDLRGKPFAIEAENSILDISGFSKQYNCAFIWQKDGVKKLNLYLIINYFKGGKLRFKKIKPEAFEANRFYTVINKKSGEIVPMEVNFNFDDPNLIILPLAFGKRQGREFIWNDLLSLETGSLKLANGRVIEKTLYNRRTRQDEPALFVALTFERREVLDSSNIKPMNLIGVDRGENIPAVIALTDPEGCPLSRFKDSLGNPTHILRIGESYKEKQRTIQAKKEVEQRRAGGYSRKYASKAKNLADDMVRNTARDLLYYAVTQDAMLIFENLSRGFGRQGKRTFMAERQYTRMEDWLTAKLAYEGLPSKTYLSKTLAQYTSKTCSNCGFTITSADYDRVLEKLKKTATGWMTTINGKELKVEGQITYYNRYKRQNVVKDLSVELDRLSEESVNNDISSWTKGRSGEALSLLKKRFSHRPVQEKFVCLNCGFETHADEQAALNIARSWLFLRSQEYKKYQTNKTTGNTDKRAFVETWQSFYRKKLKEVWKPAV

SEQ ID NO: 44111 - protein, 978 aa, synthetic construct
  REGION 1..978: note = engineered CasX variant
QEIKRINKIRRRLVKDSNTKKAGKTGPMKTLLVRVMTPDLRERLENLRKKPENIPQPISNTSRANLNKLLTDYTEMKKAILHVYWEEFQKDPVGLMSRVAQPASKKIDQNKLKPEMDEKGNLTTAGFACSQCGQPLFVYKLEQVSEKGKAYTNYFGRCNVAEHEKLILLAQLKPEKDSDEAVTYSLGKFGQRALDFYSIHVTKESTHPVKPLAQIAGNRYASPVGKALSDACMGTIASFLSKYQDIIIEHQKVVKGNQKRLESLRELAGKENLEYPSVTLPPQPHTKEGVDAYNEVIARVRMWVNLNLWQKLKLSRDDAKPLLRLKGFPSFPLVERQQANEVDWWDMVCNVKKLINEKKEDGKVFWQNLAGYKRQEALRPYLSSEEDRKKGKKFARYQLGDLLLHLEKKHPEDWGKVYDEAWERIDKKVEGLSKHIKLEEERRSEDAQSKAALTDWLRAKASFVIEGLKEADKDEFCRCELKLQKWYGDLRGKPFAIEAENSILDISGFSKQYNCAFIWQKDGVKKLNLYLIINYFKGGKLRFKKIKPEAFEANRFYTVINKKSGEIVPMEVNFNFDDPNLIILPLAFGKRQGREFIWNDLLSLETGSLKLANGRVIEKTLYNRRTRQDEPALFVALTFERREVLDSSNIKPMNLIGVDRGENIPAVIALTDPEGCPLSRFKDSLGNPTHILRIGESYKEKQRTIQAKKEVEQRRAGGYSRKYASKAKNLADDMVRNTARDLLYYAVTQDAMLIFENLSRGFGRQGKRTFMAERQYTRMEDWLTAKLAYEGLPSKTYLSKTLAQYTSKTCSNCGFTITSADYDRVLEKLKKTATGWMTTINGKELKVEGQITYYNRYKRQNVVKDLSVELDRLSEESVNNDISSWTKGRSGEALSLLKKRFSHRPVQEKFVCLNCGFETHADEQAALNIARSWLFLRSQEYKKYQTNKTTGNTDKRAFVETWQSFYRKKLKEVWKPAV

SEQ ID NO: 44112 - protein, 980 aa, synthetic construct
  REGION 1..980: note = engineered CasX variant
QEIKRINKIRRRLVKDSNTKKAGKTGPMKTLLVRVMTPDLRERLENLRKKPENIPQPISNTSRANLNKLLTDYTEMKKAILHVYWEEFQKDPVGLMSRVAQPASKKIDQNKLKPEMDEKGNLTTAGFACSQCGQPLFVYKLEQVSEKGKAYTNYFGRCNVAEHEKLILLAQLKPEKDSDEAVTYSLGKFGQRALDFYSIHVTKESTHPVKPLAQIAGNRYASYPVGKALSDACMGTIASFLSKYQDIIIEHQKVVKGNQKRLESLRELAGKENLEYPSVTLPPQPHTKEGVDAYNEVIARVRMWVNLNLWQKLKLSRDDAKPLLRLKGFPSFPLVERQQANEVDWWDMVCNVKKLINEKKEDGKVFWQNLAGYKRQEALRPYLSSEEDRKKGKKFARYQLGDLLLHLEKKHGERDWGKVYDEAWERIDKKVEGLSKHIKLEEERRSEDAQSKAALTDWLRAKASFVIEGLKEADKDEFCRCELKLQKWYGDLRGKPFAIEAENSILDISGFSKQYNCAFIWQKDGVKKLNLYLIINYFKGGKLRFKKIKPEAFEANRFYTVINKKSGEIVPMEVNFNFDDPNLIILPLAFGKRQGREFIWNDLLSLETGSLKLANGRVIEKTLYNRRTRQDEPALFVALTFERREVLDSSNIKPMNLIGVDRGENIPAVIALTDPEGCPLSRFKDSLGNPTHILRIGESYKEKQRTIQAKKEVEQRRAGGYSRKYASKAKNLADDMVRNTARDLLYYAVTQDAMLIFENLSRGFGRQGKRTFMAERQYTRMEDWLTAKLAYEGLPSKTYLSKTLAQYTSKTCSNCGFTITSADYDRVLEKLKKTATGWMTTINGKELKVEGQITYYNRYKRQNVVKDLSVELDRLSEESVNNDISSWTKGRSGEALSLLKKRFSHRPVQEKFVCLNCGFETHADEQAALNIARSWLFLRSQEYKKYQTNKTTGNTDKRAFVETWQSFYRKKLKEVWKPAV

SEQ ID NO: 44113 - protein, 980 aa, synthetic construct
  REGION 1..980: note = engineered CasX variant
QEIKRINKIRRRLVKDSNTKKAGKTGPMKTLLVRVMTPDLRERLENLRKKPENIPQPISNTSRANLNKLLTDYTEMKKAILHVYWEEFQKDPVGLMSRVAQPASKKIDQNKLKPEMDEKGNLTTAGFACSQCGQPLFVYKLEQVSEKGKAYTNYFGRCNVAEHEKLILLAQLKPEKDSDEAVTYSLGKFGQRALDFYSIHVTKESTHPVKPLAQIAGNRYASHPVGKALSDACMGTIASFLSKYQDIIIEHQKVVKGNQKRLESLRELAGKENLEYPSVTLPPQPHTKEGVDAYNEVIARVRMWVNLNLWQKLKLSRDDAKPLLRLKGFPSFPLVERQQANEVDWWDMVCNVKKLINEKKEDGKVFWQNLAGYKRQEALRPYLSSEEDRKKGKKFARYQLGDLLLHLEKKHGERDWGKVYDEAWERIDKKVEGLSKHIKLEEERRSEDAQSKAALTDWLRAKASFVIEGLKEADKDEFCRCELKLQKWYGDLRGKPFAIEAENSILDISGFSKQYNCAFIWQKDGVKKLNLYLIINYFKGGKLRFKKIKPEAFEANRFYTVINKKSGEIVPMEVNFNFDDPNLIILPLAFGKRQGREFIWNDLLSLETGSLKLANGRVIEKTLYNRRTRQDEPALFVALTFERREVLDSSNIKPMNLIGVDRGENIPAVIALTDPEGCPLSRFKDSLGNPTHILRIGESYKEKQRTIQAKKEVEQRRAGGYSRKYASKAKNLADDMVRNTARDLLYYAVTQDAMLIFENLSRGFGRQGKRTFMAERQYTRMEDWLTAKLAYEGLPSKTYLSKTLAQYTSKTCSNCGFTITSADYDRVLEKLKKTATGWMTTINGKELKVEGQITYYNRYKRQNVVKDLSVELDRLSEESVNNDISSWTKGRSGEALSLLKKRFSHRPVQEKFVCLNCGFETHADEQAALNIARSWLFLRSQEYKKYQTNKTTGNTDKRAFVETWQSFYRKKLKEVWKPAV

SEQ ID NO: 44114 - protein, 980 aa, synthetic construct
  REGION 1..980: note = engineered CasX variant
QEIKRINKIRRRLVKDSNTKKAGKTGPMKTLLVRVMTPDLRERLENLRKKPENIPQPISNTSRANLNKLLTDYTEMKKAILHVYWEEFQKDPVGLMSRVAQPASKKIDQNKLKPEMDEKGNLTTAGFACSQCGQPLFVYKLEQVSEKGKAYTNYFGRCNVAEHEKLILLAQLKPEKDSDEAVTYSLGKFGQRALDFYSIHVTKESTHPVKPLAQIAGNRYASSPVGKALSDACMGTIASFLSKYQDIIIEHQKVVKGNQKRLESLRELAGKENLEYPSVTLPPQPHTKEGVDAYNEVIARVRMWVNLNLWQKLKLSRDDAKPLLRLKGFPSFPLVERQQANEVDWWDMVCNVKKLINEKKEDGKVFWQNLAGYKRQEALRPYLSSEEDRKKGKKFARYQLGDLLLHLEKKHGERDWGKVYDEAWERIDKKVEGLSKHIKLEEERRSEDAQSKAALTDWLRAKASFVIEGLKEADKDEFCRCELKLQKWYGDLRGKPFAIEAENSILDISGFSKQYNCAFIWQKDGVKKLNLYLIINYFKGGKLRFKKIKPEAFEANRFYTVINKKSGEIVPMEVNFNFDDPNLIILPLAFGKRQGREFIWNDLLSLETGSLKLANGRVIEKTLYNRRTRQDEPALFVALTFERREVLDSSNIKPMNLIGVDRGENIPAVIALTDPEGCPLSRFKDSLGNPTHILRIGESYKEKQRTIQAKKEVEQRRAGGYSRKYASKAKNLADDMVRNTARDLLYYAVTQDAMLIFENLSRGFGRQGKRTFMAERQYTRMEDWLTAKLAYEGLPSKTYLSKTLAQYTSKTCSNCGFTITSADYDRVLEKLKKTATGWMTTINGKELKVEGQITYYNRYKRQNVVKDLSVELDRLSEESVNNDISSWTKGRSGEALSLLKKRFSHRPVQEKFVCLNCGFETHADEQAALNIARSWLFLRSQEYKKYQTNKTTGNTDKRAFVETWQSFYRKKLKEVWKPAV

SEQ ID NO: 44115 - protein, 980 aa, synthetic construct
  REGION 1..980: note = engineered CasX variant
QEIKRINKIRRRLVKDSNTKKAGKTGPMKTLLVRVMTPDLRERLENLRKKPENIPQPISNTSRANLNKLLTDYTEMKKAILHVYWEEFQKDPVGLMSRVAQPASKKIDQNKLKPEMDEKGNLTTAGFACSQCGQPLFVYKLEQVSEKGKAYTNYFGRCNVAEHEKLILLAQLKPEKDSDEAVTYSLGKFGQRALDFYSIHVTKESTHPVKPLAQIAGNRYASTPVGKALSDACMGTIASFLSKYQDIIIEHQKVVKGNQKRLESLRELAGKENLEYPSVTLPPQPHTKEGVDAYNEVIARVRMWVNLNLWQKLKLSRDDAKPLLRLKGFPSFPLVERQQANEVDWWDMVCNVKKLINEKKEDGKVFWQNLAGYKRQEALRPYLSSEEDRKKGKKFARYQLGDLLLHLEKKHGERDWGKVYDEAWERIDKKVEGLSKHIKLEEERRSEDAQSKAALTDWLRAKASFVIEGLKEADKDEFCRCELKLQKWYGDLRGKPFAIEAENSILDISGFSKQYNCAFIWQKDGVKKLNLYLIINYFKGGKLRFKKIKPEAFEANRFYTVINKKSGEIVPMEVNFNFDDPNLIILPLAFGKRQGREFIWNDLLSLETGSLKLANGRVIEKTLYNRRTRQDEPALFVALTFERREVLDSSNIKPMNLIGVDRGENIPAVIALTDPEGCPLSRFKDSLGNPTHILRIGESYKEKQRTIQAKKEVEQRRAGGYSRKYASKAKNLADDMVRNTARDLLYYAVTQDAMLIFENLSRGFGRQGKRTFMAERQYTRMEDWLTAKLAYEGLPSKTYLSKTLAQYTSKTCSNCGFTITSADYDRVLEKLKKTATGWMTTINGKELKVEGQITYYNRYKRQNVVKDLSVELDRLSEESVNNDISSWTKGRSGEALSLLKKRFSHRPVQEKFVCLNCGFETHADEQAALNIARSWLFLRSQEYKKYQTNKTTGNTDKRAFVETWQSFYRKKLKEVWKPAV

SEQ ID NO: 44116 - protein, 980 aa, synthetic construct
  REGION 1..980: note = engineered CasX variant
QEIKRINKIRRRLVKDSNTKKAGKTGPMKTLLVRVMTPDLRERLENLRKKPENIPQPISNTSRANLNKLLTDYTEMKKAILHVYWEEFQKDPVGLMSRVAQPASKKIDQNKLKPEMDEKGNLTTAGFACSQCGQPLFVYKLEQVSEKGKAYTNYFGRCNVAEHEKLILLAQLKPEKDSDEAVTYSLGKFGQRALDFYSIHVTKESTHPVKPLAQIAGNRYASAPVGKALSDACMGTIASFLSKYQDIIIEHQKVVKGNQKRLESLRELAGKENLEYPSVTLPPQPHTKEGVDAYNEVIARVRMWVNLNLWQKLKLSRDDAKPLLRLKGFPSFPLVERQQANEVDWWDMVCNVKKLINEKKEDGKVFWQNLAGYKRQEALRPYLSSEEDRKKGKKFARYQLGDLLLHLEKKHGERDWGKVYDEAWERIDKKVEGLSKHIKLEEERRSEDAQSKAALTDWLRAKASFVIEGLKEADKDEFCRCELKLQKWYGDLRGKPFAIEAENSILDISGFSKQYNCAFIWQKDGVKKLNLYLIINYFKGGKLRFKKIKPEAFEANRFYTVINKKSGEIVPMEVNFNFDDPNLIILPLAFGKRQGREFIWNDLLSLETGSLKLANGRVIEKTLYNRRTRQDEPALFVALTFERREVLDSSNIKPMNLIGVDRGENIPAVIALTDPEGCPLSRFKDSLGNPTHILRIGESYKEKQRTIQAKKEVEQRRAGGYSRKYASKAKNLADDMVRNTARDLLYYAVTQDAMLIFENLSRGFGRQGKRTFMAERQYTRMEDWLTAKLAYEGLPSKTYLSKTLAQYTSKTCSNCGFTITSADYDRVLEKLKKTATGWMTTINGKELKVEGQITYYNRYKRQNVVKDLSVELDRLSEESVNNDISSWTKGRSGEALSLLKKRFSHRPVQEKFVCLNCGFETHADEQAALNIARSWLFLRSQEYKKYQTNKTTGNTDKRAFVETWQSFYRKKLKEVWKPAV

SEQ ID NO: 44117 - protein, 980 aa, synthetic construct
  REGION 1..980: note = engineered CasX variant
QEIKRINKIRRRLVKDSNTKKAGKTGPMKTLLVRVMTPDLRERLENLRKKPENIPQPISNTSRANLNKLLTDYTEMKKAILHVYWEEFQKDPVGLMSRVAQPASKKIDQNKLKPEMDEKGNLTTAGFACSQCGQPLFVYKLEQVSEKGKAYTNYFGRCNVAEHEKLILLAQLKPEKDSDEAVTYSLGKFGQRALDFYSIHVTKESTHPVKPLAQIAGNRYASVPVGKALSDACMGTIASFLSKYQDIIIEHQKVVKGNQKRLESLRELAGKENLEYPSVTLPPQPHTKEGVDAYNEVIARVRMWVNLNLWQKLKLSRDDAKPLLRLKGFPSFPLVERQQANEVDWWDMVCNVKKLINEKKEDGKVFWQNLAGYKRQEALRPYLSSEEDRKKGKKFARYQLGDLLLHLEKKHGERDWGKVYDEAWERIDKKVEGLSKHIKLEEERRSEDAQSKAALTDWLRAKASFVIEGLKEADKDEFCRCELKLQKWYGDLRGKPFAIEAENSILDISGFSKQYNCAFIWQKDGVKKLNLYLIINYFKGGKLRFKKIKPEAFEANRFYTVINKKSGEIVPMEVNFNFDDPNLIILPLAFGKRQGREFIWNDLLSLETGSLKLANGRVIEKTLYNRRTRQDEPALFVALTFERREVLDSSNIKPMNLIGVDRGENIPAVIALTDPEGCPLSRFKDSLGNPTHILRIGESYKEKQRTIQAKKEVEQRRAGGYSRKYASKAKNLADDMVRNTARDLLYYAVTQDAMLIFENLSRGFGRQGKRTFMAERQYTRMEDWLTAKLAYEGLPSKTYLSKTLAQYTSKTCSNCGFTITSADYDRVLEKLKKTATGWMTTINGKELKVEGQITYYNRYKRQNVVKDLSVELDRLSEESVNNDISSWTKGRSGEALSLLKKRFSHRPVQEKFVCLNCGFETHADEQAALNIARSWLFLRSQEYKKYQTNKTTGNTDKRAFVETWQSFYRKKLKEVWKPAV

SEQ ID NO: 44118 - protein, 980 aa, synthetic construct
  REGION 1..980: note = engineered CasX variant
QEIKRINKIRRRLVKDSNTKKAGKTGPMKTLLVRVMTPDLRERLENLRKKPENIPQPISNTSRANLNKLLTDYTEMKKAILHVYWEEFQKDPVGLMSRVAQPASKKIDQNKLKPEMDEKGNLTTAGFACSQCGQPLFVYKLEQVSEKGKAYTNYFGRCNVAEHEKLIKLAQLKPEKDSDEAVTYSLGKFGQRALDFYSIHVTKESTHPVKPLAQIAGNRYASGPVGKALSDACMGTIASFLSKYQDIIIEHQKVVKGNQKRLESLRELAGKENLEYPSVTLPPQPHTKEGVDAYNEVIARVRMWVNLNLWQKLKLSRDDAKPLLRLKGFPSFPLVERQQANEVDWWDMVCNVKKLINEKKEDGKVFWQNLAGYKRQEALRPYLSSEEDRKKGKKFARYQLGDLLLHLEKKHGERDWGKVYDEAWERIDKKVEGLSKHIKLEEERRSEDAQSKAALTDWLRAKASFVIEGLKEADKDEFCRCELKLQKWYGDLRGKPFAIEAENSILDISGFSKQYNCAFIWQKDGVKKLNLYLIINYFKGGKLRFKKIKPEAFEANRFYTVINKKSGEIVPMEVNFNFDDPNLIILPLAFGKRQGREFIWNDLLSLETGSLKLANGRVIEKTLYNRRTRQDEPALFVALTFERREVLDSSNIKPMNLIGVDRGENIPAVIALTDPEGCPLSRFKDSLGNPTHILRIGESYKEKQRTIQAKKEVEQRRAGGYSRKYASKAKNLADDMVRNTARDLLYYAVTQDAMLIFENLSRGFGRQGKRTFMAERQYTRMEDWLTAKLAYEGLPSKTYLSKTLAQYTSKTCSNCGFTITSADYDRVLEKLKKTATGWMTTINGKELKVEGQITYYNRYKRQNVVKDLSVELDRLSEESVNNDISSWTKGRSGEALSLLKKRFSHRPVQEKFVCLNCGFETHADEQAALNIARSWLFLRSQEYKKYQTNKTTGNTDKRAFVETWQSFYRKKLKEVWKPAV

SEQ ID NO: 44119 - protein, 979 aa, synthetic construct
  REGION 1..979: note = engineered CasX variant
QEIKRINKIRRRLVKDSNTKKAGKTGPMKTLLVRVMTPDLRERLENLRKKPENIPQPISNTSRANLNKLLTDYTEMKKAILHVYWEEFQKDPVGLMSRVAQPASKKIDQNKLKPEMDEKGNLTTAGFACSQCGQPLFVYKLEQVSEKGKAYTNYFGRCNVAEHEKLILLAQLKPEKDSDEAVTYSLGKFGQRALDFYSIHVTKESTHPVKPLAQIAGNRYASPVGKALSDACMGTIASFLSKYQDIIIEHQKVVKGNQKRLESLRELAGKENLEYPSVTLPPQPHTKEGVDAYNEVIARVRMWVNLNLWQKLKLSRDDAKPLLRLKGFPSFPLVERQQANEVDWWDMVCNVKKLINEKKEDGKVFWQNLAGYKRQEALRPYLSSEEDRKKGKKFARYQLGDLLLHLEKKHGERDWGKVYDEAWERIDKKVEGLSKHIKLEEERRSEDAQSKAALTDWLRAKASFVIEGLKEADKDEFCRCELKLQKWYGDLRGKPFAIEAENSILDISGFSKQYNCAFIWQKDGVKKLNLYLIINYFKGGKLRFKKIKPEAFEANRFYTVINKKSGEIVPMEVNFNFDDPNLIILPLAFGKRQGREFIWNDLLSLETGSLKLANGRVIEKTLYNRRTRQDEPALFVALTFERREVLDSSNIKPMNLIGVDRGENIPAVIALTDPEGCPLSRFKDSLGNPTHILRIGESYKEKQRTIQAKKEVEQRRAGGYSRKYASKAKNLADDMVRNTARDLLYYAVTQDAMLIFENLSRGFGRQGKRTFMAERQYTRMEDWLTAKLAYEGLPSKTYLSKTLAQYTSKTCSNCGFTITSADYDRVLEKLKKTATGWMTTINGKELKVEGQITYYNRYKRQNVVKDLSVELDRLSEESVNNDISSWTKGRSGEALSLLKKRFSHRPVQEKFVCLNCGFETHADEQAALNIARSWLFLRSQEYKKYQTNKTTGNTDKRAFVETWQSFYRKKLKEVWKPAV

SEQ ID NO: 44120 - protein, 980 aa, synthetic construct
  REGION 1..980: note = engineered CasX variant
QEIKRINKIRRRLVKDSNTKKAGKTGPMKTLLVRVMTPDLRERLENLRKKPENIPQPISNTSRANLNKLLTDYTEMKKAILHVYWEEFQKDPVGLMSRVAQPASKKIDQNKLKPEMDEKGNLTTAGFACSQCGQPLFVYKLEQVSEKGKAYTNYFGRCNVAEHEKLILLAQLKPEKDSDEAVTYSLGKFGQRALDFYSIHVTKESTHPVKPLAQIAGNRYASYPVGKALSDACMGTIASFLSKYQDIIIEHQKVVKGNQKRLESLRELAGKENLEYPSVTLPPQPHTKEGVDAYNEVIARVRMWVNLNLWQKLKLSRDDAKPLLRLKGFPSFPLVERQQANEVDWWDMVCNVKKLINEKKEDGKVFWQNLAGYKRQEALRPYLSSEEDRKKGKKFARYQLGDLLLHLEKKHGEYDWGKVYDEAWERIDKKVEGLSKHIKLEEERRSEDAQSKAALTDWLRAKASFVIEGLKEADKDEFCRCELKLQKWYGDLRGKPFAIEAENSILDISGFSKQYNCAFIWQKDGVKKLNLYLIINYFKGGKLRFKKIKPEAFEANRFYTVINKKSGEIVPMEVNFNFDDPNLIILPLAFGKRQGREFIWNDLLSLETGSLKLANGRVIEKTLYNRRTRQDEPALFVALTFERREVLDSSNIKPMNLIGVDRGENIPAVIALTDPEGCPLSRFKDSLGNPTHILRIGESYKEKQRTIQAKKEVEQRRAGGYSRKYASKAKNLADDMVRNTARDLLYYAVTQDAMLIFENLSRGFGRQGKRTFMAERQYTRMEDWLTAKLAYEGLPSKTYLSKTLAQYTSKTCSNCGFTITSADYDRVLEKLKKTATGWMTTINGKELKVEGQITYYNRYKRQNVVKDLSVELDRLSEESVNNDISSWTKGRSGEALSLLKKRFSHRPVQEKFVCLNCGFETHADEQAALNIARSWLFLRSQEYKKYQTNKTTGNTDKRAFVETWQSFYRKKLKEVWKPAV

SEQ ID NO: 44121 - protein, 980 aa, synthetic construct
  REGION 1..980: note = engineered CasX variant
QEIKRINKIRRRLVKDSNTKKAGKTGPMKTLLVRVMTPDLRERLENLRKKPENIPQPISNTSRANLNKLLTDYTEMKKAILHVYWEEFQKDPVGLMSRVAQPASKKIDQNKLKPEMDEKGNLTTAGFACSQCGQPLFVYKLEQVSEKGKAYTNYFGRCNVAEHEKLILLAQLKPEKDSDEAVTYSLGKFGQRALDFYSIHVTKESTHPVKPLAQIAGNRYASHPVGKALSDACMGTIASFLSKYQDIIIEHQKVVKGNQKRLESLRELAGKENLEYPSVTLPPQPHTKEGVDAYNEVIARVRMWVNLNLWQKLKLSRDDAKPLLRLKGFPSFPLVERQQANEVDWWDMVCNVKKLINEKKEDGKVFWQNLAGYKRQEALRPYLSSEEDRKKGKKFARYQLGDLLLHLEKKHGEYDWGKVYDEAWERIDKKVEGLSKHIKLEEERRSEDAQSKAALTDWLRAKASFVIEGLKEADKDEFCRCELKLQKWYGDLRGKPFAIEAENSILDISGFSKQYNCAFIWQKDGVKKLNLYLIINYFKGGKLRFKKIKPEAFEANRFYTVINKKSGEIVPMEVNFNFDDPNLIILPLAFGKRQGREFIWNDLLSLETGSLKLANGRVIEKTLYNRRTRQDEPALFVALTFERREVLDSSNIKPMNLIGVDRGENIPAVIALTDPEGCPLSRFKDSLGNPTHILRIGESYKEKQRTIQAKKEVEQRRAGGYSRKYASKAKNLADDMVRNTARDLLYYAVTQDAMLIFENLSRGFGRQGKRTFMAERQYTRMEDWLTAKLAYEGLPSKTYLSKTLAQYTSKTCSNCGFTITSADYDRVLEKLKKTATGWMTTINGKELKVEGQITYYNRYKRQNVVKDLSVELDRLSEESVNNDISSWTKGRSGEALSLLKKRFSHRPVQEKFVCLNCGFETHADEQAALNIARSWLFLRSQEYKKYQTNKTTGNTDKRAFVETWQSFYRKKLKEVWKPAV

SEQ ID NO: 44122 - protein, 980 aa, synthetic construct
  REGION 1..980: note = engineered CasX variant
QEIKRINKIRRRLVKDSNTKKAGKTGPMKTLLVRVMTPDLRERLENLRKKPENIPQPISNTSRANLNKLLTDYTEMKKAILHVYWEEFQKDPVGLMSRVAQPASKKIDQNKLKPEMDEKGNLTTAGFACSQCGQPLFVYKLEQVSEKGKAYTNYFGRCNVAEHEKLILLAQLKPEKDSDEAVTYSLGKFGQRALDFYSIHVTKESTHPVKPLAQIAGNRYASSPVGKALSDACMGTIASFLSKYQDIIIEHQKVVKGNQKRLESLRELAGKENLEYPSVTLPPQPHTKEGVDAYNEVIARVRMWVNLNLWQKLKLSRDDAKPLLRLKGFPSFPLVERQQANEVDWWDMVCNVKKLINEKKEDGKVFWQNLAGYKRQEALRPYLSSEEDRKKGKKFARYQLGDLLLHLEKKHGEYDWGKVYDEAWERIDKKVEGLSKHIKLEEERRSEDAQSKAALTDWLRAKASFVIEGLKEADKDEFCRCELKLQKWYGDLRGKPFAIEAENSILDISGFSKQYNCAFIWQKDGVKKLNLYLIINYFKGGKLRFKKIKPEAFEANRFYTVINKKSGEIVPMEVNFNFDDPNLIILPLAFGKRQGREFIWNDLLSLETGSLKLANGRVIEKTLYNRRTRQDEPALFVALTFERREVLDSSNIKPMNLIGVDRGENIPAVIALTDPEGCPLSRFKDSLGNPTHILRIGESYKEKQRTIQAKKEVEQRRAGGYSRKYASKAKNLADDMVRNTARDLLYYAVTQDAMLIFENLSRGFGRQGKRTFMAERQYTRMEDWLTAKLAYEGLPSKTYLSKTLAQYTSKTCSNCGFTITSADYDRVLEKLKKTATGWMTTINGKELKVEGQITYYNRYKRQNVVKDLSVELDRLSEESVNNDISSWTKGRSGEALSLLKKRFSHRPVQEKFVCLNCGFETHADEQAALNIARSWLFLRSQEYKKYQTNKTTGNTDKRAFVETWQSFYRKKLKEVWKPAV

SEQ ID NO: 44123 - protein, 980 aa, synthetic construct
  REGION 1..980: note = engineered CasX variant
QEIKRINKIRRRLVKDSNTKKAGKTGPMKTLLVRVMTPDLRERLENLRKKPENIPQPISNTSRANLNKLLTDYTEMKKAILHVYWEEFQKDPVGLMSRVAQPASKKIDQNKLKPEMDEKGNLTTAGFACSQCGQPLFVYKLEQVSEKGKAYTNYFGRCNVAEHEKLILLAQLKPEKDSDEAVTYSLGKFGQRALDFYSIHVTKESTHPVKPLAQIAGNRYASTPVGKALSDACMGTIASFLSKYQDIIIEHQKVVKGNQKRLESLRELAGKENLEYPSVTLPPQPHTKEGVDAYNEVIARVRMWVNLNLWQKLKLSRDDAKPLLRLKGFPSFPLVERQQANEVDWWDMVCNVKKLINEKKEDGKVFWQNLAGYKRQEALRPYLSSEEDRKKGKKFARYQLGDLLLHLEKKHGEYDWGKVYDEAWERIDKKVEGLSKHIKLEEERRSEDAQSKAALTDWLRAKASFVIEGLKEADKDEFCRCELKLQKWYGDLRGKPFAIEAENSILDISGFSKQYNCAFIWQKDGVKKLNLYLIINYFKGGKLRFKKIKPEAFEANRFYTVINKKSGEIVPMEVNFNFDDPNLIILPLAFGKRQGREFIWNDLLSLETGSLKLANGRVIEKTLYNRRTRQDEPALFVALTFERREVLDSSNIKPMNLIGVDRGENIPAVIALTDPEGCPLSRFKDSLGNPTHILRIGESYKEKQRTIQAKKEVEQRRAGGYSRKYASKAKNLADDMVRNTARDLLYYAVTQDAMLIFENLSRGFGRQGKRTFMAERQYTRMEDWLTAKLAYEGLPSKTYLSKTLAQYTSKTCSNCGFTITSADYDRVLEKLKKTATGWMTTINGKELKVEGQITYYNRYKRQNVVKDLSVELDRLSEESVNNDISSWTKGRSGEALSLLKKRFSHRPVQEKFVCLNCGFETHADEQAALNIARSWLFLRSQEYKKYQTNKTTGNTDKRAFVETWQSFYRKKLKEVWKPAV

SEQ ID NO: 44124 - protein, 980 aa, synthetic construct
  REGION 1..980: note = engineered CasX variant
QEIKRINKIRRRLVKDSNTKKAGKTGPMKTLLVRVMTPDLRERLENLRKKPENIPQPISNTSRANLNKLLTDYTEMKKAILHVYWEEFQKDPVGLMSRVAQPASKKIDQNKLKPEMDEKGNLTTAGFACSQCGQPLFVYKLEQVSEKGKAYTNYFGRCNVAEHEKLILLAQLKPEKDSDEAVTYSLGKFGQRALDFYSIHVTKESTHPVKPLAQIAGNRYASAPVGKALSDACMGTIASFLSKYQDIIIEHQKVVKGNQKRLESLRELAGKENLEYPSVTLPPQPHTKEGVDAYNEVIARVRMWVNLNLWQKLKLSRDDAKPLLRLKGFPSFPLVERQQANEVDWWDMVCNVKKLINEKKEDGKVFWQNLAGYKRQEALRPYLSSEEDRKKGKKFARYQLGDLLLHLEKKHGEYDWGKVYDEAWERIDKKVEGLSKHIKLEEERRSEDAQSKAALTDWLRAKASFVIEGLKEADKDEFCRCELKLQKWYGDLRGKPFAIEAENSILDISGFSKQYNCAFIWQKDGVKKLNLYLIINYFKGGKLRFKKIKPEAFEANRFYTVINKKSGEIVPMEVNFNFDDPNLIILPLAFGKRQGREFIWNDLLSLETGSLKLANGRVIEKTLYNRRTRQDEPALFVALTFERREVLDSSNIKPMNLIGVDRGENIPAVIALTDPEGCPLSRFKDSLGNPTHILRIGESYKEKQRTIQAKKEVEQRRAGGYSRKYASKAKNLADDMVRNTARDLLYYAVTQDAMLIFENLSRGFGRQGKRTFMAERQYTRMEDWLTAKLAYEGLPSKTYLSKTLAQYTSKTCSNCGFTITSADYDRVLEKLKKTATGWMTTINGKELKVEGQITYYNRYKRQNVVKDLSVELDRLSEESVNNDISSWTKGRSGEALSLLKKRFSHRPVQEKFVCLNCGFETHADEQAALNIARSWLFLRSQEYKKYQTNKTTGNTDKRAFVETWQSFYRKKLKEVWKPAV

SEQ ID NO: 44125 - protein, 980 aa, synthetic construct
  REGION 1..980: note = engineered CasX variant
QEIKRINKIRRRLVKDSNTKKAGKTGPMKTLLVRVMTPDLRERLENLRKKPENIPQPISNTSRANLNKLLTDYTEMKKAILHVYWEEFQKDPVGLMSRVAQPASKKIDQNKLKPEMDEKGNLTTAGFACSQCGQPLFVYKLEQVSEKGKAYTNYFGRCNVAEHEKLILLAQLKPEKDSDEAVTYSLGKFGQRALDFYSIHVTKESTHPVKPLAQIAGNRYASVPVGKALSDACMGTIASFLSKYQDIIIEHQKVVKGNQKRLESLRELAGKENLEYPSVTLPPQPHTKEGVDAYNEVIARVRMWVNLNLWQKLKLSRDDAKPLLRLKGFPSFPLVERQQANEVDWWDMVCNVKKLINEKKEDGKVFWQNLAGYKRQEALRPYLSSEEDRKKGKKFARYQLGDLLLHLEKKHGEYDWGKVYDEAWERIDKKVEGLSKHIKLEEERRSEDAQSKAALTDWLRAKASFVIEGLKEADKDEFCRCELKLQKWYGDLRGKPFAIEAENSILDISGFSKQYNCAFIWQKDGVKKLNLYLIINYFKGGKLRFKKIKPEAFEANRFYTVINKKSGEIVPMEVNFNFDDPNLIILPLAFGKRQGREFIWNDLLSLETGSLKLANGRVIEKTLYNRRTRQDEPALFVALTFERREVLDSSNIKPMNLIGVDRGENIPAVIALTDPEGCPLSRFKDSLGNPTHILRIGESYKEKQRTIQAKKEVEQRRAGGYSRKYASKAKNLADDMVRNTARDLLYYAVTQDAMLIFENLSRGFGRQGKRTFMAERQYTRMEDWLTAKLAYEGLPSKTYLSKTLAQYTSKTCSNCGFTITSADYDRVLEKLKKTATGWMTTINGKELKVEGQITYYNRYKRQNVVKDLSVELDRLSEESVNNDISSWTKGRSGEALSLLKKRFSHRPVQEKFVCLNCGFETHADEQAALNIARSWLFLRSQEYKKYQTNKTTGNTDKRAFVETWQSFYRKKLKEVWKPAV

SEQ ID NO: 44126 - protein, 980 aa, synthetic construct
  REGION 1..980: note = engineered CasX variant
QEIKRINKIRRRLVKDSNTKKAGKTGPMKTLLVRVMTPDLRERLENLRKKPENIPQPISNTSRANLNKLLTDYTEMKKAILHVYWEEFQKDPVGLMSRVAQPASKKIDQNKLKPEMDEKGNLTTAGFACSQCGQPLFVYKLEQVSEKGKAYTNYFGRCNVAEHEKLIKLAQLKPEKDSDEAVTYSLGKFGQRALDFYSIHVTKESTHPVKPLAQIAGNRYASGPVGKALSDACMGTIASFLSKYQDIIIEHQKVVKGNQKRLESLRELAGKENLEYPSVTLPPQPHTKEGVDAYNEVIARVRMWVNLNLWQKLKLSRDDAKPLLRLKGFPSFPLVERQQANEVDWWDMVCNVKKLINEKKEDGKVFWQNLAGYKRQEALRPYLSSEEDRKKGKKFARYQLGDLLLHLEKKHGEYDWGKVYDEAWERIDKKVEGLSKHIKLEEERRSEDAQSKAALTDWLRAKASFVIEGLKEADKDEFCRCELKLQKWYGDLRGKPFAIEAENSILDISGFSKQYNCAFIWQKDGVKKLNLYLIINYFKGGKLRFKKIKPEAFEANRFYTVINKKSGEIVPMEVNFNFDDPNLIILPLAFGKRQGREFIWNDLLSLETGSLKLANGRVIEKTLYNRRTRQDEPALFVALTFERREVLDSSNIKPMNLIGVDRGENIPAVIALTDPEGCPLSRFKDSLGNPTHILRIGESYKEKQRTIQAKKEVEQRRAGGYSRKYASKAKNLADDMVRNTARDLLYYAVTQDAMLIFENLSRGFGRQGKRTFMAERQYTRMEDWLTAKLAYEGLPSKTYLSKTLAQYTSKTCSNCGFTITSADYDRVLEKLKKTATGWMTTINGKELKVEGQITYYNRYKRQNVVKDLSVELDRLSEESVNNDISSWTKGRSGEALSLLKKRFSHRPVQEKFVCLNCGFETHADEQAALNIARSWLFLRSQEYKKYQTNKTTGNTDKRAFVETWQSFYRKKLKEVWKPAV

SEQ ID NO: 44127 - protein, 979 aa, synthetic construct
  REGION 1..979: note = engineered CasX variant
QEIKRINKIRRRLVKDSNTKKAGKTGPMKTLLVRVMTPDLRERLENLRKKPENIPQPISNTSRANLNKLLTDYTEMKKAILHVYWEEFQKDPVGLMSRVAQPASKKIDQNKLKPEMDEKGNLTTAGFACSQCGQPLFVYKLEQVSEKGKAYTNYFGRCNVAEHEKLILLAQLKPEKDSDEAVTYSLGKFGQRALDFYSIHVTKESTHPVKPLAQIAGNRYASPVGKALSDACMGTIASFLSKYQDIIIEHQKVVKGNQKRLESLRELAGKENLEYPSVTLPPQPHTKEGVDAYNEVIARVRMWVNLNLWQKLKLSRDDAKPLLRLKGFPSFPLVERQQANEVDWWDMVCNVKKLINEKKEDGKVFWQNLAGYKRQEALRPYLSSEEDRKKGKKFARYQLGDLLLHLEKKHGEYDWGKVYDEAWERIDKKVEGLSKHIKLEEERRSEDAQSKAALTDWLRAKASFVIEGLKEADKDEFCRCELKLQKWYGDLRGKPFAIEAENSILDISGFSKQYNCAFIWQKDGVKKLNLYLIINYFKGGKLRFKKIKPEAFEANRFYTVINKKSGEIVPMEVNFNFDDPNLIILPLAFGKRQGREFIWNDLLSLETGSLKLANGRVIEKTLYNRRTRQDEPALFVALTFERREVLDSSNIKPMNLIGVDRGENIPAVIALTDPEGCPLSRFKDSLGNPTHILRIGESYKEKQRTIQAKKEVEQRRAGGYSRKYASKAKNLADDMVRNTARDLLYYAVTQDAMLIFENLSRGFGRQGKRTFMAERQYTRMEDWLTAKLAYEGLPSKTYLSKTLAQYTSKTCSNCGFTITSADYDRVLEKLKKTATGWMTTINGKELKVEGQITYYNRYKRQNVVKDLSVELDRLSEESVNNDISSWTKGRSGEALSLLKKRFSHRPVQEKFVCLNCGFETHADEQAALNIARSWLFLRSQEYKKYQTNKTTGNTDKRAFVETWQSFYRKKLKEVWKPAV

SEQ ID NO: 44128 - protein, 979 aa, synthetic construct
  REGION 1..979: note = engineered CasX variant
QEIKRINKIRRRLVKDSNTKKAGKTGPMKTLLVRVMTPDLRERLENLRKKPENIPQPISNTSRANLNKLLTDYTEMKKAILHVYWEEFQKDPVGLMSRVAQPASKKIDQNKLKPEMDEKGNLTTAGFACSQCGQPLFVYKLEQVSEKGKAYTNYFGRCNVAEHEKLILLAQLKPEKDSDEAVTYSLGKFGQRALDFYSIHVTKESTHPVKPLAQIAGNRYASYPVGKALSDACMGTIASFLSKYQDIIIEHQKVVKGNQKRLESLRELAGKENLEYPSVTLPPQPHTKEGVDAYNEVIARVRMWVNLNLWQKLKLSRDDAKPLLRLKGFPSFPLVERQQANEVDWWDMVCNVKKLINEKKEDGKVFWQNLAGYKRQEALRPYLSSEEDRKKGKKFARYQLGDLLLHLEKKHGEDWGDVYDEAWERIDKKVEGLSKHIKLEEERRSEDAQSKAALTDWLRAKASFVIEGLKEADKDEFCRCELKLQKWYGDLRGKPFAIEAENSILDISGFSKQYNCAFIWQKDGVKKLNLYLIINYFKGGKLRFKKIKPEAFEANRFYTVINKKSGEIVPMEVNFNFDDPNLIILPLAFGKRQGREFIWNDLLSLETGSLKLANGRVIEKTLYNRRTRQDEPALFVALTFERREVLDSSNIKPMNLIGVDRGENIPAVIALTDPEGCPLSRFKDSLGNPTHILRIGESYKEKQRTIQAKKEVEQRRAGGYSRKYASKAKNLADDMVRNTARDLLYYAVTQDAMLIFENLSRGFGRQGKRTFMAERQYTRMEDWLTAKLAYEGLPSKTYLSKTLAQYTSKTCSNCGFTITSADYDRVLEKLKKTATGWMTTINGKELKVEGQITYYNRYKRQNVVKDLSVELDRLSEESVNNDISSWTKGRSGEALSLLKKRFSHRPVQEKFVCLNCGFETHADEQAALNIARSWLFLRSQEYKKYQTNKTTGNTDKRAFVETWQSFYRKKLKEVWKPAV

SEQ ID NO: 44129 - protein, 979 aa, synthetic construct
  REGION 1..979: note = engineered CasX variant
QEIKRINKIRRRLVKDSNTKKAGKTGPMKTLLVRVMTPDLRERLENLRKKPENIPQPISNTSRANLNKLLTDYTEMKKAILHVYWEEFQKDPVGLMSRVAQPASKKIDQNKLKPEMDEKGNLTTAGFACSQCGQPLFVYKLEQVSEKGKAYTNYFGRCNVAEHEKLILLAQLKPEKDSDEAVTYSLGKFGQRALDFYSIHVTKESTHPVKPLAQIAGNRYASHPVGKALSDACMGTIASFLSKYQDIIIEHQKVVKGNQKRLESLRELAGKENLEYPSVTLPPQPHTKEGVDAYNEVIARVRMWVNLNLWQKLKLSRDDAKPLLRLKGFPSFPLVERQQANEVDWWDMVCNVKKLINEKKEDGKVFWQNLAGYKRQEALRPYLSSEEDRKKGKKFARYQLGDLLLHLEKKHGEDWGDVYDEAWERIDKKVEGLSKHIKLEEERRSEDAQSKAALTDWLRAKASFVIEGLKEADKDEFCRCELKLQKWYGDLRGKPFAIEAENSILDISGFSKQYNCAFIWQKDGVKKLNLYLIINYFKGGKLRFKKIKPEAFEANRFYTVINKKSGEIVPMEVNFNFDDPNLIILPLAFGKRQGREFIWNDLLSLETGSLKLANGRVIEKTLYNRRTRQDEPALFVALTFERREVLDSSNIKPMNLIGVDRGENIPAVIALTDPEGCPLSRFKDSLGNPTHILRIGESYKEKQRTIQAKKEVEQRRAGGYSRKYASKAKNLADDMVRNTARDLLYYAVTQDAMLIFENLSRGFGRQGKRTFMAERQYTRMEDWLTAKLAYEGLPSKTYLSKTLAQYTSKTCSNCGFTITSADYDRVLEKLKKTATGWMTTINGKELKVEGQITYYNRYKRQNVVKDLSVELDRLSEESVNNDISSWTKGRSGEALSLLKKRFSHRPVQEKFVCLNCGFETHADEQAALNIARSWLFLRSQEYKKYQTNKTTGNTDKRAFVETWQSFYRKKLKEVWKPAV

SEQ ID NO: 44130 - protein, 979 aa, synthetic construct
  REGION 1..979: note = engineered CasX variant
QEIKRINKIRRRLVKDSNTKKAGKTGPMKTLLVRVMTPDLRERLENLRKKPENIPQPISNTSRANLNKLLTDYTEMKKAILHVYWEEFQKDPVGLMSRVAQPASKKIDQNKLKPEMDEKGNLTTAGFACSQCGQPLFVYKLEQVSEKGKAYTNYFGRCNVAEHEKLILLAQLKPEKDSDEAVTYSLGKFGQRALDFYSIHVTKESTHPVKPLAQIAGNRYASSPVGKALSDACMGTIASFLSKYQDIIIEHQKVVKGNQKRLESLRELAGKENLEYPSVTLPPQPHTKEGVDAYNEVIARVRMWVNLNLWQKLKLSRDDAKPLLRLKGFPSFPLVERQQANEVDWWDMVCNVKKLINEKKEDGKVFWQNLAGYKRQEALRPYLSSEEDRKKGKKFARYQLGDLLLHLEKKHGEDWGDVYDEAWERIDKKVEGLSKHIKLEEERRSEDAQSKAALTDWLRAKASFVIEGLKEADKDEFCRCELKLQKWYGDLRGKPFAIEAENSILDISGFSKQYNCAFIWQKDGVKKLNLYLIINYFKGGKLRFKKIKPEAFEANRFYTVINKKSGEIVPMEVNFNFDDPNLIILPLAFGKRQGREFIWNDLLSLETGSLKLANGRVIEKTLYNRRTRQDEPALFVALTFERREVLDSSNIKPMNLIGVDRGENIPAVIALTDPEGCPLSRFKDSLGNPTHILRIGESYKEKQRTIQAKKEVEQRRAGGYSRKYASKAKNLADDMVRNTARDLLYYAVTQDAMLIFENLSRGFGRQGKRTFMAERQYTRMEDWLTAKLAYEGLPSKTYLSKTLAQYTSKTCSNCGFTITSADYDRVLEKLKKTATGWMTTINGKELKVEGQITYYNRYKRQNVVKDLSVELDRLSEESVNNDISSWTKGRSGEALSLLKKRFSHRPVQEKFVCLNCGFETHADEQAALNIARSWLFLRSQEYKKYQTNKTTGNTDKRAFVETWQSFYRKKLKEVWKPAV

SEQ ID NO: 44131 - protein, 979 aa, synthetic construct
  REGION 1..979: note = engineered CasX variant
QEIKRINKIRRRLVKDSNTKKAGKTGPMKTLLVRVMTPDLRERLENLRKKPENIPQPISNTSRANLNKLLTDYTEMKKAILHVYWEEFQKDPVGLMSRVAQPASKKIDQNKLKPEMDEKGNLTTAGFACSQCGQPLFVYKLEQVSEKGKAYTNYFGRCNVAEHEKLILLAQLKPEKDSDEAVTYSLGKFGQRALDFYSIHVTKESTHPVKPLAQIAGNRYASTPVGKALSDACMGTIASFLSKYQDIIIEHQKVVKGNQKRLESLRELAGKENLEYPSVTLPPQPHTKEGVDAYNEVIARVRMWVNLNLWQKLKLSRDDAKPLLRLKGFPSFPLVERQQANEVDWWDMVCNVKKLINEKKEDGKVFWQNLAGYKRQEALRPYLSSEEDRKKGKKFARYQLGDLLLHLEKKHGEDWGDVYDEAWERIDKKVEGLSKHIKLEEERRSEDAQSKAALTDWLRAKASFVIEGLKEADKDEFCRCELKLQKWYGDLRGKPFAIEAENSILDISGFSKQYNCAFIWQKDGVKKLNLYLIINYFKGGKLRFKKIKPEAFEANRFYTVINKKSGEIVPMEVNFNFDDPNLIILPLAFGKRQGREFIWNDLLSLETGSLKLANGRVIEKTLYNRRTRQDEPALFVALTFERREVLDSSNIKPMNLIGVDRGENIPAVIALTDPEGCPLSRFKDSLGNPTHILRIGESYKEKQRTIQAKKEVEQRRAGGYSRKYASKAKNLADDMVRNTARDLLYYAVTQDAMLIFENLSRGFGRQGKRTFMAERQYTRMEDWLTAKLAYEGLPSKTYLSKTLAQYTSKTCSNCGFTITSADYDRVLEKLKKTATGWMTTINGKELKVEGQITYYNRYKRQNVVKDLSVELDRLSEESVNNDISSWTKGRSGEALSLLKKRFSHRPVQEKFVCLNCGFETHADEQAALNIARSWLFLRSQEYKKYQTNKTTGNTDKRAFVETWQSFYRKKLKEVWKPAV

SEQ ID NO: 44132 - protein, 979 aa, synthetic construct
  REGION 1..979: note = engineered CasX variant
QEIKRINKIRRRLVKDSNTKKAGKTGPMKTLLVRVMTPDLRERLENLRKKPENIPQPISNTSRANLNKLLTDYTEMKKAILHVYWEEFQKDPVGLMSRVAQPASKKIDQNKLKPEMDEKGNLTTAGFACSQCGQPLFVYKLEQVSEKGKAYTNYFGRCNVAEHEKLILLAQLKPEKDSDEAVTYSLGKFGQRALDFYSIHVTKESTHPVKPLAQIAGNRYASAPVGKALSDACMGTIASFLSKYQDIIIEHQKVVKGNQKRLESLRELAGKENLEYPSVTLPPQPHTKEGVDAYNEVIARVRMWVNLNLWQKLKLSRDDAKPLLRLKGFPSFPLVERQQANEVDWWDMVCNVKKLINEKKEDGKVFWQNLAGYKRQEALRPYLSSEEDRKKGKKFARYQLGDLLLHLEKKHGEDWGDVYDEAWERIDKKVEGLSKHIKLEEERRSEDAQSKAALTDWLRAKASFVIEGLKEADKDEFCRCELKLQKWYGDLRGKPFAIEAENSILDISGFSKQYNCAFIWQKDGVKKLNLYLIINYFKGGKLRFKKIKPEAFEANRFYTVINKKSGEIVPMEVNFNFDDPNLIILPLAFGKRQGREFIWNDLLSLETGSLKLANGRVIEKTLYNRRTRQDEPALFVALTFERREVLDSSNIKPMNLIGVDRGENIPAVIALTDPEGCPLSRFKDSLGNPTHILRIGESYKEKQRTIQAKKEVEQRRAGGYSRKYASKAKNLADDMVRNTARDLLYYAVTQDAMLIFENLSRGFGRQGKRTFMAERQYTRMEDWLTAKLAYEGLPSKTYLSKTLAQYTSKTCSNCGFTITSADYDRVLEKLKKTATGWMTTINGKELKVEGQITYYNRYKRQNVVKDLSVELDRLSEESVNNDISSWTKGRSGEALSLLKKRFSHRPVQEKFVCLNCGFETHADEQAALNIARSWLFLRSQEYKKYQTNKTTGNTDKRAFVETWQSFYRKKLKEVWKPAV

SEQ ID NO: 44133 - protein, 979 aa, synthetic construct
  REGION 1..979: note = engineered CasX variant
QEIKRINKIRRRLVKDSNTKKAGKTGPMKTLLVRVMTPDLRERLENLRKKPENIPQPISNTSRANLNKLLTDYTEMKKAILHVYWEEFQKDPVGLMSRVAQPASKKIDQNKLKPEMDEKGNLTTAGFACSQCGQPLFVYKLEQVSEKGKAYTNYFGRCNVAEHEKLILLAQLKPEKDSDEAVTYSLGKFGQRALDFYSIHVTKESTHPVKPLAQIAGNRYASVPVGKALSDACMGTIASFLSKYQDIIIEHQKVVKGNQKRLESLRELAGKENLEYPSVTLPPQPHTKEGVDAYNEVIARVRMWVNLNLWQKLKLSRDDAKPLLRLKGFPSFPLVERQQANEVDWWDMVCNVKKLINEKKEDGKVFWQNLAGYKRQEALRPYLSSEEDRKKGKKFARYQLGDLLLHLEKKHGEDWGDVYDEAWERIDKKVEGLSKHIKLEEERRSEDAQSKAALTDWLRAKASFVIEGLKEADKDEFCRCELKLQKWYGDLRGKPFAIEAENSILDISGFSKQYNCAFIWQKDGVKKLNLYLIINYFKGGKLRFKKIKPEAFEANRFYTVINKKSGEIVPMEVNFNFDDPNLIILPLAFGKRQGREFIWNDLLSLETGSLKLANGRVIEKTLYNRRTRQDEPALFVALTFERREVLDSSNIKPMNLIGVDRGENIPAVIALTDPEGCPLSRFKDSLGNPTHILRIGESYKEKQRTIQAKKEVEQRRAGGYSRKYASKAKNLADDMVRNTARDLLYYAVTQDAMLIFENLSRGFGRQGKRTFMAERQYTRMEDWLTAKLAYEGLPSKTYLSKTLAQYTSKTCSNCGFTITSADYDRVLEKLKKTATGWMTTINGKELKVEGQITYYNRYKRQNVVKDLSVELDRLSEESVNNDISSWTKGRSGEALSLLKKRFSHRPVQEKFVCLNCGFETHADEQAALNIARSWLFLRSQEYKKYQTNKTTGNTDKRAFVETWQSFYRKKLKEVWKPAV

SEQ ID NO: 44134 - protein, 979 aa, synthetic construct
  REGION 1..979: note = engineered CasX variant
QEIKRINKIRRRLVKDSNTKKAGKTGPMKTLLVRVMTPDLRERLENLRKKPENIPQPISNTSRANLNKLLTDYTEMKKAILHVYWEEFQKDPVGLMSRVAQPASKKIDQNKLKPEMDEKGNLTTAGFACSQCGQPLFVYKLEQVSEKGKAYTNYFGRCNVAEHEKLIKLAQLKPEKDSDEAVTYSLGKFGQRALDFYSIHVTKESTHPVKPLAQIAGNRYASGPVGKALSDACMGTIASFLSKYQDIIIEHQKVVKGNQKRLESLRELAGKENLEYPSVTLPPQPHTKEGVDAYNEVIARVRMWVNLNLWQKLKLSRDDAKPLLRLKGFPSFPLVERQQANEVDWWDMVCNVKKLINEKKEDGKVFWQNLAGYKRQEALRPYLSSEEDRKKGKKFARYQLGDLLLHLEKKHGEDWGDVYDEAWERIDKKVEGLSKHIKLEEERRSEDAQSKAALTDWLRAKASFVIEGLKEADKDEFCRCELKLQKWYGDLRGKPFAIEAENSILDISGFSKQYNCAFIWQKDGVKKLNLYLIINYFKGGKLRFKKIKPEAFEANRFYTVINKKSGEIVPMEVNFNFDDPNLIILPLAFGKRQGREFIWNDLLSLETGSLKLANGRVIEKTLYNRRTRQDEPALFVALTFERREVLDSSNIKPMNLIGVDRGENIPAVIALTDPEGCPLSRFKDSLGNPTHILRIGESYKEKQRTIQAKKEVEQRRAGGYSRKYASKAKNLADDMVRNTARDLLYYAVTQDAMLIFENLSRGFGRQGKRTFMAERQYTRMEDWLTAKLAYEGLPSKTYLSKTLAQYTSKTCSNCGFTITSADYDRVLEKLKKTATGWMTTINGKELKVEGQITYYNRYKRQNVVKDLSVELDRLSEESVNNDISSWTKGRSGEALSLLKKRFSHRPVQEKFVCLNCGFETHADEQAALNIARSWLFLRSQEYKKYQTNKTTGNTDKRAFVETWQSFYRKKLKEVWKPAV

SEQ ID NO: 44135 - protein, 978 aa, synthetic construct
  REGION 1..978: note = engineered CasX variant
QEIKRINKIRRRLVKDSNTKKAGKTGPMKTLLVRVMTPDLRERLENLRKKPENIPQPISNTSRANLNKLLTDYTEMKKAILHVYWEEFQKDPVGLMSRVAQPASKKIDQNKLKPEMDEKGNLTTAGFACSQCGQPLFVYKLEQVSEKGKAYTNYFGRCNVAEHEKLILLAQLKPEKDSDEAVTYSLGKFGQRALDFYSIHVTKESTHPVKPLAQIAGNRYASPVGKALSDACMGTIASFLSKYQDIIIEHQKVVKGNQKRLESLRELAGKENLEYPSVTLPPQPHTKEGVDAYNEVIARVRMWVNLNLWQKLKLSRDDAKPLLRLKGFPSFPLVERQQANEVDWWDMVCNVKKLINEKKEDGKVFWQNLAGYKRQEALRPYLSSEEDRKKGKKFARYQLGDLLLHLEKKHGEDWGDVYDEAWERIDKKVEGLSKHIKLEEERRSEDAQSKAALTDWLRAKASFVIEGLKEADKDEFCRCELKLQKWYGDLRGKPFAIEAENSILDISGFSKQYNCAFIWQKDGVKKLNLYLIINYFKGGKLRFKKIKPEAFEANRFYTVINKKSGEIVPMEVNFNFDDPNLIILPLAFGKRQGREFIWNDLLSLETGSLKLANGRVIEKTLYNRRTRQDEPALFVALTFERREVLDSSNIKPMNLIGVDRGENIPAVIALTDPEGCPLSRFKDSLGNPTHILRIGESYKEKQRTIQAKKEVEQRRAGGYSRKYASKAKNLADDMVRNTARDLLYYAVTQDAMLIFENLSRGFGRQGKRTFMAERQYTRMEDWLTAKLAYEGLPSKTYLSKTLAQYTSKTCSNCGFTITSADYDRVLEKLKKTATGWMTTINGKELKVEGQITYYNRYKRQNVVKDLSVELDRLSEESVNNDISSWTKGRSGEALSLLKKRFSHRPVQEKFVCLNCGFETHADEQAALNIARSWLFLRSQEYKKYQTNKTTGNTDKRAFVETWQSFYRKKLKEVWKPAV

SEQ ID NO: 44136 - protein, 979 aa, synthetic construct
  REGION 1..979: note = engineered CasX variant
QEIKRINKIRRRLVKDSNTKKAGKTGPMKTLLVRVMTPDLRERLENLRKKPENIPQPISNTSRANLNKLLTDYTEMKKAILHVYWEEFQKDPVGLMSRVAQPASKKIDQNKLKPEMDEKGNLTTAGFACSQCGQPLFVYKLEQVSEKGKAYTNYFGRCNVAEHEKLILLAQLKPEKDSDEAVTYSLGKFGQRALDFYSIHVTKESTHPVKPLAQIAGNRYASYPVGKALSDACMGTIASFLSKYQDIIIEHQKVVKGNQKRLESLRELAGKENLEYPSVTLPPQPHTKEGVDAYNEVIARVRMWVNLNLWQKLKLSRDDAKPLLRLKGFPSFPLVERQQANEVDWWDMVCNVKKLINEKKEDGKVFWQNLAGYKRQEALRPYLSSEEDRKKGKKFARYQLGDLLLHLEKKHGEDWGKVYGEAWERIDKKVEGLSKHIKLEEERRSEDAQSKAALTDWLRAKASFVIEGLKEADKDEFCRCELKLQKWYGDLRGKPFAIEAENSILDISGFSKQYNCAFIWQKDGVKKLNLYLIINYFKGGKLRFKKIKPEAFEANRFYTVINKKSGEIVPMEVNFNFDDPNLIILPLAFGKRQGREFIWNDLLSLETGSLKLANGRVIEKTLYNRRTRQDEPALFVALTFERREVLDSSNIKPMNLIGVDRGENIPAVIALTDPEGCPLSRFKDSLGNPTHILRIGESYKEKQRTIQAKKEVEQRRAGGYSRKYASKAKNLADDMVRNTARDLLYYAVTQDAMLIFENLSRGFGRQGKRTFMAERQYTRMEDWLTAKLAYEGLPSKTYLSKTLAQYTSKTCSNCGFTITSADYDRVLEKLKKTATGWMTTINGKELKVEGQITYYNRYKRQNVVKDLSVELDRLSEESVNNDISSWTKGRSGEALSLLKKRFSHRPVQEKFVCLNCGFETHADEQAALNIARSWLFLRSQEYKKYQTNKTTGNTDKRAFVETWQSFYRKKLKEVWKPAV

SEQ ID NO: 44137 - protein, 979 aa, synthetic construct
  REGION 1..979: note = engineered CasX variant
QEIKRINKIRRRLVKDSNTKKAGKTGPMKTLLVRVMTPDLRERLENLRKKPENIPQPISNTSRANLNKLLTDYTEMKKAILHVYWEEFQKDPVGLMSRVAQPASKKIDQNKLKPEMDEKGNLTTAGFACSQCGQPLFVYKLEQVSEKGKAYTNYFGRCNVAEHEKLILLAQLKPEKDSDEAVTYSLGKFGQRALDFYSIHVTKESTHPVKPLAQIAGNRYASHPVGKALSDACMGTIASFLSKYQDIIIEHQKVVKGNQKRLESLRELAGKENLEYPSVTLPPQPHTKEGVDAYNEVIARVRMWVNLNLWQKLKLSRDDAKPLLRLKGFPSFPLVERQQANEVDWWDMVCNVKKLINEKKEDGKVFWQNLAGYKRQEALRPYLSSEEDRKKGKKFARYQLGDLLLHLEKKHGEDWGKVYGEAWERIDKKVEGLSKHIKLEEERRSEDAQSKAALTDWLRAKASFVIEGLKEADKDEFCRCELKLQKWYGDLRGKPFAIEAENSILDISGFSKQYNCAFIWQKDGVKKLNLYLIINYFKGGKLRFKKIKPEAFEANRFYTVINKKSGEIVPMEVNFNFDDPNLIILPLAFGKRQGREFIWNDLLSLETGSLKLANGRVIEKTLYNRRTRQDEPALFVALTFERREVLDSSNIKPMNLIGVDRGENIPAVIALTDPEGCPLSRFKDSLGNPTHILRIGESYKEKQRTIQAKKEVEQRRAGGYSRKYASKAKNLADDMVRNTARDLLYYAVTQDAMLIFENLSRGFGRQGKRTFMAERQYTRMEDWLTAKLAYEGLPSKTYLSKTLAQYTSKTCSNCGFTITSADYDRVLEKLKKTATGWMTTINGKELKVEGQITYYNRYKRQNVVKDLSVELDRLSEESVNNDISSWTKGRSGEALSLLKKRFSHRPVQEKFVCLNCGFETHADEQAALNIARSWLFLRSQEYKKYQTNKTTGNTDKRAFVETWQSFYRKKLKEVWKPAV

SEQ ID NO: 44138 - protein, 979 aa, synthetic construct
  REGION 1..979: note = engineered CasX variant
QEIKRINKIRRRLVKDSNTKKAGKTGPMKTLLVRVMTPDLRERLENLRKKPENIPQPISNTSRANLNKLLTDYTEMKKAILHVYWEEFQKDPVGLMSRVAQPASKKIDQNKLKPEMDEKGNLTTAGFACSQCGQPLFVYKLEQVSEKGKAYTNYFGRCNVAEHEKLILLAQLKPEKDSDEAVTYSLGKFGQRALDFYSIHVTKESTHPVKPLAQIAGNRYASSPVGKALSDACMGTIASFLSKYQDIIIEHQKVVKGNQKRLESLRELAGKENLEYPSVTLPPQPHTKEGVDAYNEVIARVRMWVNLNLWQKLKLSRDDAKPLLRLKGFPSFPLVERQQANEVDWWDMVCNVKKLINEKKEDGKVFWQNLAGYKRQEALRPYLSSEEDRKKGKKFARYQLGDLLLHLEKKHGEDWGKVYGEAWERIDKKVEGLSKHIKLEEERRSEDAQSKAALTDWLRAKASFVIEGLKEADKDEFCRCELKLQKWYGDLRGKPFAIEAENSILDISGFSKQYNCAFIWQKDGVKKLNLYLIINYFKGGKLRFKKIKPEAFEANRFYTVINKKSGEIVPMEVNFNFDDPNLIILPLAFGKRQGREFIWNDLLSLETGSLKLANGRVIEKTLYNRRTRQDEPALFVALTFERREVLDSSNIKPMNLIGVDRGENIPAVIALTDPEGCPLSRFKDSLGNPTHILRIGESYKEKQRTIQAKKEVEQRRAGGYSRKYASKAKNLADDMVRNTARDLLYYAVTQDAMLIFENLSRGFGRQGKRTFMAERQYTRMEDWLTAKLAYEGLPSKTYLSKTLAQYTSKTCSNCGFTITSADYDRVLEKLKKTATGWMTTINGKELKVEGQITYYNRYKRQNVVKDLSVELDRLSEESVNNDISSWTKGRSGEALSLLKKRFSHRPVQEKFVCLNCGFETHADEQAALNIARSWLFLRSQEYKKYQTNKTTGNTDKRAFVETWQSFYRKKLKEVWKPAV

SEQ ID NO: 44139 - protein, 979 aa, synthetic construct
  REGION 1..979: note = engineered CasX variant
QEIKRINKIRRRLVKDSNTKKAGKTGPMKTLLVRVMTPDLRERLENLRKKPENIPQPISNTSRANLNKLLTDYTEMKKAILHVYWEEFQKDPVGLMSRVAQPASKKIDQNKLKPEMDEKGNLTTAGFACSQCGQPLFVYKLEQVSEKGKAYTNYFGRCNVAEHEKLILLAQLKPEKDSDEAVTYSLGKFGQRALDFYSIHVTKESTHPVKPLAQIAGNRYASTPVGKALSDACMGTIASFLSKYQDIIIEHQKVVKGNQKRLESLRELAGKENLEYPSVTLPPQPHTKEGVDAYNEVIARVRMWVNLNLWQKLKLSRDDAKPLLRLKGFPSFPLVERQQANEVDWWDMVCNVKKLINEKKEDGKVFWQNLAGYKRQEALRPYLSSEEDRKKGKKFARYQLGDLLLHLEKKHGEDWGKVYGEAWERIDKKVEGLSKHIKLEEERRSEDAQSKAALTDWLRAKASFVIEGLKEADKDEFCRCELKLQKWYGDLRGKPFAIEAENSILDISGFSKQYNCAFIWQKDGVKKLNLYLIINYFKGGKLRFKKIKPEAFEANRFYTVINKKSGEIVPMEVNFNFDDPNLIILPLAFGKRQGREFIWNDLLSLETGSLKLANGRVIEKTLYNRRTRQDEPALFVALTFERREVLDSSNIKPMNLIGVDRGENIPAVIALTDPEGCPLSRFKDSLGNPTHILRIGESYKEKQRTIQAKKEVEQRRAGGYSRKYASKAKNLADDMVRNTARDLLYYAVTQDAMLIFENLSRGFGRQGKRTFMAERQYTRMEDWLTAKLAYEGLPSKTYLSKTLAQYTSKTCSNCGFTITSADYDRVLEKLKKTATGWMTTINGKELKVEGQITYYNRYKRQNVVKDLSVELDRLSEESVNNDISSWTKGRSGEALSLLKKRFSHRPVQEKFVCLNCGFETHADEQAALNIARSWLFLRSQEYKKYQTNKTTGNTDKRAFVETWQSFYRKKLKEVWKPAV

SEQ ID NO: 44140 - protein, 979 aa, synthetic construct
  REGION 1..979: note = engineered CasX variant
QEIKRINKIRRRLVKDSNTKKAGKTGPMKTLLVRVMTPDLRERLENLRKKPENIPQPISNTSRANLNKLLTDYTEMKKAILHVYWEEFQKDPVGLMSRVAQPASKKIDQNKLKPEMDEKGNLTTAGFACSQCGQPLFVYKLEQVSEKGKAYTNYFGRCNVAEHEKLILLAQLKPEKDSDEAVTYSLGKFGQRALDFYSIHVTKESTHPVKPLAQIAGNRYASAPVGKALSDACMGTIASFLSKYQDIIIEHQKVVKGNQKRLESLRELAGKENLEYPSVTLPPQPHTKEGVDAYNEVIARVRMWVNLNLWQKLKLSRDDAKPLLRLKGFPSFPLVERQQANEVDWWDMVCNVKKLINEKKEDGKVFWQNLAGYKRQEALRPYLSSEEDRKKGKKFARYQLGDLLLHLEKKHGEDWGKVYGEAWERIDKKVEGLSKHIKLEEERRSEDAQSKAALTDWLRAKASFVIEGLKEADKDEFCRCELKLQKWYGDLRGKPFAIEAENSILDISGFSKQYNCAFIWQKDGVKKLNLYLIINYFKGGKLRFKKIKPEAFEANRFYTVINKKSGEIVPMEVNFNFDDPNLIILPLAFGKRQGREFIWNDLLSLETGSLKLANGRVIEKTLYNRRTRQDEPALFVALTFERREVLDSSNIKPMNLIGVDRGENIPAVIALTDPEGCPLSRFKDSLGNPTHILRIGESYKEKQRTIQAKKEVEQRRAGGYSRKYASKAKNLADDMVRNTARDLLYYAVTQDAMLIFENLSRGFGRQGKRTFMAERQYTRMEDWLTAKLAYEGLPSKTYLSKTLAQYTSKTCSNCGFTITSADYDRVLEKLKKTATGWMTTINGKELKVEGQITYYNRYKRQNVVKDLSVELDRLSEESVNNDISSWTKGRSGEALSLLKKRFSHRPVQEKFVCLNCGFETHADEQAALNIARSWLFLRSQEYKKYQTNKTTGNTDKRAFVETWQSFYRKKLKEVWKPAV

SEQ ID NO: 44141 - protein, 979 aa, synthetic construct
  REGION 1..979: note = engineered CasX variant
QEIKRINKIRRRLVKDSNTKKAGKTGPMKTLLVRVMTPDLRERLENLRKKPENIPQPISNTSRANLNKLLTDYTEMKKAILHVYWEEFQKDPVGLMSRVAQPASKKIDQNKLKPEMDEKGNLTTAGFACSQCGQPLFVYKLEQVSEKGKAYTNYFGRCNVAEHEKLILLAQLKPEKDSDEAVTYSLGKFGQRALDFYSIHVTKESTHPVKPLAQIAGNRYASVPVGKALSDACMGTIASFLSKYQDIIIEHQKVVKGNQKRLESLRELAGKENLEYPSVTLPPQPHTKEGVDAYNEVIARVRMWVNLNLWQKLKLSRDDAKPLLRLKGFPSFPLVERQQANEVDWWDMVCNVKKLINEKKEDGKVFWQNLAGYKRQEALRPYLSSEEDRKKGKKFARYQLGDLLLHLEKKHGEDWGKVYGEAWERIDKKVEGLSKHIKLEEERRSEDAQSKAALTDWLRAKASFVIEGLKEADKDEFCRCELKLQKWYGDLRGKPFAIEAENSILDISGFSKQYNCAFIWQKDGVKKLNLYLIINYFKGGKLRFKKIKPEAFEANRFYTVINKKSGEIVPMEVNFNFDDPNLIILPLAFGKRQGREFIWNDLLSLETGSLKLANGRVIEKTLYNRRTRQDEPALFVALTFERREVLDSSNIKPMNLIGVDRGENIPAVIALTDPEGCPLSRFKDSLGNPTHILRIGESYKEKQRTIQAKKEVEQRRAGGYSRKYASKAKNLADDMVRNTARDLLYYAVTQDAMLIFENLSRGFGRQGKRTFMAERQYTRMEDWLTAKLAYEGLPSKTYLSKTLAQYTSKTCSNCGFTITSADYDRVLEKLKKTATGWMTTINGKELKVEGQITYYNRYKRQNVVKDLSVELDRLSEESVNNDISSWTKGRSGEALSLLKKRFSHRPVQEKFVCLNCGFETHADEQAALNIARSWLFLRSQEYKKYQTNKTTGNTDKRAFVETWQSFYRKKLKEVWKPAV

SEQ ID NO: 44142 - protein, 979 aa, synthetic construct
  REGION 1..979: note = engineered CasX variant
QEIKRINKIRRRLVKDSNTKKAGKTGPMKTLLVRVMTPDLRERLENLRKKPENIPQPISNTSRANLNKLLTDYTEMKKAILHVYWEEFQKDPVGLMSRVAQPASKKIDQNKLKPEMDEKGNLTTAGFACSQCGQPLFVYKLEQVSEKGKAYTNYFGRCNVAEHEKLIKLAQLKPEKDSDEAVTYSLGKFGQRALDFYSIHVTKESTHPVKPLAQIAGNRYASGPVGKALSDACMGTIASFLSKYQDIIIEHQKVVKGNQKRLESLRELAGKENLEYPSVTLPPQPHTKEGVDAYNEVIARVRMWVNLNLWQKLKLSRDDAKPLLRLKGFPSFPLVERQQANEVDWWDMVCNVKKLINEKKEDGKVFWQNLAGYKRQEALRPYLSSEEDRKKGKKFARYQLGDLLLHLEKKHGEDWGKVYGEAWERIDKKVEGLSKHIKLEEERRSEDAQSKAALTDWLRAKASFVIEGLKEADKDEFCRCELKLQKWYGDLRGKPFAIEAENSILDISGFSKQYNCAFIWQKDGVKKLNLYLIINYFKGGKLRFKKIKPEAFEANRFYTVINKKSGEIVPMEVNFNFDDPNLIILPLAFGKRQGREFIWNDLLSLETGSLKLANGRVIEKTLYNRRTRQDEPALFVALTFERREVLDSSNIKPMNLIGVDRGENIPAVIALTDPEGCPLSRFKDSLGNPTHILRIGESYKEKQRTIQAKKEVEQRRAGGYSRKYASKAKNLADDMVRNTARDLLYYAVTQDAMLIFENLSRGFGRQGKRTFMAERQYTRMEDWLTAKLAYEGLPSKTYLSKTLAQYTSKTCSNCGFTITSADYDRVLEKLKKTATGWMTTINGKELKVEGQITYYNRYKRQNVVKDLSVELDRLSEESVNNDISSWTKGRSGEALSLLKKRFSHRPVQEKFVCLNCGFETHADEQAALNIARSWLFLRSQEYKKYQTNKTTGNTDKRAFVETWQSFYRKKLKEVWKPAV

SEQ ID NO: 44143 - protein, 978 aa, synthetic construct
  REGION 1..978: note = engineered CasX variant
QEIKRINKIRRRLVKDSNTKKAGKTGPMKTLLVRVMTPDLRERLENLRKKPENIPQPISNTSRANLNKLLTDYTEMKKAILHVYWEEFQKDPVGLMSRVAQPASKKIDQNKLKPEMDEKGNLTTAGFACSQCGQPLFVYKLEQVSEKGKAYTNYFGRCNVAEHEKLILLAQLKPEKDSDEAVTYSLGKFGQRALDFYSIHVTKESTHPVKPLAQIAGNRYASPVGKALSDACMGTIASFLSKYQDIIIEHQKVVKGNQKRLESLRELAGKENLEYPSVTLPPQPHTKEGVDAYNEVIARVRMWVNLNLWQKLKLSRDDAKPLLRLKGFPSFPLVERQQANEVDWWDMVCNVKKLINEKKEDGKVFWQNLAGYKRQEALRPYLSSEEDRKKGKKFARYQLGDLLLHLEKKHGEDWGKVYGEAWERIDKKVEGLSKHIKLEEERRSEDAQSKAALTDWLRAKASFVIEGLKEADKDEFCRCELKLQKWYGDLRGKPFAIEAENSILDISGFSKQYNCAFIWQKDGVKKLNLYLIINYFKGGKLRFKKIKPEAFEANRFYTVINKKSGEIVPMEVNFNFDDPNLIILPLAFGKRQGREFIWNDLLSLETGSLKLANGRVIEKTLYNRRTRQDEPALFVALTFERREVLDSSNIKPMNLIGVDRGENIPAVIALTDPEGCPLSRFKDSLGNPTHILRIGESYKEKQRTIQAKKEVEQRRAGGYSRKYASKAKNLADDMVRNTARDLLYYAVTQDAMLIFENLSRGFGRQGKRTFMAERQYTRMEDWLTAKLAYEGLPSKTYLSKTLAQYTSKTCSNCGFTITSADYDRVLEKLKKTATGWMTTINGKELKVEGQITYYNRYKRQNVVKDLSVELDRLSEESVNNDISSWTKGRSGEALSLLKKRFSHRPVQEKFVCLNCGFETHADEQAALNIARSWLFLRSQEYKKYQTNKTTGNTDKRAFVETWQSFYRKKLKEVWKPAV

SEQ ID NO: 44144 - protein, 979 aa, synthetic construct
  REGION 1..979: note = engineered CasX variant
QEIKRINKIRRRLVKDSNTKKAGKTGPMKTLLVRVMTPDLRERLENLRKKPENIPQPISNTSRANLNKLLTDYTEMKKAILHVYWEEFQKDPVGLMSRVAQPASKKIDQNKLKPEMDEKGNLTTAGFACSQCGQPLFVYKLEQVSEKGKAYTNYFGRCNVAEHEKLILLAQLKPEKDSDEAVTYSLGKFGQRALDFYSIHVTKESTHPVKPLAQIAGNRYASYPVGKALSDACMGTIASFLSKYQDIIIEHQKVVKGNQKRLESLRELAGKENLEYPSVTLPPQPHTKEGVDAYNEVIARVRMWVNLNLWQKLKLSRDDAKPLLRLKGFPSFPLVERQQANEVDWWDMVCNVKKLINEKKEDGKVFWQNLAGYKRQEALRPYLSSEEDRKKGKKFARYQLGDLLLHLEKKHGEDWGKVYDEAWERIDKKVEGLSKHIKLEEERRSEDAQSKAALTDWLRAKASFVIEGKKEADKDEFCRCELKLQKWYGDLRGKPFAIEAENSILDISGFSKQYNCAFIWQKDGVKKLNLYLIINYFKGGKLRFKKIKPEAFEANRFYTVINKKSGEIVPMEVNFNFDDPNLIILPLAFGKRQGREFIWNDLLSLETGSLKLANGRVIEKTLYNRRTRQDEPALFVALTFERREVLDSSNIKPMNLIGVDRGENIPAVIALTDPEGCPLSRFKDSLGNPTHILRIGESYKEKQRTIQAKKEVEQRRAGGYSRKYASKAKNLADDMVRNTARDLLYYAVTQDAMLIFENLSRGFGRQGKRTFMAERQYTRMEDWLTAKLAYEGLPSKTYLSKTLAQYTSKTCSNCGFTITSADYDRVLEKLKKTATGWMTTINGKELKVEGQITYYNRYKRQNVVKDLSVELDRLSEESVNNDISSWTKGRSGEALSLLKKRFSHRPVQEKFVCLNCGFETHADEQAALNIARSWLFLRSQEYKKYQTNKTTGNTDKRAFVETWQSFYRKKLKEVWKPAV

SEQ ID NO: 44145 - protein, 979 aa, synthetic construct
  REGION 1..979: note = engineered CasX variant
QEIKRINKIRRRLVKDSNTKKAGKTGPMKTLLVRVMTPDLRERLENLRKKPENIPQPISNTSRANLNKLLTDYTEMKKAILHVYWEEFQKDPVGLMSRVAQPASKKIDQNKLKPEMDEKGNLTTAGFACSQCGQPLFVYKLEQVSEKGKAYTNYFGRCNVAEHEKLILLAQLKPEKDSDEAVTYSLGKFGQRALDFYSIHVTKESTHPVKPLAQIAGNRYASHPVGKALSDACMGTIASFLSKYQDIIIEHQKVVKGNQKRLESLRELAGKENLEYPSVTLPPQPHTKEGVDAYNEVIARVRMWVNLNLWQKLKLSRDDAKPLLRLKGFPSFPLVERQQANEVDWWDMVCNVKKLINEKKEDGKVFWQNLAGYKRQEALRPYLSSEEDRKKGKKFARYQLGDLLLHLEKKHGEDWGKVYDEAWERIDKKVEGLSKHIKLEEERRSEDAQSKAALTDWLRAKASFVIEGKKEADKDEFCRCELKLQKWYGDLRGKPFAIEAENSILDISGFSKQYNCAFIWQKDGVKKLNLYLIINYFKGGKLRFKKIKPEAFEANRFYTVINKKSGEIVPMEVNFNFDDPNLIILPLAFGKRQGREFIWNDLLSLETGSLKLANGRVIEKTLYNRRTRQDEPALFVALTFERREVLDSSNIKPMNLIGVDRGENIPAVIALTDPEGCPLSRFKDSLGNPTHILRIGESYKEKQRTIQAKKEVEQRRAGGYSRKYASKAKNLADDMVRNTARDLLYYAVTQDAMLIFENLSRGFGRQGKRTFMAERQYTRMEDWLTAKLAYEGLPSKTYLSKTLAQYTSKTCSNCGFTITSADYDRVLEKLKKTATGWMTTINGKELKVEGQITYYNRYKRQNVVKDLSVELDRLSEESVNNDISSWTKGRSGEALSLLKKRFSHRPVQEKFVCLNCGFETHADEQAALNIARSWLFLRSQEYKKYQTNKTTGNTDKRAFVETWQSFYRKKLKEVWKPAV

SEQ ID NO: 44146 - protein, 979 aa, synthetic construct
  REGION 1..979: note = engineered CasX variant
QEIKRINKIRRRLVKDSNTKKAGKTGPMKTLLVRVMTPDLRERLENLRKKPENIPQPISNTSRANLNKLLTDYTEMKKAILHVYWEEFQKDPVGLMSRVAQPASKKIDQNKLKPEMDEKGNLTTAGFACSQCGQPLFVYKLEQVSEKGKAYTNYFGRCNVAEHEKLILLAQLKPEKDSDEAVTYSLGKFGQRALDFYSIHVTKESTHPVKPLAQIAGNRYASSPVGKALSDACMGTIASFLSKYQDIIIEHQKVVKGNQKRLESLRELAGKENLEYPSVTLPPQPHTKEGVDAYNEVIARVRMWVNLNLWQKLKLSRDDAKPLLRLKGFPSFPLVERQQANEVDWWDMVCNVKKLINEKKEDGKVFWQNLAGYKRQEALRPYLSSEEDRKKGKKFARYQLGDLLLHLEKKHGEDWGKVYDEAWERIDKKVEGLSKHIKLEEERRSEDAQSKAALTDWLRAKASFVIEGKKEADKDEFCRCELKLQKWYGDLRGKPFAIEAENSILDISGFSKQYNCAFIWQKDGVKKLNLYLIINYFKGGKLRFKKIKPEAFEANRFYTVINKKSGEIVPMEVNFNFDDPNLIILPLAFGKRQGREFIWNDLLSLETGSLKLANGRVIEKTLYNRRTRQDEPALFVALTFERREVLDSSNIKPMNLIGVDRGENIPAVIALTDPEGCPLSRFKDSLGNPTHILRIGESYKEKQRTIQAKKEVEQRRAGGYSRKYASKAKNLADDMVRNTARDLLYYAVTQDAMLIFENLSRGFGRQGKRTFMAERQYTRMEDWLTAKLAYEGLPSKTYLSKTLAQYTSKTCSNCGFTITSADYDRVLEKLKKTATGWMTTINGKELKVEGQITYYNRYKRQNVVKDLSVELDRLSEESVNNDISSWTKGRSGEALSLLKKRFSHRPVQEKFVCLNCGFETHADEQAALNIARSWLFLRSQEYKKYQTNKTTGNTDKRAFVETWQSFYRKKLKEVWKPAV

SEQ ID NO: 44147 - protein, 979 aa, synthetic construct
  REGION 1..979: note = engineered CasX variant
QEIKRINKIRRRLVKDSNTKKAGKTGPMKTLLVRVMTPDLRERLENLRKKPENIPQPISNTSRANLNKLLTDYTEMKKAILHVYWEEFQKDPVGLMSRVAQPASKKIDQNKLKPEMDEKGNLTTAGFACSQCGQPLFVYKLEQVSEKGKAYTNYFGRCNVAEHEKLILLAQLKPEKDSDEAVTYSLGKFGQRALDFYSIHVTKESTHPVKPLAQIAGNRYASTPVGKALSDACMGTIASFLSKYQDIIIEHQKVVKGNQKRLESLRELAGKENLEYPSVTLPPQPHTKEGVDAYNEVIARVRMWVNLNLWQKLKLSRDDAKPLLRLKGFPSFPLVERQQANEVDWWDMVCNVKKLINEKKEDGKVFWQNLAGYKRQEALRPYLSSEEDRKKGKKFARYQLGDLLLHLEKKHGEDWGKVYDEAWERIDKKVEGLSKHIKLEEERRSEDAQSKAALTDWLRAKASFVIEGKKEADKDEFCRCELKLQKWYGDLRGKPFAIEAENSILDISGFSKQYNCAFIWQKDGVKKLNLYLIINYFKGGKLRFKKIKPEAFEANRFYTVINKKSGEIVPMEVNFNFDDPNLIILPLAFGKRQGREFIWNDLLSLETGSLKLANGRVIEKTLYNRRTRQDEPALFVALTFERREVLDSSNIKPMNLIGVDRGENIPAVIALTDPEGCPLSRFKDSLGNPTHILRIGESYKEKQRTIQAKKEVEQRRAGGYSRKYASKAKNLADDMVRNTARDLLYYAVTQDAMLIFENLSRGFGRQGKRTFMAERQYTRMEDWLTAKLAYEGLPSKTYLSKTLAQYTSKTCSNCGFTITSADYDRVLEKLKKTATGWMTTINGKELKVEGQITYYNRYKRQNVVKDLSVELDRLSEESVNNDISSWTKGRSGEALSLLKKRFSHRPVQEKFVCLNCGFETHADEQAALNIARSWLFLRSQEYKKYQTNKTTGNTDKRAFVETWQSFYRKKLKEVWKPAV

SEQ ID NO: 44148 - protein, 979 aa, synthetic construct
  REGION 1..979: note = engineered CasX variant
QEIKRINKIRRRLVKDSNTKKAGKTGPMKTLLVRVMTPDLRERLENLRKKPENIPQPISNTSRANLNKLLTDYTEMKKAILHVYWEEFQKDPVGLMSRVAQPASKKIDQNKLKPEMDEKGNLTTAGFACSQCGQPLFVYKLEQVSEKGKAYTNYFGRCNVAEHEKLILLAQLKPEKDSDEAVTYSLGKFGQRALDFYSIHVTKESTHPVKPLAQIAGNRYASAPVGKALSDACMGTIASFLSKYQDIIIEHQKVVKGNQKRLESLRELAGKENLEYPSVTLPPQPHTKEGVDAYNEVIARVRMWVNLNLWQKLKLSRDDAKPLLRLKGFPSFPLVERQQANEVDWWDMVCNVKKLINEKKEDGKVFWQNLAGYKRQEALRPYLSSEEDRKKGKKFARYQLGDLLLHLEKKHGEDWGKVYDEAWERIDKKVEGLSKHIKLEEERRSEDAQSKAALTDWLRAKASFVIEGKKEADKDEFCRCELKLQKWYGDLRGKPFAIEAENSILDISGFSKQYNCAFIWQKDGVKKLNLYLIINYFKGGKLRFKKIKPEAFEANRFYTVINKKSGEIVPMEVNFNFDDPNLIILPLAFGKRQGREFIWNDLLSLETGSLKLANGRVIEKTLYNRRTRQDEPALFVALTFERREVLDSSNIKPMNLIGVDRGENIPAVIALTDPEGCPLSRFKDSLGNPTHILRIGESYKEKQRTIQAKKEVEQRRAGGYSRKYASKAKNLADDMVRNTARDLLYYAVTQDAMLIFENLSRGFGRQGKRTFMAERQYTRMEDWLTAKLAYEGLPSKTYLSKTLAQYTSKTCSNCGFTITSADYDRVLEKLKKTATGWMTTINGKELKVEGQITYYNRYKRQNVVKDLSVELDRLSEESVNNDISSWTKGRSGEALSLLKKRFSHRPVQEKFVCLNCGFETHADEQAALNIARSWLFLRSQEYKKYQTNKTTGNTDKRAFVETWQSFYRKKLKEVWKPAV

SEQ ID NO: 44149 - protein, 979 aa, synthetic construct
  REGION 1..979: note = engineered CasX variant
QEIKRINKIRRRLVKDSNTKKAGKTGPMKTLLVRVMTPDLRERLENLRKKPENIPQPISNTSRANLNKLLTDYTEMKKAILHVYWEEFQKDPVGLMSRVAQPASKKIDQNKLKPEMDEKGNLTTAGFACSQCGQPLFVYKLEQVSEKGKAYTNYFGRCNVAEHEKLILLAQLKPEKDSDEAVTYSLGKFGQRALDFYSIHVTKESTHPVKPLAQIAGNRYASVPVGKALSDACMGTIASFLSKYQDIIIEHQKVVKGNQKRLESLRELAGKENLEYPSVTLPPQPHTKEGVDAYNEVIARVRMWVNLNLWQKLKLSRDDAKPLLRLKGFPSFPLVERQQANEVDWWDMVCNVKKLINEKKEDGKVFWQNLAGYKRQEALRPYLSSEEDRKKGKKFARYQLGDLLLHLEKKHGEDWGKVYDEAWERIDKKVEGLSKHIKLEEERRSEDAQSKAALTDWLRAKASFVIEGKKEADKDEFCRCELKLQKWYGDLRGKPFAIEAENSILDISGFSKQYNCAFIWQKDGVKKLNLYLIINYFKGGKLRFKKIKPEAFEANRFYTVINKKSGEIVPMEVNFNFDDPNLIILPLAFGKRQGREFIWNDLLSLETGSLKLANGRVIEKTLYNRRTRQDEPALFVALTFERREVLDSSNIKPMNLIGVDRGENIPAVIALTDPEGCPLSRFKDSLGNPTHILRIGESYKEKQRTIQAKKEVEQRRAGGYSRKYASKAKNLADDMVRNTARDLLYYAVTQDAMLIFENLSRGFGRQGKRTFMAERQYTRMEDWLTAKLAYEGLPSKTYLSKTLAQYTSKTCSNCGFTITSADYDRVLEKLKKTATGWMTTINGKELKVEGQITYYNRYKRQNVVKDLSVELDRLSEESVNNDISSWTKGRSGEALSLLKKRFSHRPVQEKFVCLNCGFETHADEQAALNIARSWLFLRSQEYKKYQTNKTTGNTDKRAFVETWQSFYRKKLKEVWKPAV

SEQ ID NO: 44150 - protein, 979 aa, synthetic construct
  REGION 1..979: note = engineered CasX variant
QEIKRINKIRRRLVKDSNTKKAGKTGPMKTLLVRVMTPDLRERLENLRKKPENIPQPISNTSRANLNKLLTDYTEMKKAILHVYWEEFQKDPVGLMSRVAQPASKKIDQNKLKPEMDEKGNLTTAGFACSQCGQPLFVYKLEQVSEKGKAYTNYFGRCNVAEHEKLIKLAQLKPEKDSDEAVTYSLGKFGQRALDFYSIHVTKESTHPVKPLAQIAGNRYASGPVGKALSDACMGTIASFLSKYQDIIIEHQKVVKGNQKRLESLRELAGKENLEYPSVTLPPQPHTKEGVDAYNEVIARVRMWVNLNLWQKLKLSRDDAKPLLRLKGFPSFPLVERQQANEVDWWDMVCNVKKLINEKKEDGKVFWQNLAGYKRQEALRPYLSSEEDRKKGKKFARYQLGDLLLHLEKKHGEDWGKVYDEAWERIDKKVEGLSKHIKLEEERRSEDAQSKAALTDWLRAKASFVIEGKKEADKDEFCRCELKLQKWYGDLRGKPFAIEAENSILDISGFSKQYNCAFIWQKDGVKKLNLYLIINYFKGGKLRFKKIKPEAFEANRFYTVINKKSGEIVPMEVNFNFDDPNLIILPLAFGKRQGREFIWNDLLSLETGSLKLANGRVIEKTLYNRRTRQDEPALFVALTFERREVLDSSNIKPMNLIGVDRGENIPAVIALTDPEGCPLSRFKDSLGNPTHILRIGESYKEKQRTIQAKKEVEQRRAGGYSRKYASKAKNLADDMVRNTARDLLYYAVTQDAMLIFENLSRGFGRQGKRTFMAERQYTRMEDWLTAKLAYEGLPSKTYLSKTLAQYTSKTCSNCGFTITSADYDRVLEKLKKTATGWMTTINGKELKVEGQITYYNRYKRQNVVKDLSVELDRLSEESVNNDISSWTKGRSGEALSLLKKRFSHRPVQEKFVCLNCGFETHADEQAALNIARSWLFLRSQEYKKYQTNKTTGNTDKRAFVETWQSFYRKKLKEVWKPAV

SEQ ID NO: 44151 - protein, 978 aa, synthetic construct
  REGION 1..978: note = engineered CasX variant
QEIKRINKIRRRLVKDSNTKKAGKTGPMKTLLVRVMTPDLRERLENLRKKPENIPQPISNTSRANLNKLLTDYTEMKKAILHVYWEEFQKDPVGLMSRVAQPASKKIDQNKLKPEMDEKGNLTTAGFACSQCGQPLFVYKLEQVSEKGKAYTNYFGRCNVAEHEKLILLAQLKPEKDSDEAVTYSLGKFGQRALDFYSIHVTKESTHPVKPLAQIAGNRYASPVGKALSDACMGTIASFLSKYQDIIIEHQKVVKGNQKRLESLRELAGKENLEYPSVTLPPQPHTKEGVDAYNEVIARVRMWVNLNLWQKLKLSRDDAKPLLRLKGFPSFPLVERQQANEVDWWDMVCNVKKLINEKKEDGKVFWQNLAGYKRQEALRPYLSSEEDRKKGKKFARYQLGDLLLHLEKKHGEDWGKVYDEAWERIDKKVEGLSKHIKLEEERRSEDAQSKAALTDWLRAKASFVIEGKKEADKDEFCRCELKLQKWYGDLRGKPFAIEAENSILDISGFSKQYNCAFIWQKDGVKKLNLYLIINYFKGGKLRFKKIKPEAFEANRFYTVINKKSGEIVPMEVNFNFDDPNLIILPLAFGKRQGREFIWNDLLSLETGSLKLANGRVIEKTLYNRRTRQDEPALFVALTFERREVLDSSNIKPMNLIGVDRGENIPAVIALTDPEGCPLSRFKDSLGNPTHILRIGESYKEKQRTIQAKKEVEQRRAGGYSRKYASKAKNLADDMVRNTARDLLYYAVTQDAMLIFENLSRGFGRQGKRTFMAERQYTRMEDWLTAKLAYEGLPSKTYLSKTLAQYTSKTCSNCGFTITSADYDRVLEKLKKTATGWMTTINGKELKVEGQITYYNRYKRQNVVKDLSVELDRLSEESVNNDISSWTKGRSGEALSLLKKRFSHRPVQEKFVCLNCGFETHADEQAALNIARSWLFLRSQEYKKYQTNKTTGNTDKRAFVETWQSFYRKKLKEVWKPAV

SEQ ID NO: 44152 - protein, 979 aa, synthetic construct
  REGION 1..979: note = engineered CasX variant
QEIKRINKIRRRLVKDSNTKKAGKTGPMKTLLVRVMTPDLRERLENLRKKPENIPQPISNTSRANLNKLLTDYTEMKKAILHVYWEEFQKDPVGLMSRVAQPASKKIDQNKLKPEMDEKGNLTTAGFACSQCGQPLFVYKLEQVSEKGKAYTNYFGRCNVAEHEKLILLAQLKPEKDSDEAVTYSLGKFGQRALDFYSIHVTKESTHPVKPLAQIAGNRYASYPVGKALSDACMGTIASFLSKYQDIIIEHQKVVKGNQKRLESLRELAGKENLEYPSVTLPPQPHTKEGVDAYNEVIARVRMWVNLNLWQKLKLSRDDAKPLLRLKGFPSFPLVERQQANEVDWWDMVCNVKKLINEKKEDGKVFWQNLAGYKRQEALRPYLSSEEDRKKGKKFARYQLGDLLLHLEKKHGEDWGKVYDEAWERIDKKVEGLSKHIKLEEERRSEDAQSKAALTDWLRAKASFVIEGSKEADKDEFCRCELKLQKWYGDLRGKPFAIEAENSILDISGFSKQYNCAFIWQKDGVKKLNLYLIINYFKGGKLRFKKIKPEAFEANRFYTVINKKSGEIVPMEVNFNFDDPNLIILPLAFGKRQGREFIWNDLLSLETGSLKLANGRVIEKTLYNRRTRQDEPALFVALTFERREVLDSSNIKPMNLIGVDRGENIPAVIALTDPEGCPLSRFKDSLGNPTHILRIGESYKEKQRTIQAKKEVEQRRAGGYSRKYASKAKNLADDMVRNTARDLLYYAVTQDAMLIFENLSRGFGRQGKRTFMAERQYTRMEDWLTAKLAYEGLPSKTYLSKTLAQYTSKTCSNCGFTITSADYDRVLEKLKKTATGWMTTINGKELKVEGQITYYNRYKRQNVVKDLSVELDRLSEESVNNDISSWTKGRSGEALSLLKKRFSHRPVQEKFVCLNCGFETHADEQAALNIARSWLFLRSQEYKKYQTNKTTGNTDKRAFVETWQSFYRKKLKEVWKPAV

SEQ ID NO: 44153 - protein, 979 aa, synthetic construct
  REGION 1..979: note = engineered CasX variant
QEIKRINKIRRRLVKDSNTKKAGKTGPMKTLLVRVMTPDLRERLENLRKKPENIPQPISNTSRANLNKLLTDYTEMKKAILHVYWEEFQKDPVGLMSRVAQPASKKIDQNKLKPEMDEKGNLTTAGFACSQCGQPLFVYKLEQVSEKGKAYTNYFGRCNVAEHEKLILLAQLKPEKDSDEAVTYSLGKFGQRALDFYSIHVTKESTHPVKPLAQIAGNRYASHPVGKALSDACMGTIASFLSKYQDIIIEHQKVVKGNQKRLESLRELAGKENLEYPSVTLPPQPHTKEGVDAYNEVIARVRMWVNLNLWQKLKLSRDDAKPLLRLKGFPSFPLVERQQANEVDWWDMVCNVKKLINEKKEDGKVFWQNLAGYKRQEALRPYLSSEEDRKKGKKFARYQLGDLLLHLEKKHGEDWGKVYDEAWERIDKKVEGLSKHIKLEEERRSEDAQSKAALTDWLRAKASFVIEGSKEADKDEFCRCELKLQKWYGDLRGKPFAIEAENSILDISGFSKQYNCAFIWQKDGVKKLNLYLIINYFKGGKLRFKKIKPEAFEANRFYTVINKKSGEIVPMEVNFNFDDPNLIILPLAFGKRQGREFIWNDLLSLETGSLKLANGRVIEKTLYNRRTRQDEPALFVALTFERREVLDSSNIKPMNLIGVDRGENIPAVIALTDPEGCPLSRFKDSLGNPTHILRIGESYKEKQRTIQAKKEVEQRRAGGYSRKYASKAKNLADDMVRNTARDLLYYAVTQDAMLIFENLSRGFGRQGKRTFMAERQYTRMEDWLTAKLAYEGLPSKTYLSKTLAQYTSKTCSNCGFTITSADYDRVLEKLKKTATGWMTTINGKELKVEGQITYYNRYKRQNVVKDLSVELDRLSEESVNNDISSWTKGRSGEALSLLKKRFSHRPVQEKFVCLNCGFETHADEQAALNIARSWLFLRSQEYKKYQTNKTTGNTDKRAFVETWQSFYRKKLKEVWKPAV

SEQ ID NO: 44154 - protein, 979 aa, synthetic construct
  REGION 1..979: note = engineered CasX variant
QEIKRINKIRRRLVKDSNTKKAGKTGPMKTLLVRVMTPDLRERLENLRKKPENIPQPISNTSRANLNKLLTDYTEMKKAILHVYWEEFQKDPVGLMSRVAQPASKKIDQNKLKPEMDEKGNLTTAGFACSQCGQPLFVYKLEQVSEKGKAYTNYFGRCNVAEHEKLILLAQLKPEKDSDEAVTYSLGKFGQRALDFYSIHVTKESTHPVKPLAQIAGNRYASSPVGKALSDACMGTIASFLSKYQDIIIEHQKVVKGNQKRLESLRELAGKENLEYPSVTLPPQPHTKEGVDAYNEVIARVRMWVNLNLWQKLKLSRDDAKPLLRLKGFPSFPLVERQQANEVDWWDMVCNVKKLINEKKEDGKVFWQNLAGYKRQEALRPYLSSEEDRKKGKKFARYQLGDLLLHLEKKHGEDWGKVYDEAWERIDKKVEGLSKHIKLEEERRSEDAQSKAALTDWLRAKASFVIEGSKEADKDEFCRCELKLQKWYGDLRGKPFAIEAENSILDISGFSKQYNCAFIWQKDGVKKLNLYLIINYFKGGKLRFKKIKPEAFEANRFYTVINKKSGEIVPMEVNFNFDDPNLIILPLAFGKRQGREFIWNDLLSLETGSLKLANGRVIEKTLYNRRTRQDEPALFVALTFERREVLDSSNIKPMNLIGVDRGENIPAVIALTDPEGCPLSRFKDSLGNPTHILRIGESYKEKQRTIQAKKEVEQRRAGGYSRKYASKAKNLADDMVRNTARDLLYYAVTQDAMLIFENLSRGFGRQGKRTFMAERQYTRMEDWLTAKLAYEGLPSKTYLSKTLAQYTSKTCSNCGFTITSADYDRVLEKLKKTATGWMTTINGKELKVEGQITYYNRYKRQNVVKDLSVELDRLSEESVNNDISSWTKGRSGEALSLLKKRFSHRPVQEKFVCLNCGFETHADEQAALNIARSWLFLRSQEYKKYQTNKTTGNTDKRAFVETWQSFYRKKLKEVWKPAV

SEQ ID NO: 44155 - protein, 979 aa, synthetic construct
  REGION 1..979: note = engineered CasX variant
QEIKRINKIRRRLVKDSNTKKAGKTGPMKTLLVRVMTPDLRERLENLRKKPENIPQPISNTSRANLNKLLTDYTEMKKAILHVYWEEFQKDPVGLMSRVAQPASKKIDQNKLKPEMDEKGNLTTAGFACSQCGQPLFVYKLEQVSEKGKAYTNYFGRCNVAEHEKLILLAQLKPEKDSDEAVTYSLGKFGQRALDFYSIHVTKESTHPVKPLAQIAGNRYASTPVGKALSDACMGTIASFLSKYQDIIIEHQKVVKGNQKRLESLRELAGKENLEYPSVTLPPQPHTKEGVDAYNEVIARVRMWVNLNLWQKLKLSRDDAKPLLRLKGFPSFPLVERQQANEVDWWDMVCNVKKLINEKKEDGKVFWQNLAGYKRQEALRPYLSSEEDRKKGKKFARYQLGDLLLHLEKKHGEDWGKVYDEAWERIDKKVEGLSKHIKLEEERRSEDAQSKAALTDWLRAKASFVIEGSKEADKDEFCRCELKLQKWYGDLRGKPFAIEAENSILDISGFSKQYNCAFIWQKDGVKKLNLYLIINYFKGGKLRFKKIKPEAFEANRFYTVINKKSGEIVPMEVNFNFDDPNLIILPLAFGKRQGREFIWNDLLSLETGSLKLANGRVIEKTLYNRRTRQDEPALFVALTFERREVLDSSNIKPMNLIGVDRGENIPAVIALTDPEGCPLSRFKDSLGNPTHILRIGESYKEKQRTIQAKKEVEQRRAGGYSRKYASKAKNLADDMVRNTARDLLYYAVTQDAMLIFENLSRGFGRQGKRTFMAERQYTRMEDWLTAKLAYEGLPSKTYLSKTLAQYTSKTCSNCGFTITSADYDRVLEKLKKTATGWMTTINGKELKVEGQITYYNRYKRQNVVKDLSVELDRLSEESVNNDISSWTKGRSGEALSLLKKRFSHRPVQEKFVCLNCGFETHADEQAALNIARSWLFLRSQEYKKYQTNKTTGNTDKRAFVETWQSFYRKKLKEVWKPAV

SEQ ID NO: 44156 - protein, 979 aa, synthetic construct
  REGION 1..979: note = engineered CasX variant
QEIKRINKIRRRLVKDSNTKKAGKTGPMKTLLVRVMTPDLRERLENLRKKPENIPQPISNTSRANLNKLLTDYTEMKKAILHVYWEEFQKDPVGLMSRVAQPASKKIDQNKLKPEMDEKGNLTTAGFACSQCGQPLFVYKLEQVSEKGKAYTNYFGRCNVAEHEKLILLAQLKPEKDSDEAVTYSLGKFGQRALDFYSIHVTKESTHPVKPLAQIAGNRYASAPVGKALSDACMGTIASFLSKYQDIIIEHQKVVKGNQKRLESLRELAGKENLEYPSVTLPPQPHTKEGVDAYNEVIARVRMWVNLNLWQKLKLSRDDAKPLLRLKGFPSFPLVERQQANEVDWWDMVCNVKKLINEKKEDGKVFWQNLAGYKRQEALRPYLSSEEDRKKGKKFARYQLGDLLLHLEKKHGEDWGKVYDEAWERIDKKVEGLSKHIKLEEERRSEDAQSKAALTDWLRAKASFVIEGSKEADKDEFCRCELKLQKWYGDLRGKPFAIEAENSILDISGFSKQYNCAFIWQKDGVKKLNLYLIINYFKGGKLRFKKIKPEAFEANRFYTVINKKSGEIVPMEVNFNFDDPNLIILPLAFGKRQGREFIWNDLLSLETGSLKLANGRVIEKTLYNRRTRQDEPALFVALTFERREVLDSSNIKPMNLIGVDRGENIPAVIALTDPEGCPLSRFKDSLGNPTHILRIGESYKEKQRTIQAKKEVEQRRAGGYSRKYASKAKNLADDMVRNTARDLLYYAVTQDAMLIFENLSRGFGRQGKRTFMAERQYTRMEDWLTAKLAYEGLPSKTYLSKTLAQYTSKTCSNCGFTITSADYDRVLEKLKKTATGWMTTINGKELKVEGQITYYNRYKRQNVVKDLSVELDRLSEESVNNDISSWTKGRSGEALSLLKKRFSHRPVQEKFVCLNCGFETHADEQAALNIARSWLFLRSQEYKKYQTNKTTGNTDKRAFVETWQSFYRKKLKEVWKPAV

SEQ ID NO: 44157 - protein, 979 aa, synthetic construct
  REGION 1..979: note = engineered CasX variant
QEIKRINKIRRRLVKDSNTKKAGKTGPMKTLLVRVMTPDLRERLENLRKKPENIPQPISNTSRANLNKLLTDYTEMKKAILHVYWEEFQKDPVGLMSRVAQPASKKIDQNKLKPEMDEKGNLTTAGFACSQCGQPLFVYKLEQVSEKGKAYTNYFGRCNVAEHEKLILLAQLKPEKDSDEAVTYSLGKFGQRALDFYSIHVTKESTHPVKPLAQIAGNRYASVPVGKALSDACMGTIASFLSKYQDIIIEHQKVVKGNQKRLESLRELAGKENLEYPSVTLPPQPHTKEGVDAYNEVIARVRMWVNLNLWQKLKLSRDDAKPLLRLKGFPSFPLVERQQANEVDWWDMVCNVKKLINEKKEDGKVFWQNLAGYKRQEALRPYLSSEEDRKKGKKFARYQLGDLLLHLEKKHGEDWGKVYDEAWERIDKKVEGLSKHIKLEEERRSEDAQSKAALTDWLRAKASFVIEGSKEADKDEFCRCELKLQKWYGDLRGKPFAIEAENSILDISGFSKQYNCAFIWQKDGVKKLNLYLIINYFKGGKLRFKKIKPEAFEANRFYTVINKKSGEIVPMEVNFNFDDPNLIILPLAFGKRQGREFIWNDLLSLETGSLKLANGRVIEKTLYNRRTRQDEPALFVALTFERREVLDSSNIKPMNLIGVDRGENIPAVIALTDPEGCPLSRFKDSLGNPTHILRIGESYKEKQRTIQAKKEVEQRRAGGYSRKYASKAKNLADDMVRNTARDLLYYAVTQDAMLIFENLSRGFGRQGKRTFMAERQYTRMEDWLTAKLAYEGLPSKTYLSKTLAQYTSKTCSNCGFTITSADYDRVLEKLKKTATGWMTTINGKELKVEGQITYYNRYKRQNVVKDLSVELDRLSEESVNNDISSWTKGRSGEALSLLKKRFSHRPVQEKFVCLNCGFETHADEQAALNIARSWLFLRSQEYKKYQTNKTTGNTDKRAFVETWQSFYRKKLKEVWKPAV

SEQ ID NO: 44158 - protein, 979 aa, synthetic construct
  REGION 1..979: note = engineered CasX variant
QEIKRINKIRRRLVKDSNTKKAGKTGPMKTLLVRVMTPDLRERLENLRKKPENIPQPISNTSRANLNKLLTDYTEMKKAILHVYWEEFQKDPVGLMSRVAQPASKKIDQNKLKPEMDEKGNLTTAGFACSQCGQPLFVYKLEQVSEKGKAYTNYFGRCNVAEHEKLIKLAQLKPEKDSDEAVTYSLGKFGQRALDFYSIHVTKESTHPVKPLAQIAGNRYASGPVGKALSDACMGTIASFLSKYQDIIIEHQKVVKGNQKRLESLRELAGKENLEYPSVTLPPQPHTKEGVDAYNEVIARVRMWVNLNLWQKLKLSRDDAKPLLRLKGFPSFPLVERQQANEVDWWDMVCNVKKLINEKKEDGKVFWQNLAGYKRQEALRPYLSSEEDRKKGKKFARYQLGDLLLHLEKKHGEDWGKVYDEAWERIDKKVEGLSKHIKLEEERRSEDAQSKAALTDWLRAKASFVIEGSKEADKDEFCRCELKLQKWYGDLRGKPFAIEAENSILDISGFSKQYNCAFIWQKDGVKKLNLYLIINYFKGGKLRFKKIKPEAFEANRFYTVINKKSGEIVPMEVNFNFDDPNLIILPLAFGKRQGREFIWNDLLSLETGSLKLANGRVIEKTLYNRRTRQDEPALFVALTFERREVLDSSNIKPMNLIGVDRGENIPAVIALTDPEGCPLSRFKDSLGNPTHILRIGESYKEKQRTIQAKKEVEQRRAGGYSRKYASKAKNLADDMVRNTARDLLYYAVTQDAMLIFENLSRGFGRQGKRTFMAERQYTRMEDWLTAKLAYEGLPSKTYLSKTLAQYTSKTCSNCGFTITSADYDRVLEKLKKTATGWMTTINGKELKVEGQITYYNRYKRQNVVKDLSVELDRLSEESVNNDISSWTKGRSGEALSLLKKRFSHRPVQEKFVCLNCGFETHADEQAALNIARSWLFLRSQEYKKYQTNKTTGNTDKRAFVETWQSFYRKKLKEVWKPAV

SEQ ID NO: 44159 - protein, 978 aa, synthetic construct
  REGION 1..978: note = engineered CasX variant
QEIKRINKIRRRLVKDSNTKKAGKTGPMKTLLVRVMTPDLRERLENLRKKPENIPQPISNTSRANLNKLLTDYTEMKKAILHVYWEEFQKDPVGLMSRVAQPASKKIDQNKLKPEMDEKGNLTTAGFACSQCGQPLFVYKLEQVSEKGKAYTNYFGRCNVAEHEKLILLAQLKPEKDSDEAVTYSLGKFGQRALDFYSIHVTKESTHPVKPLAQIAGNRYASPVGKALSDACMGTIASFLSKYQDIIIEHQKVVKGNQKRLESLRELAGKENLEYPSVTLPPQPHTKEGVDAYNEVIARVRMWVNLNLWQKLKLSRDDAKPLLRLKGFPSFPLVERQQANEVDWWDMVCNVKKLINEKKEDGKVFWQNLAGYKRQEALRPYLSSEEDRKKGKKFARYQLGDLLLHLEKKHGEDWGKVYDEAWERIDKKVEGLSKHIKLEEERRSEDAQSKAALTDWLRAKASFVIEGSKEADKDEFCRCELKLQKWYGDLRGKPFAIEAENSILDISGFSKQYNCAFIWQKDGVKKLNLYLIINYFKGGKLRFKKIKPEAFEANRFYTVINKKSGEIVPMEVNFNFDDPNLIILPLAFGKRQGREFIWNDLLSLETGSLKLANGRVIEKTLYNRRTRQDEPALFVALTFERREVLDSSNIKPMNLIGVDRGENIPAVIALTDPEGCPLSRFKDSLGNPTHILRIGESYKEKQRTIQAKKEVEQRRAGGYSRKYASKAKNLADDMVRNTARDLLYYAVTQDAMLIFENLSRGFGRQGKRTFMAERQYTRMEDWLTAKLAYEGLPSKTYLSKTLAQYTSKTCSNCGFTITSADYDRVLEKLKKTATGWMTTINGKELKVEGQITYYNRYKRQNVVKDLSVELDRLSEESVNNDISSWTKGRSGEALSLLKKRFSHRPVQEKFVCLNCGFETHADEQAALNIARSWLFLRSQEYKKYQTNKTTGNTDKRAFVETWQSFYRKKLKEVWKPAV

SEQ ID NO: 44160 - protein, 980 aa, synthetic construct
  REGION 1..980: note = engineered CasX variant
QEIKRINKIRRRLVKDSNTKKAGKTGPMKTLLVRVMTPDLRERLENLRKKPENIPQPISNTSRANLNKLLTDYTEMKKAILHVYWEEFQKDPVGLMSRVAQPASKKIDQNKLKPEMDEKGNLTTAGFACSQCGQPLFVYKLEQVSEKGKAYTNYFGRCNVAEHEKLILLAQLKPEKDSDEAVTYSLGKFGQRALDFYSIHVTKESTHPVKPLAQIAGNRYASYPVGKALSDACMGTIASFLSKYQDIIIEHQKVVKGNQKRLESLRELAGKENLEYPSVTLPPQPHTKEGVDAYNEVIARVRMWVNLNLWQKLKLSRDDAKPLLRLKGFPSFPLVERQQANEVDWWDMVCNVKKLINEKKEDGKVFWQNLAGYKRQEALRPYLSSEEDRKKGKKFARYQLGDLLLHLEKKHGEDWGKVYDEAWERIDKKVEGLSKHIKLEEERRSEDAQSKAALTDWLRAKASFVIEGLKEADDKDEFCRCELKLQKWYGDLRGKPFAIEAENSILDISGFSKQYNCAFIWQKDGVKKLNLYLIINYFKGGKLRFKKIKPEAFEANRFYTVINKKSGEIVPMEVNFNFDDPNLIILPLAFGKRQGREFIWNDLLSLETGSLKLANGRVIEKTLYNRRTRQDEPALFVALTFERREVLDSSNIKPMNLIGVDRGENIPAVIALTDPEGCPLSRFKDSLGNPTHILRIGESYKEKQRTIQAKKEVEQRRAGGYSRKYASKAKNLADDMVRNTARDLLYYAVTQDAMLIFENLSRGFGRQGKRTFMAERQYTRMEDWLTAKLAYEGLPSKTYLSKTLAQYTSKTCSNCGFTITSADYDRVLEKLKKTATGWMTTINGKELKVEGQITYYNRYKRQNVVKDLSVELDRLSEESVNNDISSWTKGRSGEALSLLKKRFSHRPVQEKFVCLNCGFETHADEQAALNIARSWLFLRSQEYKKYQTNKTTGNTDKRAFVETWQSFYRKKLKEVWKPAV

SEQ ID NO: 44161 - protein, 980 aa, synthetic construct
  REGION 1..980: note = engineered CasX variant
QEIKRINKIRRRLVKDSNTKKAGKTGPMKTLLVRVMTPDLRERLENLRKKPENIPQPISNTSRANLNKLLTDYTEMKKAILHVYWEEFQKDPVGLMSRVAQPASKKIDQNKLKPEMDEKGNLTTAGFACSQCGQPLFVYKLEQVSEKGKAYTNYFGRCNVAEHEKLILLAQLKPEKDSDEAVTYSLGKFGQRALDFYSIHVTKESTHPVKPLAQIAGNRYASHPVGKALSDACMGTIASFLSKYQDIIIEHQKVVKGNQKRLESLRELAGKENLEYPSVTLPPQPHTKEGVDAYNEVIARVRMWVNLNLWQKLKLSRDDAKPLLRLKGFPSFPLVERQQANEVDWWDMVCNVKKLINEKKEDGKVFWQNLAGYKRQEALRPYLSSEEDRKKGKKFARYQLGDLLLHLEKKHGEDWGKVYDEAWERIDKKVEGLSKHIKLEEERRSEDAQSKAALTDWLRAKASFVIEGLKEADDKDEFCRCELKLQKWYGDLRGKPFAIEAENSILDISGFSKQYNCAFIWQKDGVKKLNLYLIINYFKGGKLRFKKIKPEAFEANRFYTVINKKSGEIVPMEVNFNFDDPNLIILPLAFGKRQGREFIWNDLLSLETGSLKLANGRVIEKTLYNRRTRQDEPALFVALTFERREVLDSSNIKPMNLIGVDRGENIPAVIALTDPEGCPLSRFKDSLGNPTHILRIGESYKEKQRTIQAKKEVEQRRAGGYSRKYASKAKNLADDMVRNTARDLLYYAVTQDAMLIFENLSRGFGRQGKRTFMAERQYTRMEDWLTAKLAYEGLPSKTYLSKTLAQYTSKTCSNCGFTITSADYDRVLEKLKKTATGWMTTINGKELKVEGQITYYNRYKRQNVVKDLSVELDRLSEESVNNDISSWTKGRSGEALSLLKKRFSHRPVQEKFVCLNCGFETHADEQAALNIARSWLFLRSQEYKKYQTNKTTGNTDKRAFVETWQSFYRKKLKEVWKPAV

SEQ ID NO: 44162 - protein, 980 aa, synthetic construct
  REGION 1..980: note = engineered CasX variant
QEIKRINKIRRRLVKDSNTKKAGKTGPMKTLLVRVMTPDLRERLENLRKKPENIPQPISNTSRANLNKLLTDYTEMKKAILHVYWEEFQKDPVGLMSRVAQPASKKIDQNKLKPEMDEKGNLTTAGFACSQCGQPLFVYKLEQVSEKGKAYTNYFGRCNVAEHEKLILLAQLKPEKDSDEAVTYSLGKFGQRALDFYSIHVTKESTHPVKPLAQIAGNRYASSPVGKALSDACMGTIASFLSKYQDIIIEHQKVVKGNQKRLESLRELAGKENLEYPSVTLPPQPHTKEGVDAYNEVIARVRMWVNLNLWQKLKLSRDDAKPLLRLKGFPSFPLVERQQANEVDWWDMVCNVKKLINEKKEDGKVFWQNLAGYKRQEALRPYLSSEEDRKKGKKFARYQLGDLLLHLEKKHGEDWGKVYDEAWERIDKKVEGLSKHIKLEEERRSEDAQSKAALTDWLRAKASFVIEGLKEADDKDEFCRCELKLQKWYGDLRGKPFAIEAENSILDISGFSKQYNCAFIWQKDGVKKLNLYLIINYFKGGKLRFKKIKPEAFEANRFYTVINKKSGEIVPMEVNFNFDDPNLIILPLAFGKRQGREFIWNDLLSLETGSLKLANGRVIEKTLYNRRTRQDEPALFVALTFERREVLDSSNIKPMNLIGVDRGENIPAVIALTDPEGCPLSRFKDSLGNPTHILRIGESYKEKQRTIQAKKEVEQRRAGGYSRKYASKAKNLADDMVRNTARDLLYYAVTQDAMLIFENLSRGFGRQGKRTFMAERQYTRMEDWLTAKLAYEGLPSKTYLSKTLAQYTSKTCSNCGFTITSADYDRVLEKLKKTATGWMTTINGKELKVEGQITYYNRYKRQNVVKDLSVELDRLSEESVNNDISSWTKGRSGEALSLLKKRFSHRPVQEKFVCLNCGFETHADEQAALNIARSWLFLRSQEYKKYQTNKTTGNTDKRAFVETWQSFYRKKLKEVWKPAV

SEQ ID NO: 44163 - protein, 980 aa, synthetic construct
  REGION 1..980: note = engineered CasX variant
QEIKRINKIRRRLVKDSNTKKAGKTGPMKTLLVRVMTPDLRERLENLRKKPENIPQPISNTSRANLNKLLTDYTEMKKAILHVYWEEFQKDPVGLMSRVAQPASKKIDQNKLKPEMDEKGNLTTAGFACSQCGQPLFVYKLEQVSEKGKAYTNYFGRCNVAEHEKLILLAQLKPEKDSDEAVTYSLGKFGQRALDFYSIHVTKESTHPVKPLAQIAGNRYASTPVGKALSDACMGTIASFLSKYQDIIIEHQKVVKGNQKRLESLRELAGKENLEYPSVTLPPQPHTKEGVDAYNEVIARVRMWVNLNLWQKLKLSRDDAKPLLRLKGFPSFPLVERQQANEVDWWDMVCNVKKLINEKKEDGKVFWQNLAGYKRQEALRPYLSSEEDRKKGKKFARYQLGDLLLHLEKKHGEDWGKVYDEAWERIDKKVEGLSKHIKLEEERRSEDAQSKAALTDWLRAKASFVIEGLKEADDKDEFCRCELKLQKWYGDLRGKPFAIEAENSILDISGFSKQYNCAFIWQKDGVKKLNLYLIINYFKGGKLRFKKIKPEAFEANRFYTVINKKSGEIVPMEVNFNFDDPNLIILPLAFGKRQGREFIWNDLLSLETGSLKLANGRVIEKTLYNRRTRQDEPALFVALTFERREVLDSSNIKPMNLIGVDRGENIPAVIALTDPEGCPLSRFKDSLGNPTHILRIGESYKEKQRTIQAKKEVEQRRAGGYSRKYASKAKNLADDMVRNTARDLLYYAVTQDAMLIFENLSRGFGRQGKRTFMAERQYTRMEDWLTAKLAYEGLPSKTYLSKTLAQYTSKTCSNCGFTITSADYDRVLEKLKKTATGWMTTINGKELKVEGQITYYNRYKRQNVVKDLSVELDRLSEESVNNDISSWTKGRSGEALSLLKKRFSHRPVQEKFVCLNCGFETHADEQAALNIARSWLFLRSQEYKKYQTNKTTGNTDKRAFVETWQSFYRKKLKEVWKPAV

SEQ ID NO: 44164 - protein, 980 aa, synthetic construct
  REGION 1..980: note = engineered CasX variant
QEIKRINKIRRRLVKDSNTKKAGKTGPMKTLLVRVMTPDLRERLENLRKKPENIPQPISNTSRANLNKLLTDYTEMKKAILHVYWEEFQKDPVGLMSRVAQPASKKIDQNKLKPEMDEKGNLTTAGFACSQCGQPLFVYKLEQVSEKGKAYTNYFGRCNVAEHEKLILLAQLKPEKDSDEAVTYSLGKFGQRALDFYSIHVTKESTHPVKPLAQIAGNRYASAPVGKALSDACMGTIASFLSKYQDIIIEHQKVVKGNQKRLESLRELAGKENLEYPSVTLPPQPHTKEGVDAYNEVIARVRMWVNLNLWQKLKLSRDDAKPLLRLKGFPSFPLVERQQANEVDWWDMVCNVKKLINEKKEDGKVFWQNLAGYKRQEALRPYLSSEEDRKKGKKFARYQLGDLLLHLEKKHGEDWGKVYDEAWERIDKKVEGLSKHIKLEEERRSEDAQSKAALTDWLRAKASFVIEGLKEADDKDEFCRCELKLQKWYGDLRGKPFAIEAENSILDISGFSKQYNCAFIWQKDGVKKLNLYLIINYFKGGKLRFKKIKPEAFEANRFYTVINKKSGEIVPMEVNFNFDDPNLIILPLAFGKRQGREFIWNDLLSLETGSLKLANGRVIEKTLYNRRTRQDEPALFVALTFERREVLDSSNIKPMNLIGVDRGENIPAVIALTDPEGCPLSRFKDSLGNPTHILRIGESYKEKQRTIQAKKEVEQRRAGGYSRKYASKAKNLADDMVRNTARDLLYYAVTQDAMLIFENLSRGFGRQGKRTFMAERQYTRMEDWLTAKLAYEGLPSKTYLSKTLAQYTSKTCSNCGFTITSADYDRVLEKLKKTATGWMTTINGKELKVEGQITYYNRYKRQNVVKDLSVELDRLSEESVNNDISSWTKGRSGEALSLLKKRFSHRPVQEKFVCLNCGFETHADEQAALNIARSWLFLRSQEYKKYQTNKTTGNTDKRAFVETWQSFYRKKLKEVWKPAV

SEQ ID NO: 44165 - protein, 980 aa, synthetic construct
  REGION 1..980: note = engineered CasX variant
QEIKRINKIRRRLVKDSNTKKAGKTGPMKTLLVRVMTPDLRERLENLRKKPENIPQPISNTSRANLNKLLTDYTEMKKAILHVYWEEFQKDPVGLMSRVAQPASKKIDQNKLKPEMDEKGNLTTAGFACSQCGQPLFVYKLEQVSEKGKAYTNYFGRCNVAEHEKLILLAQLKPEKDSDEAVTYSLGKFGQRALDFYSIHVTKESTHPVKPLAQIAGNRYASVPVGKALSDACMGTIASFLSKYQDIIIEHQKVVKGNQKRLESLRELAGKENLEYPSVTLPPQPHTKEGVDAYNEVIARVRMWVNLNLWQKLKLSRDDAKPLLRLKGFPSFPLVERQQANEVDWWDMVCNVKKLINEKKEDGKVFWQNLAGYKRQEALRPYLSSEEDRKKGKKFARYQLGDLLLHLEKKHGEDWGKVYDEAWERIDKKVEGLSKHIKLEEERRSEDAQSKAALTDWLRAKASFVIEGLKEADDKDEFCRCELKLQKWYGDLRGKPFAIEAENSILDISGFSKQYNCAFIWQKDGVKKLNLYLIINYFKGGKLRFKKIKPEAFEANRFYTVINKKSGEIVPMEVNFNFDDPNLIILPLAFGKRQGREFIWNDLLSLETGSLKLANGRVIEKTLYNRRTRQDEPALFVALTFERREVLDSSNIKPMNLIGVDRGENIPAVIALTDPEGCPLSRFKDSLGNPTHILRIGESYKEKQRTIQAKKEVEQRRAGGYSRKYASKAKNLADDMVRNTARDLLYYAVTQDAMLIFENLSRGFGRQGKRTFMAERQYTRMEDWLTAKLAYEGLPSKTYLSKTLAQYTSKTCSNCGFTITSADYDRVLEKLKKTATGWMTTINGKELKVEGQITYYNRYKRQNVVKDLSVELDRLSEESVNNDISSWTKGRSGEALSLLKKRFSHRPVQEKFVCLNCGFETHADEQAALNIARSWLFLRSQEYKKYQTNKTTGNTDKRAFVETWQSFYRKKLKEVWKPAV

SEQ ID NO: 44166 - protein, 980 aa, synthetic construct
  REGION 1..980: note = engineered CasX variant
QEIKRINKIRRRLVKDSNTKKAGKTGPMKTLLVRVMTPDLRERLENLRKKPENIPQPISNTSRANLNKLLTDYTEMKKAILHVYWEEFQKDPVGLMSRVAQPASKKIDQNKLKPEMDEKGNLTTAGFACSQCGQPLFVYKLEQVSEKGKAYTNYFGRCNVAEHEKLIKLAQLKPEKDSDEAVTYSLGKFGQRALDFYSIHVTKESTHPVKPLAQIAGNRYASGPVGKALSDACMGTIASFLSKYQDIIIEHQKVVKGNQKRLESLRELAGKENLEYPSVTLPPQPHTKEGVDAYNEVIARVRMWVNLNLWQKLKLSRDDAKPLLRLKGFPSFPLVERQQANEVDWWDMVCNVKKLINEKKEDGKVFWQNLAGYKRQEALRPYLSSEEDRKKGKKFARYQLGDLLLHLEKKHGEDWGKVYDEAWERIDKKVEGLSKHIKLEEERRSEDAQSKAALTDWLRAKASFVIEGLKEADDKDEFCRCELKLQKWYGDLRGKPFAIEAENSILDISGFSKQYNCAFIWQKDGVKKLNLYLIINYFKGGKLRFKKIKPEAFEANRFYTVINKKSGEIVPMEVNFNFDDPNLIILPLAFGKRQGREFIWNDLLSLETGSLKLANGRVIEKTLYNRRTRQDEPALFVALTFERREVLDSSNIKPMNLIGVDRGENIPAVIALTDPEGCPLSRFKDSLGNPTHILRIGESYKEKQRTIQAKKEVEQRRAGGYSRKYASKAKNLADDMVRNTARDLLYYAVTQDAMLIFENLSRGFGRQGKRTFMAERQYTRMEDWLTAKLAYEGLPSKTYLSKTLAQYTSKTCSNCGFTITSADYDRVLEKLKKTATGWMTTINGKELKVEGQITYYNRYKRQNVVKDLSVELDRLSEESVNNDISSWTKGRSGEALSLLKKRFSHRPVQEKFVCLNCGFETHADEQAALNIARSWLFLRSQEYKKYQTNKTTGNTDKRAFVETWQSFYRKKLKEVWKPAV

SEQ ID NO: 44167 - protein, 979 aa, synthetic construct
  REGION 1..979: note = engineered CasX variant
QEIKRINKIRRRLVKDSNTKKAGKTGPMKTLLVRVMTPDLRERLENLRKKPENIPQPISNTSRANLNKLLTDYTEMKKAILHVYWEEFQKDPVGLMSRVAQPASKKIDQNKLKPEMDEKGNLTTAGFACSQCGQPLFVYKLEQVSEKGKAYTNYFGRCNVAEHEKLILLAQLKPEKDSDEAVTYSLGKFGQRALDFYSIHVTKESTHPVKPLAQIAGNRYASPVGKALSDACMGTIASFLSKYQDIIIEHQKVVKGNQKRLESLRELAGKENLEYPSVTLPPQPHTKEGVDAYNEVIARVRMWVNLNLWQKLKLSRDDAKPLLRLKGFPSFPLVERQQANEVDWWDMVCNVKKLINEKKEDGKVFWQNLAGYKRQEALRPYLSSEEDRKKGKKFARYQLGDLLLHLEKKHGEDWGKVYDEAWERIDKKVEGLSKHIKLEEERRSEDAQSKAALTDWLRAKASFVIEGLKEADDKDEFCRCELKLQKWYGDLRGKPFAIEAENSILDISGFSKQYNCAFIWQKDGVKKLNLYLIINYFKGGKLRFKKIKPEAFEANRFYTVINKKSGEIVPMEVNFNFDDPNLIILPLAFGKRQGREFIWNDLLSLETGSLKLANGRVIEKTLYNRRTRQDEPALFVALTFERREVLDSSNIKPMNLIGVDRGENIPAVIALTDPEGCPLSRFKDSLGNPTHILRIGESYKEKQRTIQAKKEVEQRRAGGYSRKYASKAKNLADDMVRNTARDLLYYAVTQDAMLIFENLSRGFGRQGKRTFMAERQYTRMEDWLTAKLAYEGLPSKTYLSKTLAQYTSKTCSNCGFTITSADYDRVLEKLKKTATGWMTTINGKELKVEGQITYYNRYKRQNVVKDLSVELDRLSEESVNNDISSWTKGRSGEALSLLKKRFSHRPVQEKFVCLNCGFETHADEQAALNIARSWLFLRSQEYKKYQTNKTTGNTDKRAFVETWQSFYRKKLKEVWKPAV

SEQ ID NO: 44168 - protein, 980 aa, synthetic construct
  REGION 1..980: note = engineered CasX variant
QEIKRINKIRRRLVKDSNTKKAGKTGPMKTLLVRVMTPDLRERLENLRKKPENIPQPISNTSRANLNKLLTDYTEMKKAILHVYWEEFQKDPVGLMSRVAQPASKKIDQNKLKPEMDEKGNLTTAGFACSQCGQPLFVYKLEQVSEKGKAYTNYFGRCNVAEHEKLILLAQLKPEKDSDEAVTYSLGKFGQRALDFYSIHVTKESTHPVKPLAQIAGNRYASYPVGKALSDACMGTIASFLSKYQDIIIEHQKVVKGNQKRLESLRELAGKENLEYPSVTLPPQPHTKEGVDAYNEVIARVRMWVNLNLWQKLKLSRDDAKPLLRLKGFPSFPLVERQQANEVDWWDMVCNVKKLINEKKEDGKVFWQNLAGYKRQEALRPYLSSEEDRKKGKKFARYQLGDLLLHLEKKHGEDWGKVYDEAWERIDKKVEGLSKHIKLEEERRSEDAQSKAALTDWLRAKASFVIEGLKEADKDEFCRCELKLQKWYGDLRGKPFAIEAENSILDISGFSKQYNCAFIWQKDGVKKLNLYLIINYFKGGKLRFKKIKPEAFEANRFYTVINKKSGEIVPMEVNFNFDDPNLIILPLAFGKRQGREFIWNDLLSLETGSLKLANGRVIEKTLYNRRTRQDEPALFVALTFERREVLDSSNIKPMNLIGVDRGENIPAVIALTDPEGCPLSRFKDSLGNPTHILRIGESYKEKQRTIQAKKEVEQRRAGGYSRKYASKAKNLADDMVRNTARDLLYYAVTQDAMLIFENLSRGFGRQGKRTFMAERQYTRMEDWLTAKLAYEGLPSKTYLSKTLAQYTSKTCSNCGFTITSADYDRVLEKLKKTATGWMTTINGKELKVEGQITYYNRYKRQNVVKDLSVELDRLSEESVNNDISSWTKGRSGNEALSLLKKRFSHRPVQEKFVCLNCGFETHADEQAALNIARSWLFLRSQEYKKYQTNKTTGNTDKRAFVETWQSFYRKKLKEVWKPAV

SEQ ID NO: 44169 - protein, 980 aa, synthetic construct
  REGION 1..980: note = engineered CasX variant
QEIKRINKIRRRLVKDSNTKKAGKTGPMKTLLVRVMTPDLRERLENLRKKPENIPQPISNTSRANLNKLLTDYTEMKKAILHVYWEEFQKDPVGLMSRVAQPASKKIDQNKLKPEMDEKGNLTTAGFACSQCGQPLFVYKLEQVSEKGKAYTNYFGRCNVAEHEKLILLAQLKPEKDSDEAVTYSLGKFGQRALDFYSIHVTKESTHPVKPLAQIAGNRYASHPVGKALSDACMGTIASFLSKYQDIIIEHQKVVKGNQKRLESLRELAGKENLEYPSVTLPPQPHTKEGVDAYNEVIARVRMWVNLNLWQKLKLSRDDAKPLLRLKGFPSFPLVERQQANEVDWWDMVCNVKKLINEKKEDGKVFWQNLAGYKRQEALRPYLSSEEDRKKGKKFARYQLGDLLLHLEKKHGEDWGKVYDEAWERIDKKVEGLSKHIKLEEERRSEDAQSKAALTDWLRAKASFVIEGLKEADKDEFCRCELKLQKWYGDLRGKPFAIEAENSILDISGFSKQYNCAFIWQKDGVKKLNLYLIINYFKGGKLRFKKIKPEAFEANRFYTVINKKSGEIVPMEVNFNFDDPNLIILPLAFGKRQGREFIWNDLLSLETGSLKLANGRVIEKTLYNRRTRQDEPALFVALTFERREVLDSSNIKPMNLIGVDRGENIPAVIALTDPEGCPLSRFKDSLGNPTHILRIGESYKEKQRTIQAKKEVEQRRAGGYSRKYASKAKNLADDMVRNTARDLLYYAVTQDAMLIFENLSRGFGRQGKRTFMAERQYTRMEDWLTAKLAYEGLPSKTYLSKTLAQYTSKTCSNCGFTITSADYDRVLEKLKKTATGWMTTINGKELKVEGQITYYNRYKRQNVVKDLSVELDRLSEESVNNDISSWTKGRSGNEALSLLKKRFSHRPVQEKFVCLNCGFETHADEQAALNIARSWLFLRSQEYKKYQTNKTTGNTDKRAFVETWQSFYRKKLKEVWKPAV

SEQ ID NO: 44170 - protein, 980 aa, synthetic construct
  REGION 1..980: note = engineered CasX variant
QEIKRINKIRRRLVKDSNTKKAGKTGPMKTLLVRVMTPDLRERLENLRKKPENIPQPISNTSRANLNKLLTDYTEMKKAILHVYWEEFQKDPVGLMSRVAQPASKKIDQNKLKPEMDEKGNLTTAGFACSQCGQPLFVYKLEQVSEKGKAYTNYFGRCNVAEHEKLILLAQLKPEKDSDEAVTYSLGKFGQRALDFYSIHVTKESTHPVKPLAQIAGNRYASSPVGKALSDACMGTIASFLSKYQDIIIEHQKVVKGNQKRLESLRELAGKENLEYPSVTLPPQPHTKEGVDAYNEVIARVRMWVNLNLWQKLKLSRDDAKPLLRLKGFPSFPLVERQQANEVDWWDMVCNVKKLINEKKEDGKVFWQNLAGYKRQEALRPYLSSEEDRKKGKKFARYQLGDLLLHLEKKHGEDWGKVYDEAWERIDKKVEGLSKHIKLEEERRSEDAQSKAALTDWLRAKASFVIEGLKEADKDEFCRCELKLQKWYGDLRGKPFAIEAENSILDISGFSKQYNCAFIWQKDGVKKLNLYLIINYFKGGKLRFKKIKPEAFEANRFYTVINKKSGEIVPMEVNFNFDDPNLIILPLAFGKRQGREFIWNDLLSLETGSLKLANGRVIEKTLYNRRTRQDEPALFVALTFERREVLDSSNIKPMNLIGVDRGENIPAVIALTDPEGCPLSRFKDSLGNPTHILRIGESYKEKQRTIQAKKEVEQRRAGGYSRKYASKAKNLADDMVRNTARDLLYYAVTQDAMLIFENLSRGFGRQGKRTFMAERQYTRMEDWLTAKLAYEGLPSKTYLSKTLAQYTSKTCSNCGFTITSADYDRVLEKLKKTATGWMTTINGKELKVEGQITYYNRYKRQNVVKDLSVELDRLSEESVNNDISSWTKGRSGNEALSLLKKRFSHRPVQEKFVCLNCGFETHADEQAALNIARSWLFLRSQEYKKYQTNKTTGNTDKRAFVETWQSFYRKKLKEVWKPAV

SEQ ID NO: 44171 - protein, 980 aa, synthetic construct
  REGION 1..980: note = engineered CasX variant
QEIKRINKIRRRLVKDSNTKKAGKTGPMKTLLVRVMTPDLRERLENLRKKPENIPQPISNTSRANLNKLLTDYTEMKKAILHVYWEEFQKDPVGLMSRVAQPASKKIDQNKLKPEMDEKGNLTTAGFACSQCGQPLFVYKLEQVSEKGKAYTNYFGRCNVAEHEKLILLAQLKPEKDSDEAVTYSLGKFGQRALDFYSIHVTKESTHPVKPLAQIAGNRYASTPVGKALSDACMGTIASFLSKYQDIIIEHQKVVKGNQKRLESLRELAGKENLEYPSVTLPPQPHTKEGVDAYNEVIARVRMWVNLNLWQKLKLSRDDAKPLLRLKGFPSFPLVERQQANEVDWWDMVCNVKKLINEKKEDGKVFWQNLAGYKRQEALRPYLSSEEDRKKGKKFARYQLGDLLLHLEKKHGEDWGKVYDEAWERIDKKVEGLSKHIKLEEERRSEDAQSKAALTDWLRAKASFVIEGLKEADKDEFCRCELKLQKWYGDLRGKPFAIEAENSILDISGFSKQYNCAFIWQKDGVKKLNLYLIINYFKGGKLRFKKIKPEAFEANRFYTVINKKSGEIVPMEVNFNFDDPNLIILPLAFGKRQGREFIWNDLLSLETGSLKLANGRVIEKTLYNRRTRQDEPALFVALTFERREVLDSSNIKPMNLIGVDRGENIPAVIALTDPEGCPLSRFKDSLGNPTHILRIGESYKEKQRTIQAKKEVEQRRAGGYSRKYASKAKNLADDMVRNTARDLLYYAVTQDAMLIFENLSRGFGRQGKRTFMAERQYTRMEDWLTAKLAYEGLPSKTYLSKTLAQYTSKTCSNCGFTITSADYDRVLEKLKKTATGWMTTINGKELKVEGQITYYNRYKRQNVVKDLSVELDRLSEESVNNDISSWTKGRSGNEALSLLKKRFSHRPVQEKFVCLNCGFETHADEQAALNIARSWLFLRSQEYKKYQTNKTTGNTDKRAFVETWQSFYRKKLKEVWKPAV

SEQ ID NO: 44172 - protein, 980 aa, synthetic construct
  REGION 1..980: note = engineered CasX variant
QEIKRINKIRRRLVKDSNTKKAGKTGPMKTLLVRVMTPDLRERLENLRKKPENIPQPISNTSRANLNKLLTDYTEMKKAILHVYWEEFQKDPVGLMSRVAQPASKKIDQNKLKPEMDEKGNLTTAGFACSQCGQPLFVYKLEQVSEKGKAYTNYFGRCNVAEHEKLILLAQLKPEKDSDEAVTYSLGKFGQRALDFYSIHVTKESTHPVKPLAQIAGNRYASAPVGKALSDACMGTIASFLSKYQDIIIEHQKVVKGNQKRLESLRELAGKENLEYPSVTLPPQPHTKEGVDAYNEVIARVRMWVNLNLWQKLKLSRDDAKPLLRLKGFPSFPLVERQQANEVDWWDMVCNVKKLINEKKEDGKVFWQNLAGYKRQEALRPYLSSEEDRKKGKKFARYQLGDLLLHLEKKHGEDWGKVYDEAWERIDKKVEGLSKHIKLEEERRSEDAQSKAALTDWLRAKASFVIEGLKEADKDEFCRCELKLQKWYGDLRGKPFAIEAENSILDISGFSKQYNCAFIWQKDGVKKLNLYLIINYFKGGKLRFKKIKPEAFEANRFYTVINKKSGEIVPMEVNFNFDDPNLIILPLAFGKRQGREFIWNDLLSLETGSLKLANGRVIEKTLYNRRTRQDEPALFVALTFERREVLDSSNIKPMNLIGVDRGENIPAVIALTDPEGCPLSRFKDSLGNPTHILRIGESYKEKQRTIQAKKEVEQRRAGGYSRKYASKAKNLADDMVRNTARDLLYYAVTQDAMLIFENLSRGFGRQGKRTFMAERQYTRMEDWLTAKLAYEGLPSKTYLSKTLAQYTSKTCSNCGFTITSADYDRVLEKLKKTATGWMTTINGKELKVEGQITYYNRYKRQNVVKDLSVELDRLSEESVNNDISSWTKGRSGNEALSLLKKRFSHRPVQEKFVCLNCGFETHADEQAALNIARSWLFLRSQEYKKYQTNKTTGNTDKRAFVETWQSFYRKKLKEVWKPAV

SEQ ID NO: 44173 - protein, 980 aa, synthetic construct
  REGION 1..980: note = engineered CasX variant
QEIKRINKIRRRLVKDSNTKKAGKTGPMKTLLVRVMTPDLRERLENLRKKPENIPQPISNTSRANLNKLLTDYTEMKKAILHVYWEEFQKDPVGLMSRVAQPASKKIDQNKLKPEMDEKGNLTTAGFACSQCGQPLFVYKLEQVSEKGKAYTNYFGRCNVAEHEKLILLAQLKPEKDSDEAVTYSLGKFGQRALDFYSIHVTKESTHPVKPLAQIAGNRYASVPVGKALSDACMGTIASFLSKYQDIIIEHQKVVKGNQKRLESLRELAGKENLEYPSVTLPPQPHTKEGVDAYNEVIARVRMWVNLNLWQKLKLSRDDAKPLLRLKGFPSFPLVERQQANEVDWWDMVCNVKKLINEKKEDGKVFWQNLAGYKRQEALRPYLSSEEDRKKGKKFARYQLGDLLLHLEKKHGEDWGKVYDEAWERIDKKVEGLSKHIKLEEERRSEDAQSKAALTDWLRAKASFVIEGLKEADKDEFCRCELKLQKWYGDLRGKPFAIEAENSILDISGFSKQYNCAFIWQKDGVKKLNLYLIINYFKGGKLRFKKIKPEAFEANRFYTVINKKSGEIVPMEVNFNFDDPNLIILPLAFGKRQGREFIWNDLLSLETGSLKLANGRVIEKTLYNRRTRQDEPALFVALTFERREVLDSSNIKPMNLIGVDRGENIPAVIALTDPEGCPLSRFKDSLGNPTHILRIGESYKEKQRTIQAKKEVEQRRAGGYSRKYASKAKNLADDMVRNTARDLLYYAVTQDAMLIFENLSRGFGRQGKRTFMAERQYTRMEDWLTAKLAYEGLPSKTYLSKTLAQYTSKTCSNCGFTITSADYDRVLEKLKKTATGWMTTINGKELKVEGQITYYNRYKRQNVVKDLSVELDRLSEESVNNDISSWTKGRSGNEALSLLKKRFSHRPVQEKFVCLNCGFETHADEQAALNIARSWLFLRSQEYKKYQTNKTTGNTDKRAFVETWQSFYRKKLKEVWKPAV

SEQ ID NO: 44174 - protein, 980 aa, synthetic construct
  REGION 1..980: note = engineered CasX variant
QEIKRINKIRRRLVKDSNTKKAGKTGPMKTLLVRVMTPDLRERLENLRKKPENIPQPISNTSRANLNKLLTDYTEMKKAILHVYWEEFQKDPVGLMSRVAQPASKKIDQNKLKPEMDEKGNLTTAGFACSQCGQPLFVYKLEQVSEKGKAYTNYFGRCNVAEHEKLIKLAQLKPEKDSDEAVTYSLGKFGQRALDFYSIHVTKESTHPVKPLAQIAGNRYASGPVGKALSDACMGTIASFLSKYQDIIIEHQKVVKGNQKRLESLRELAGKENLEYPSVTLPPQPHTKEGVDAYNEVIARVRMWVNLNLWQKLKLSRDDAKPLLRLKGFPSFPLVERQQANEVDWWDMVCNVKKLINEKKEDGKVFWQNLAGYKRQEALRPYLSSEEDRKKGKKFARYQLGDLLLHLEKKHGEDWGKVYDEAWERIDKKVEGLSKHIKLEEERRSEDAQSKAALTDWLRAKASFVIEGLKEADKDEFCRCELKLQKWYGDLRGKPFAIEAENSILDISGFSKQYNCAFIWQKDGVKKLNLYLIINYFKGGKLRFKKIKPEAFEANRFYTVINKKSGEIVPMEVNFNFDDPNLIILPLAFGKRQGREFIWNDLLSLETGSLKLANGRVIEKTLYNRRTRQDEPALFVALTFERREVLDSSNIKPMNLIGVDRGENIPAVIALTDPEGCPLSRFKDSLGNPTHILRIGESYKEKQRTIQAKKEVEQRRAGGYSRKYASKAKNLADDMVRNTARDLLYYAVTQDAMLIFENLSRGFGRQGKRTFMAERQYTRMEDWLTAKLAYEGLPSKTYLSKTLAQYTSKTCSNCGFTITSADYDRVLEKLKKTATGWMTTINGKELKVEGQITYYNRYKRQNVVKDLSVELDRLSEESVNNDISSWTKGRSGNEALSLLKKRFSHRPVQEKFVCLNCGFETHADEQAALNIARSWLFLRSQEYKKYQTNKTTGNTDKRAFVETWQSFYRKKLKEVWKPAV

SEQ ID NO: 44175 - protein, 979 aa, synthetic construct
  REGION 1..979: note = engineered CasX variant
QEIKRINKIRRRLVKDSNTKKAGKTGPMKTLLVRVMTPDLRERLENLRKKPENIPQPISNTSRANLNKLLTDYTEMKKAILHVYWEEFQKDPVGLMSRVAQPASKKIDQNKLKPEMDEKGNLTTAGFACSQCGQPLFVYKLEQVSEKGKAYTNYFGRCNVAEHEKLILLAQLKPEKDSDEAVTYSLGKFGQRALDFYSIHVTKESTHPVKPLAQIAGNRYASPVGKALSDACMGTIASFLSKYQDIIIEHQKVVKGNQKRLESLRELAGKENLEYPSVTLPPQPHTKEGVDAYNEVIARVRMWVNLNLWQKLKLSRDDAKPLLRLKGFPSFPLVERQQANEVDWWDMVCNVKKLINEKKEDGKVFWQNLAGYKRQEALRPYLSSEEDRKKGKKFARYQLGDLLLHLEKKHGEDWGKVYDEAWERIDKKVEGLSKHIKLEEERRSEDAQSKAALTDWLRAKASFVIEGLKEADKDEFCRCELKLQKWYGDLRGKPFAIEAENSILDISGFSKQYNCAFIWQKDGVKKLNLYLIINYFKGGKLRFKKIKPEAFEANRFYTVINKKSGEIVPMEVNFNFDDPNLIILPLAFGKRQGREFIWNDLLSLETGSLKLANGRVIEKTLYNRRTRQDEPALFVALTFERREVLDSSNIKPMNLIGVDRGENIPAVIALTDPEGCPLSRFKDSLGNPTHILRIGESYKEKQRTIQAKKEVEQRRAGGYSRKYASKAKNLADDMVRNTARDLLYYAVTQDAMLIFENLSRGFGRQGKRTFMAERQYTRMEDWLTAKLAYEGLPSKTYLSKTLAQYTSKTCSNCGFTITSADYDRVLEKLKKTATGWMTTINGKELKVEGQITYYNRYKRQNVVKDLSVELDRLSEESVNNDISSWTKGRSGNEALSLLKKRFSHRPVQEKFVCLNCGFETHADEQAALNIARSWLFLRSQEYKKYQTNKTTGNTDKRAFVETWQSFYRKKLKEVWKPAV

SEQ ID NO: 44176 - protein, 979 aa, synthetic construct
  REGION 1..979: note = engineered CasX variant
QEIKRINKIRRRLVKDSNTKKAGKTGPMKTLLVRVMTPDLRERLENLRKKPENIPQPISNTSRANLNKLLTDYTEMKKAILHVYWEEFQKDPVGLMSRVAQPASKKIDQNKLKPEMDEKGNLTTAGFACSQCGQPLFVYKLEQVSEKGKAYTNYFGRCNVAEHEKLILLAQLKPEKDSDEAVTYSLGKFGQRALDFYSIHVTKESTHPVKPLAQIAGNRYASYPVGKALSDACMGTIASFLSKYQDIIIEHQKVVKGNQKRLESLRELAGKENLEYPSVTLPPQPHTKEGVDAYNEVIARVRMWVNLNLWQKLKLSRDDAKPLLRLKGFPSFPLVERQQANEVDWWDMVCNVKKLINEKKEDGKVFWQNLAGYKRQEALRPYLSSEEDRQKGKKFARYQLGDLLLHLEKKHGEDWGKVYDEAWERIDKKVEGLSKHIKLEEERRSEDAQSKAALTDWLRAKASFVIEGLKEADKDEFCRCELKLQKWYGDLRGKPFAIEAENSILDISGFSKQYNCAFIWQKDGVKKLNLYLIINYFKGGKLRFKKIKPEAFEANRFYTVINKKSGEIVPMEVNFNFDDPNLIILPLAFGKRQGREFIWNDLLSLETGSLKLANGRVIEKTLYNRRTRQDEPALFVALTFERREVLDSSNIKPMNLIGVDRGENIPAVIALTDPEGCPLSRFKDSLGNPTHILRIGESYKEKQRTIQAKKEVEQRRAGGYSRKYASKAKNLADDMVRNTARDLLYYAVTQDAMLIFENLSRGFGRQGKRTFMAERQYTRMEDWLTAKLAYEGLPSKTYLSKTLAQYTSKTCSNCGFTITSADYDRVLEKLKKTATGWMTTINGKELKVEGQITYYNRYKRQNVVKDLSVELDRLSEESVNNDISSWTKGRSGEALSLLKKRFSHRPVQEKFVCLNCGFETHADEQAALNIARSWLFLRSQEYKKYQTNKTTGNTDKRAFVETWQSFYRKKLKEVWKPAV

SEQ ID NO: 44177 - protein, 979 aa, synthetic construct
  REGION 1..979: note = engineered CasX variant
QEIKRINKIRRRLVKDSNTKKAGKTGPMKTLLVRVMTPDLRERLENLRKKPENIPQPISNTSRANLNKLLTDYTEMKKAILHVYWEEFQKDPVGLMSRVAQPASKKIDQNKLKPEMDEKGNLTTAGFACSQCGQPLFVYKLEQVSEKGKAYTNYFGRCNVAEHEKLILLAQLKPEKDSDEAVTYSLGKFGQRALDFYSIHVTKESTHPVKPLAQIAGNRYASHPVGKALSDACMGTIASFLSKYQDIIIEHQKVVKGNQKRLESLRELAGKENLEYPSVTLPPQPHTKEGVDAYNEVIARVRMWVNLNLWQKLKLSRDDAKPLLRLKGFPSFPLVERQQANEVDWWDMVCNVKKLINEKKEDGKVFWQNLAGYKRQEALRPYLSSEEDRQKGKKFARYQLGDLLLHLEKKHGEDWGKVYDEAWERIDKKVEGLSKHIKLEEERRSEDAQSKAALTDWLRAKASFVIEGLKEADKDEFCRCELKLQKWYGDLRGKPFAIEAENSILDISGFSKQYNCAFIWQKDGVKKLNLYLIINYFKGGKLRFKKIKPEAFEANRFYTVINKKSGEIVPMEVNFNFDDPNLIILPLAFGKRQGREFIWNDLLSLETGSLKLANGRVIEKTLYNRRTRQDEPALFVALTFERREVLDSSNIKPMNLIGVDRGENIPAVIALTDPEGCPLSRFKDSLGNPTHILRIGESYKEKQRTIQAKKEVEQRRAGGYSRKYASKAKNLADDMVRNTARDLLYYAVTQDAMLIFENLSRGFGRQGKRTFMAERQYTRMEDWLTAKLAYEGLPSKTYLSKTLAQYTSKTCSNCGFTITSADYDRVLEKLKKTATGWMTTINGKELKVEGQITYYNRYKRQNVVKDLSVELDRLSEESVNNDISSWTKGRSGEALSLLKKRFSHRPVQEKFVCLNCGFETHADEQAALNIARSWLFLRSQEYKKYQTNKTTGNTDKRAFVETWQSFYRKKLKEVWKPAV

SEQ ID NO: 44178 - protein, 979 aa, synthetic construct
  REGION 1..979: note = engineered CasX variant
QEIKRINKIRRRLVKDSNTKKAGKTGPMKTLLVRVMTPDLRERLENLRKKPENIPQPISNTSRANLNKLLTDYTEMKKAILHVYWEEFQKDPVGLMSRVAQPASKKIDQNKLKPEMDEKGNLTTAGFACSQCGQPLFVYKLEQVSEKGKAYTNYFGRCNVAEHEKLILLAQLKPEKDSDEAVTYSLGKFGQRALDFYSIHVTKESTHPVKPLAQIAGNRYASSPVGKALSDACMGTIASFLSKYQDIIIEHQKVVKGNQKRLESLRELAGKENLEYPSVTLPPQPHTKEGVDAYNEVIARVRMWVNLNLWQKLKLSRDDAKPLLRLKGFPSFPLVERQQANEVDWWDMVCNVKKLINEKKEDGKVFWQNLAGYKRQEALRPYLSSEEDRQKGKKFARYQLGDLLLHLEKKHGEDWGKVYDEAWERIDKKVEGLSKHIKLEEERRSEDAQSKAALTDWLRAKASFVIEGLKEADKDEFCRCELKLQKWYGDLRGKPFAIEAENSILDISGFSKQYNCAFIWQKDGVKKLNLYLIINYFKGGKLRFKKIKPEAFEANRFYTVINKKSGEIVPMEVNFNFDDPNLIILPLAFGKRQGREFIWNDLLSLETGSLKLANGRVIEKTLYNRRTRQDEPALFVALTFERREVLDSSNIKPMNLIGVDRGENIPAVIALTDPEGCPLSRFKDSLGNPTHILRIGESYKEKQRTIQAKKEVEQRRAGGYSRKYASKAKNLADDMVRNTARDLLYYAVTQDAMLIFENLSRGFGRQGKRTFMAERQYTRMEDWLTAKLAYEGLPSKTYLSKTLAQYTSKTCSNCGFTITSADYDRVLEKLKKTATGWMTTINGKELKVEGQITYYNRYKRQNVVKDLSVELDRLSEESVNNDISSWTKGRSGEALSLLKKRFSHRPVQEKFVCLNCGFETHADEQAALNIARSWLFLRSQEYKKYQTNKTTGNTDKRAFVETWQSFYRKKLKEVWKPAV

SEQ ID NO: 44179 - protein, 979 aa, synthetic construct
  REGION 1..979: note = engineered CasX variant
QEIKRINKIRRRLVKDSNTKKAGKTGPMKTLLVRVMTPDLRERLENLRKKPENIPQPISNTSRANLNKLLTDYTEMKKAILHVYWEEFQKDPVGLMSRVAQPASKKIDQNKLKPEMDEKGNLTTAGFACSQCGQPLFVYKLEQVSEKGKAYTNYFGRCNVAEHEKLILLAQLKPEKDSDEAVTYSLGKFGQRALDFYSIHVTKESTHPVKPLAQIAGNRYASTPVGKALSDACMGTIASFLSKYQDIIIEHQKVVKGNQKRLESLRELAGKENLEYPSVTLPPQPHTKEGVDAYNEVIARVRMWVNLNLWQKLKLSRDDAKPLLRLKGFPSFPLVERQQANEVDWWDMVCNVKKLINEKKEDGKVFWQNLAGYKRQEALRPYLSSEEDRQKGKKFARYQLGDLLLHLEKKHGEDWGKVYDEAWERIDKKVEGLSKHIKLEEERRSEDAQSKAALTDWLRAKASFVIEGLKEADKDEFCRCELKLQKWYGDLRGKPFAIEAENSILDISGFSKQYNCAFIWQKDGVKKLNLYLIINYFKGGKLRFKKIKPEAFEANRFYTVINKKSGEIVPMEVNFNFDDPNLIILPLAFGKRQGREFIWNDLLSLETGSLKLANGRVIEKTLYNRRTRQDEPALFVALTFERREVLDSSNIKPMNLIGVDRGENIPAVIALTDPEGCPLSRFKDSLGNPTHILRIGESYKEKQRTIQAKKEVEQRRAGGYSRKYASKAKNLADDMVRNTARDLLYYAVTQDAMLIFENLSRGFGRQGKRTFMAERQYTRMEDWLTAKLAYEGLPSKTYLSKTLAQYTSKTCSNCGFTITSADYDRVLEKLKKTATGWMTTINGKELKVEGQITYYNRYKRQNVVKDLSVELDRLSEESVNNDISSWTKGRSGEALSLLKKRFSHRPVQEKFVCLNCGFETHADEQAALNIARSWLFLRSQEYKKYQTNKTTGNTDKRAFVETWQSFYRKKLKEVWKPAV

SEQ ID NO: 44180 - protein, 979 aa, synthetic construct
  REGION 1..979: note = engineered CasX variant
QEIKRINKIRRRLVKDSNTKKAGKTGPMKTLLVRVMTPDLRERLENLRKKPENIPQPISNTSRANLNKLLTDYTEMKKAILHVYWEEFQKDPVGLMSRVAQPASKKIDQNKLKPEMDEKGNLTTAGFACSQCGQPLFVYKLEQVSEKGKAYTNYFGRCNVAEHEKLILLAQLKPEKDSDEAVTYSLGKFGQRALDFYSIHVTKESTHPVKPLAQIAGNRYASAPVGKALSDACMGTIASFLSKYQDIIIEHQKVVKGNQKRLESLRELAGKENLEYPSVTLPPQPHTKEGVDAYNEVIARVRMWVNLNLWQKLKLSRDDAKPLLRLKGFPSFPLVERQQANEVDWWDMVCNVKKLINEKKEDGKVFWQNLAGYKRQEALRPYLSSEEDRQKGKKFARYQLGDLLLHLEKKHGEDWGKVYDEAWERIDKKVEGLSKHIKLEEERRSEDAQSKAALTDWLRAKASFVIEGLKEADKDEFCRCELKLQKWYGDLRGKPFAIEAENSILDISGFSKQYNCAFIWQKDGVKKLNLYLIINYFKGGKLRFKKIKPEAFEANRFYTVINKKSGEIVPMEVNFNFDDPNLIILPLAFGKRQGREFIWNDLLSLETGSLKLANGRVIEKTLYNRRTRQDEPALFVALTFERREVLDSSNIKPMNLIGVDRGENIPAVIALTDPEGCPLSRFKDSLGNPTHILRIGESYKEKQRTIQAKKEVEQRRAGGYSRKYASKAKNLADDMVRNTARDLLYYAVTQDAMLIFENLSRGFGRQGKRTFMAERQYTRMEDWLTAKLAYEGLPSKTYLSKTLAQYTSKTCSNCGFTITSADYDRVLEKLKKTATGWMTTINGKELKVEGQITYYNRYKRQNVVKDLSVELDRLSEESVNNDISSWTKGRSGEALSLLKKRFSHRPVQEKFVCLNCGFETHADEQAALNIARSWLFLRSQEYKKYQTNKTTGNTDKRAFVETWQSFYRKKLKEVWKPAV

SEQ ID NO: 44181 - protein, 979 aa, synthetic construct
  REGION 1..979: note = engineered CasX variant
QEIKRINKIRRRLVKDSNTKKAGKTGPMKTLLVRVMTPDLRERLENLRKKPENIPQPISNTSRANLNKLLTDYTEMKKAILHVYWEEFQKDPVGLMSRVAQPASKKIDQNKLKPEMDEKGNLTTAGFACSQCGQPLFVYKLEQVSEKGKAYTNYFGRCNVAEHEKLILLAQLKPEKDSDEAVTYSLGKFGQRALDFYSIHVTKESTHPVKPLAQIAGNRYASVPVGKALSDACMGTIASFLSKYQDIIIEHQKVVKGNQKRLESLRELAGKENLEYPSVTLPPQPHTKEGVDAYNEVIARVRMWVNLNLWQKLKLSRDDAKPLLRLKGFPSFPLVERQQANEVDWWDMVCNVKKLINEKKEDGKVFWQNLAGYKRQEALRPYLSSEEDRQKGKKFARYQLGDLLLHLEKKHGEDWGKVYDEAWERIDKKVEGLSKHIKLEEERRSEDAQSKAALTDWLRAKASFVIEGLKEADKDEFCRCELKLQKWYGDLRGKPFAIEAENSILDISGFSKQYNCAFIWQKDGVKKLNLYLIINYFKGGKLRFKKIKPEAFEANRFYTVINKKSGEIVPMEVNFNFDDPNLIILPLAFGKRQGREFIWNDLLSLETGSLKLANGRVIEKTLYNRRTRQDEPALFVALTFERREVLDSSNIKPMNLIGVDRGENIPAVIALTDPEGCPLSRFKDSLGNPTHILRIGESYKEKQRTIQAKKEVEQRRAGGYSRKYASKAKNLADDMVRNTARDLLYYAVTQDAMLIFENLSRGFGRQGKRTFMAERQYTRMEDWLTAKLAYEGLPSKTYLSKTLAQYTSKTCSNCGFTITSADYDRVLEKLKKTATGWMTTINGKELKVEGQITYYNRYKRQNVVKDLSVELDRLSEESVNNDISSWTKGRSGEALSLLKKRFSHRPVQEKFVCLNCGFETHADEQAALNIARSWLFLRSQEYKKYQTNKTTGNTDKRAFVETWQSFYRKKLKEVWKPAV

SEQ ID NO: 44182 - protein, 979 aa, synthetic construct
  REGION 1..979: note = engineered CasX variant
QEIKRINKIRRRLVKDSNTKKAGKTGPMKTLLVRVMTPDLRERLENLRKKPENIPQPISNTSRANLNKLLTDYTEMKKAILHVYWEEFQKDPVGLMSRVAQPASKKIDQNKLKPEMDEKGNLTTAGFACSQCGQPLFVYKLEQVSEKGKAYTNYFGRCNVAEHEKLIKLAQLKPEKDSDEAVTYSLGKFGQRALDFYSIHVTKESTHPVKPLAQIAGNRYASGPVGKALSDACMGTIASFLSKYQDIIIEHQKVVKGNQKRLESLRELAGKENLEYPSVTLPPQPHTKEGVDAYNEVIARVRMWVNLNLWQKLKLSRDDAKPLLRLKGFPSFPLVERQQANEVDWWDMVCNVKKLINEKKEDGKVFWQNLAGYKRQEALRPYLSSEEDRQKGKKFARYQLGDLLLHLEKKHGEDWGKVYDEAWERIDKKVEGLSKHIKLEEERRSEDAQSKAALTDWLRAKASFVIEGLKEADKDEFCRCELKLQKWYGDLRGKPFAIEAENSILDISGFSKQYNCAFIWQKDGVKKLNLYLIINYFKGGKLRFKKIKPEAFEANRFYTVINKKSGEIVPMEVNFNFDDPNLIILPLAFGKRQGREFIWNDLLSLETGSLKLANGRVIEKTLYNRRTRQDEPALFVALTFERREVLDSSNIKPMNLIGVDRGENIPAVIALTDPEGCPLSRFKDSLGNPTHILRIGESYKEKQRTIQAKKEVEQRRAGGYSRKYASKAKNLADDMVRNTARDLLYYAVTQDAMLIFENLSRGFGRQGKRTFMAERQYTRMEDWLTAKLAYEGLPSKTYLSKTLAQYTSKTCSNCGFTITSADYDRVLEKLKKTATGWMTTINGKELKVEGQITYYNRYKRQNVVKDLSVELDRLSEESVNNDISSWTKGRSGEALSLLKKRFSHRPVQEKFVCLNCGFETHADEQAALNIARSWLFLRSQEYKKYQTNKTTGNTDKRAFVETWQSFYRKKLKEVWKPAV

SEQ ID NO: 44183 - protein, 978 aa, synthetic construct
  REGION 1..978: note = engineered CasX variant
QEIKRINKIRRRLVKDSNTKKAGKTGPMKTLLVRVMTPDLRERLENLRKKPENIPQPISNTSRANLNKLLTDYTEMKKAILHVYWEEFQKDPVGLMSRVAQPASKKIDQNKLKPEMDEKGNLTTAGFACSQCGQPLFVYKLEQVSEKGKAYTNYFGRCNVAEHEKLILLAQLKPEKDSDEAVTYSLGKFGQRALDFYSIHVTKESTHPVKPLAQIAGNRYASPVGKALSDACMGTIASFLSKYQDIIIEHQKVVKGNQKRLESLRELAGKENLEYPSVTLPPQPHTKEGVDAYNEVIARVRMWVNLNLWQKLKLSRDDAKPLLRLKGFPSFPLVERQQANEVDWWDMVCNVKKLINEKKEDGKVFWQNLAGYKRQEALRPYLSSEEDRQKGKKFARYQLGDLLLHLEKKHGEDWGKVYDEAWERIDKKVEGLSKHIKLEEERRSEDAQSKAALTDWLRAKASFVIEGLKEADKDEFCRCELKLQKWYGDLRGKPFAIEAENSILDISGFSKQYNCAFIWQKDGVKKLNLYLIINYFKGGKLRFKKIKPEAFEANRFYTVINKKSGEIVPMEVNFNFDDPNLIILPLAFGKRQGREFIWNDLLSLETGSLKLANGRVIEKTLYNRRTRQDEPALFVALTFERREVLDSSNIKPMNLIGVDRGENIPAVIALTDPEGCPLSRFKDSLGNPTHILRIGESYKEKQRTIQAKKEVEQRRAGGYSRKYASKAKNLADDMVRNTARDLLYYAVTQDAMLIFENLSRGFGRQGKRTFMAERQYTRMEDWLTAKLAYEGLPSKTYLSKTLAQYTSKTCSNCGFTITSADYDRVLEKLKKTATGWMTTINGKELKVEGQITYYNRYKRQNVVKDLSVELDRLSEESVNNDISSWTKGRSGEALSLLKKRFSHRPVQEKFVCLNCGFETHADEQAALNIARSWLFLRSQEYKKYQTNKTTGNTDKRAFVETWQSFYRKKLKEVWKPAV

SEQ ID NO: 44184 - protein, 979 aa, synthetic construct
  REGION 1..979: note = engineered CasX variant
QEIKRINKIRRRLVKDSNTKKAGKTGPMKTLLVRVMTPDLRERLENLRKKPENIPQPISNTSRANLNKLLTDYTEMKKAILHVYWEEFQKDPVGLMSRVAQPASKKIDQNKLKPEMDEKGNLTTAGFACSQCGQPLFVYKLEQVSEKGKAYTNYFGRCNVAEHEKLILLAQLKPEKDSDEAVTYSLGKFGQRALDFYSIHVTKESTHPVKPLAQIAGNRYASYPVGKALSDACMGTIASFLSKYQDIIIEHQKVVKGNQKRLESLRELAGKENLEYPSVTLPPQPHTKEGVDAYNEVIARVRMWVNLNLWQKLKLSRDDAKPLLRLKGFPSFPLVERQQANEVDWWDMVCNVKKLINEKKEDGKVFWQNLAGYKRQEALRPYLSSEEDRKKGKKFARYQLGDLLLHLEKKHGEDWGKVYDEAWERIDKKVEGLSKHIKLEEERRSEDAQSKAALTDWLRAKASFVIEGLKEADKDEFCRCELKLQKWYGDLRGKPFAIEAENSILDISGFSKQYNCAFIWQKDGVKKLNLYLIINYFKGGKLRFKKIKPEAFEANRFYTVINKKSGEIVPMEVNFNFDDPNLIILPLAFGKRQGREFIWNDLLSLETGSLKLANGRVIEKTLYNRRTRQDEPALFVALTFERREVLDSSNIKPMNLIGVDRGENIPAVIALTDPEGCPLSRFKDSLGNPTHILRIGESYKEKQRTIQAKKEVEQRRAGGYSRKYASKAKNLADDMVRNTARDLLYYAVTQDAMLIFENLSRGFGRQGKRTFMAERQYTRMEDWLTAKLAYEGLPSQTYLSKTLAQYTSKTCSNCGFTITSADYDRVLEKLKKTATGWMTTINGKELKVEGQITYYNRYKRQNVVKDLSVELDRLSEESVNNDISSWTKGRSGEALSLLKKRFSHRPVQEKFVCLNCGFETHADEQAALNIARSWLFLRSQEYKKYQTNKTTGNTDKRAFVETWQSFYRKKLKEVWKPAV

SEQ ID NO: 44185 - protein, 979 aa, synthetic construct
  REGION 1..979: note = engineered CasX variant
QEIKRINKIRRRLVKDSNTKKAGKTGPMKTLLVRVMTPDLRERLENLRKKPENIPQPISNTSRANLNKLLTDYTEMKKAILHVYWEEFQKDPVGLMSRVAQPASKKIDQNKLKPEMDEKGNLTTAGFACSQCGQPLFVYKLEQVSEKGKAYTNYFGRCNVAEHEKLILLAQLKPEKDSDEAVTYSLGKFGQRALDFYSIHVTKESTHPVKPLAQIAGNRYASHPVGKALSDACMGTIASFLSKYQDIIIEHQKVVKGNQKRLESLRELAGKENLEYPSVTLPPQPHTKEGVDAYNEVIARVRMWVNLNLWQKLKLSRDDAKPLLRLKGFPSFPLVERQQANEVDWWDMVCNVKKLINEKKEDGKVFWQNLAGYKRQEALRPYLSSEEDRKKGKKFARYQLGDLLLHLEKKHGEDWGKVYDEAWERIDKKVEGLSKHIKLEEERRSEDAQSKAALTDWLRAKASFVIEGLKEADKDEFCRCELKLQKWYGDLRGKPFAIEAENSILDISGFSKQYNCAFIWQKDGVKKLNLYLIINYFKGGKLRFKKIKPEAFEANRFYTVINKKSGEIVPMEVNFNFDDPNLIILPLAFGKRQGREFIWNDLLSLETGSLKLANGRVIEKTLYNRRTRQDEPALFVALTFERREVLDSSNIKPMNLIGVDRGENIPAVIALTDPEGCPLSRFKDSLGNPTHILRIGESYKEKQRTIQAKKEVEQRRAGGYSRKYASKAKNLADDMVRNTARDLLYYAVTQDAMLIFENLSRGFGRQGKRTFMAERQYTRMEDWLTAKLAYEGLPSQTYLSKTLAQYTSKTCSNCGFTITSADYDRVLEKLKKTATGWMTTINGKELKVEGQITYYNRYKRQNVVKDLSVELDRLSEESVNNDISSWTKGRSGEALSLLKKRFSHRPVQEKFVCLNCGFETHADEQAALNIARSWLFLRSQEYKKYQTNKTTGNTDKRAFVETWQSFYRKKLKEVWKPAV

SEQ ID NO: 44186 - protein, 979 aa, synthetic construct
  REGION 1..979: note = engineered CasX variant
QEIKRINKIRRRLVKDSNTKKAGKTGPMKTLLVRVMTPDLRERLENLRKKPENIPQPISNTSRANLNKLLTDYTEMKKAILHVYWEEFQKDPVGLMSRVAQPASKKIDQNKLKPEMDEKGNLTTAGFACSQCGQPLFVYKLEQVSEKGKAYTNYFGRCNVAEHEKLILLAQLKPEKDSDEAVTYSLGKFGQRALDFYSIHVTKESTHPVKPLAQIAGNRYASSPVGKALSDACMGTIASFLSKYQDIIIEHQKVVKGNQKRLESLRELAGKENLEYPSVTLPPQPHTKEGVDAYNEVIARVRMWVNLNLWQKLKLSRDDAKPLLRLKGFPSFPLVERQQANEVDWWDMVCNVKKLINEKKEDGKVFWQNLAGYKRQEALRPYLSSEEDRKKGKKFARYQLGDLLLHLEKKHGEDWGKVYDEAWERIDKKVEGLSKHIKLEEERRSEDAQSKAALTDWLRAKASFVIEGLKEADKDEFCRCELKLQKWYGDLRGKPFAIEAENSILDISGFSKQYNCAFIWQKDGVKKLNLYLIINYFKGGKLRFKKIKPEAFEANRFYTVINKKSGEIVPMEVNFNFDDPNLIILPLAFGKRQGREFIWNDLLSLETGSLKLANGRVIEKTLYNRRTRQDEPALFVALTFERREVLDSSNIKPMNLIGVDRGENIPAVIALTDPEGCPLSRFKDSLGNPTHILRIGESYKEKQRTIQAKKEVEQRRAGGYSRKYASKAKNLADDMVRNTARDLLYYAVTQDAMLIFENLSRGFGRQGKRTFMAERQYTRMEDWLTAKLAYEGLPSQTYLSKTLAQYTSKTCSNCGFTITSADYDRVLEKLKKTATGWMTTINGKELKVEGQITYYNRYKRQNVVKDLSVELDRLSEESVNNDISSWTKGRSGEALSLLKKRFSHRPVQEKFVCLNCGFETHADEQAALNIARSWLFLRSQEYKKYQTNKTTGNTDKRAFVETWQSFYRKKLKEVWKPAV

SEQ ID NO: 44187 - protein, 979 aa, synthetic construct
  REGION 1..979: note = engineered CasX variant
QEIKRINKIRRRLVKDSNTKKAGKTGPMKTLLVRVMTPDLRERLENLRKKPENIPQPISNTSRANLNKLLTDYTEMKKAILHVYWEEFQKDPVGLMSRVAQPASKKIDQNKLKPEMDEKGNLTTAGFACSQCGQPLFVYKLEQVSEKGKAYTNYFGRCNVAEHEKLILLAQLKPEKDSDEAVTYSLGKFGQRALDFYSIHVTKESTHPVKPLAQIAGNRYASTPVGKALSDACMGTIASFLSKYQDIIIEHQKVVKGNQKRLESLRELAGKENLEYPSVTLPPQPHTKEGVDAYNEVIARVRMWVNLNLWQKLKLSRDDAKPLLRLKGFPSFPLVERQQANEVDWWDMVCNVKKLINEKKEDGKVFWQNLAGYKRQEALRPYLSSEEDRKKGKKFARYQLGDLLLHLEKKHGEDWGKVYDEAWERIDKKVEGLSKHIKLEEERRSEDAQSKAALTDWLRAKASFVIEGLKEADKDEFCRCELKLQKWYGDLRGKPFAIEAENSILDISGFSKQYNCAFIWQKDGVKKLNLYLIINYFKGGKLRFKKIKPEAFEANRFYTVINKKSGEIVPMEVNFNFDDPNLIILPLAFGKRQGREFIWNDLLSLETGSLKLANGRVIEKTLYNRRTRQDEPALFVALTFERREVLDSSNIKPMNLIGVDRGENIPAVIALTDPEGCPLSRFKDSLGNPTHILRIGESYKEKQRTIQAKKEVEQRRAGGYSRKYASKAKNLADDMVRNTARDLLYYAVTQDAMLIFENLSRGFGRQGKRTFMAERQYTRMEDWLTAKLAYEGLPSQTYLSKTLAQYTSKTCSNCGFTITSADYDRVLEKLKKTATGWMTTINGKELKVEGQITYYNRYKRQNVVKDLSVELDRLSEESVNNDISSWTKGRSGEALSLLKKRFSHRPVQEKFVCLNCGFETHADEQAALNIARSWLFLRSQEYKKYQTNKTTGNTDKRAFVETWQSFYRKKLKEVWKPAV

SEQ ID NO: 44188 - protein, 979 aa, synthetic construct
  REGION 1..979: note = engineered CasX variant
QEIKRINKIRRRLVKDSNTKKAGKTGPMKTLLVRVMTPDLRERLENLRKKPENIPQPISNTSRANLNKLLTDYTEMKKAILHVYWEEFQKDPVGLMSRVAQPASKKIDQNKLKPEMDEKGNLTTAGFACSQCGQPLFVYKLEQVSEKGKAYTNYFGRCNVAEHEKLILLAQLKPEKDSDEAVTYSLGKFGQRALDFYSIHVTKESTHPVKPLAQIAGNRYASAPVGKALSDACMGTIASFLSKYQDIIIEHQKVVKGNQKRLESLRELAGKENLEYPSVTLPPQPHTKEGVDAYNEVIARVRMWVNLNLWQKLKLSRDDAKPLLRLKGFPSFPLVERQQANEVDWWDMVCNVKKLINEKKEDGKVFWQNLAGYKRQEALRPYLSSEEDRKKGKKFARYQLGDLLLHLEKKHGEDWGKVYDEAWERIDKKVEGLSKHIKLEEERRSEDAQSKAALTDWLRAKASFVIEGLKEADKDEFCRCELKLQKWYGDLRGKPFAIEAENSILDISGFSKQYNCAFIWQKDGVKKLNLYLIINYFKGGKLRFKKIKPEAFEANRFYTVINKKSGEIVPMEVNFNFDDPNLIILPLAFGKRQGREFIWNDLLSLETGSLKLANGRVIEKTLYNRRTRQDEPALFVALTFERREVLDSSNIKPMNLIGVDRGENIPAVIALTDPEGCPLSRFKDSLGNPTHILRIGESYKEKQRTIQAKKEVEQRRAGGYSRKYASKAKNLADDMVRNTARDLLYYAVTQDAMLIFENLSRGFGRQGKRTFMAERQYTRMEDWLTAKLAYEGLPSQTYLSKTLAQYTSKTCSNCGFTITSADYDRVLEKLKKTATGWMTTINGKELKVEGQITYYNRYKRQNVVKDLSVELDRLSEESVNNDISSWTKGRSGEALSLLKKRFSHRPVQEKFVCLNCGFETHADEQAALNIARSWLFLRSQEYKKYQTNKTTGNTDKRAFVETWQSFYRKKLKEVWKPAV

SEQ ID NO: 44189 - protein, 979 aa, synthetic construct
  REGION 1..979: note = engineered CasX variant
QEIKRINKIRRRLVKDSNTKKAGKTGPMKTLLVRVMTPDLRERLENLRKKPENIPQPISNTSRANLNKLLTDYTEMKKAILHVYWEEFQKDPVGLMSRVAQPASKKIDQNKLKPEMDEKGNLTTAGFACSQCGQPLFVYKLEQVSEKGKAYTNYFGRCNVAEHEKLILLAQLKPEKDSDEAVTYSLGKFGQRALDFYSIHVTKESTHPVKPLAQIAGNRYASVPVGKALSDACMGTIASFLSKYQDIIIEHQKVVKGNQKRLESLRELAGKENLEYPSVTLPPQPHTKEGVDAYNEVIARVRMWVNLNLWQKLKLSRDDAKPLLRLKGFPSFPLVERQQANEVDWWDMVCNVKKLINEKKEDGKVFWQNLAGYKRQEALRPYLSSEEDRKKGKKFARYQLGDLLLHLEKKHGEDWGKVYDEAWERIDKKVEGLSKHIKLEEERRSEDAQSKAALTDWLRAKASFVIEGLKEADKDEFCRCELKLQKWYGDLRGKPFAIEAENSILDISGFSKQYNCAFIWQKDGVKKLNLYLIINYFKGGKLRFKKIKPEAFEANRFYTVINKKSGEIVPMEVNFNFDDPNLIILPLAFGKRQGREFIWNDLLSLETGSLKLANGRVIEKTLYNRRTRQDEPALFVALTFERREVLDSSNIKPMNLIGVDRGENIPAVIALTDPEGCPLSRFKDSLGNPTHILRIGESYKEKQRTIQAKKEVEQRRAGGYSRKYASKAKNLADDMVRNTARDLLYYAVTQDAMLIFENLSRGFGRQGKRTFMAERQYTRMEDWLTAKLAYEGLPSQTYLSKTLAQYTSKTCSNCGFTITSADYDRVLEKLKKTATGWMTTINGKELKVEGQITYYNRYKRQNVVKDLSVELDRLSEESVNNDISSWTKGRSGEALSLLKKRFSHRPVQEKFVCLNCGFETHADEQAALNIARSWLFLRSQEYKKYQTNKTTGNTDKRAFVETWQSFYRKKLKEVWKPAV

SEQ ID NO: 44190 - protein, 979 aa, synthetic construct
  REGION 1..979: note = engineered CasX variant
QEIKRINKIRRRLVKDSNTKKAGKTGPMKTLLVRVMTPDLRERLENLRKKPENIPQPISNTSRANLNKLLTDYTEMKKAILHVYWEEFQKDPVGLMSRVAQPASKKIDQNKLKPEMDEKGNLTTAGFACSQCGQPLFVYKLEQVSEKGKAYTNYFGRCNVAEHEKLIKLAQLKPEKDSDEAVTYSLGKFGQRALDFYSIHVTKESTHPVKPLAQIAGNRYASGPVGKALSDACMGTIASFLSKYQDIIIEHQKVVKGNQKRLESLRELAGKENLEYPSVTLPPQPHTKEGVDAYNEVIARVRMWVNLNLWQKLKLSRDDAKPLLRLKGFPSFPLVERQQANEVDWWDMVCNVKKLINEKKEDGKVFWQNLAGYKRQEALRPYLSSEEDRKKGKKFARYQLGDLLLHLEKKHGEDWGKVYDEAWERIDKKVEGLSKHIKLEEERRSEDAQSKAALTDWLRAKASFVIEGLKEADKDEFCRCELKLQKWYGDLRGKPFAIEAENSILDISGFSKQYNCAFIWQKDGVKKLNLYLIINYFKGGKLRFKKIKPEAFEANRFYTVINKKSGEIVPMEVNFNFDDPNLIILPLAFGKRQGREFIWNDLLSLETGSLKLANGRVIEKTLYNRRTRQDEPALFVALTFERREVLDSSNIKPMNLIGVDRGENIPAVIALTDPEGCPLSRFKDSLGNPTHILRIGESYKEKQRTIQAKKEVEQRRAGGYSRKYASKAKNLADDMVRNTARDLLYYAVTQDAMLIFENLSRGFGRQGKRTFMAERQYTRMEDWLTAKLAYEGLPSQTYLSKTLAQYTSKTCSNCGFTITSADYDRVLEKLKKTATGWMTTINGKELKVEGQITYYNRYKRQNVVKDLSVELDRLSEESVNNDISSWTKGRSGEALSLLKKRFSHRPVQEKFVCLNCGFETHADEQAALNIARSWLFLRSQEYKKYQTNKTTGNTDKRAFVETWQSFYRKKLKEVWKPAV

SEQ ID NO: 44191 - protein, 978 aa, synthetic construct
  REGION 1..978: note = engineered CasX variant
QEIKRINKIRRRLVKDSNTKKAGKTGPMKTLLVRVMTPDLRERLENLRKKPENIPQPISNTSRANLNKLLTDYTEMKKAILHVYWEEFQKDPVGLMSRVAQPASKKIDQNKLKPEMDEKGNLTTAGFACSQCGQPLFVYKLEQVSEKGKAYTNYFGRCNVAEHEKLILLAQLKPEKDSDEAVTYSLGKFGQRALDFYSIHVTKESTHPVKPLAQIAGNRYASPVGKALSDACMGTIASFLSKYQDIIIEHQKVVKGNQKRLESLRELAGKENLEYPSVTLPPQPHTKEGVDAYNEVIARVRMWVNLNLWQKLKLSRDDAKPLLRLKGFPSFPLVERQQANEVDWWDMVCNVKKLINEKKEDGKVFWQNLAGYKRQEALRPYLSSEEDRKKGKKFARYQLGDLLLHLEKKHGEDWGKVYDEAWERIDKKVEGLSKHIKLEEERRSEDAQSKAALTDWLRAKASFVIEGLKEADKDEFCRCELKLQKWYGDLRGKPFAIEAENSILDISGFSKQYNCAFIWQKDGVKKLNLYLIINYFKGGKLRFKKIKPEAFEANRFYTVINKKSGEIVPMEVNFNFDDPNLIILPLAFGKRQGREFIWNDLLSLETGSLKLANGRVIEKTLYNRRTRQDEPALFVALTFERREVLDSSNIKPMNLIGVDRGENIPAVIALTDPEGCPLSRFKDSLGNPTHILRIGESYKEKQRTIQAKKEVEQRRAGGYSRKYASKAKNLADDMVRNTARDLLYYAVTQDAMLIFENLSRGFGRQGKRTFMAERQYTRMEDWLTAKLAYEGLPSQTYLSKTLAQYTSKTCSNCGFTITSADYDRVLEKLKKTATGWMTTINGKELKVEGQITYYNRYKRQNVVKDLSVELDRLSEESVNNDISSWTKGRSGEALSLLKKRFSHRPVQEKFVCLNCGFETHADEQAALNIARSWLFLRSQEYKKYQTNKTTGNTDKRAFVETWQSFYRKKLKEVWKPAV

SEQ ID NO: 44192 - protein, 979 aa, synthetic construct
  REGION 1..979: note = engineered CasX variant
QEIKRINKIRRRLVKDSNTKKAGKTGPMKTLLVRVMTPDLRERLENLRKKPENIPQPISNTSRANLNKLLTDYTEMKKAILHVYWEEFQKDPVGLMSRVAQPASKKIDQNKLKPEMDEKGNLTTAGFACSQCGQPLFVYKLEQVSEKGKAYTNYFGRCNVAEHEKLILLAQLKPEKDSDEAVTYSLGKFGQRALDFYSIHVTKESTHPVKPLAQIAGNRYASYPVGKALSDACMGTIASFLSKYQDIIIEHQKVVKGNQKRLESLRELAGKENLEYPSVTLPPQPHTKEGVDAYNEVIARVRMWVNLNLWQKLKLSRDDAKPLLRLKGFPSFPLVERQQANEVDWWDMVCNVKKLINEKKEDGKVFWQNLAGYKRQEALRPYLSSEEDRKKGKKFARYQLGDLLLHLEKKHGEDWGKVYDEAWERIDKKVEGLSKHIKLEEERRSEDAQSKAALTDWLRAKASFVIEGLKEADKDEFCRCELKLQKWYGDLRGKPFAIEAENSILDISGFSKQYNCAFIWQKDGVKKLNLYLIINYFKGGKLRFKKIKPEAFEANRFYTVINKKSGEIVPMEVNFNFDDPNLIILPLAFGKRQGREFIWNDLLSLETGSLKLANGRVIEKTLYNRRTRQDEPALFVALTFERREVLDSSNIKPMNLIGVDRGENIPAVIALTDPEGCPLSRFKDSLGNPTHILRIGESYKEKQRTIQAKKEVEQRRAGGYSRKYASKAKNLADDMVRNTARDLLYYAVTQDAMLIFENLSRGFGRQGKRTFMAERQYTRMEDWLTAKLAYNGLPSKTYLSKTLAQYTSKTCSNCGFTITSADYDRVLEKLKKTATGWMTTINGKELKVEGQITYYNRYKRQNVVKDLSVELDRLSEESVNNDISSWTKGRSGEALSLLKKRFSHRPVQEKFVCLNCGFETHADEQAALNIARSWLFLRSQEYKKYQTNKTTGNTDKRAFVETWQSFYRKKLKEVWKPAV

SEQ ID NO: 44193 - protein, 979 aa, synthetic construct
  REGION 1..979: note = engineered CasX variant
QEIKRINKIRRRLVKDSNTKKAGKTGPMKTLLVRVMTPDLRERLENLRKKPENIPQPISNTSRANLNKLLTDYTEMKKAILHVYWEEFQKDPVGLMSRVAQPASKKIDQNKLKPEMDEKGNLTTAGFACSQCGQPLFVYKLEQVSEKGKAYTNYFGRCNVAEHEKLILLAQLKPEKDSDEAVTYSLGKFGQRALDFYSIHVTKESTHPVKPLAQIAGNRYASHPVGKALSDACMGTIASFLSKYQDIIIEHQKVVKGNQKRLESLRELAGKENLEYPSVTLPPQPHTKEGVDAYNEVIARVRMWVNLNLWQKLKLSRDDAKPLLRLKGFPSFPLVERQQANEVDWWDMVCNVKKLINEKKEDGKVFWQNLAGYKRQEALRPYLSSEEDRKKGKKFARYQLGDLLLHLEKKHGEDWGKVYDEAWERIDKKVEGLSKHIKLEEERRSEDAQSKAALTDWLRAKASFVIEGLKEADKDEFCRCELKLQKWYGDLRGKPFAIEAENSILDISGFSKQYNCAFIWQKDGVKKLNLYLIINYFKGGKLRFKKIKPEAFEANRFYTVINKKSGEIVPMEVNFNFDDPNLIILPLAFGKRQGREFIWNDLLSLETGSLKLANGRVIEKTLYNRRTRQDEPALFVALTFERREVLDSSNIKPMNLIGVDRGENIPAVIALTDPEGCPLSRFKDSLGNPTHILRIGESYKEKQRTIQAKKEVEQRRAGGYSRKYASKAKNLADDMVRNTARDLLYYAVTQDAMLIFENLSRGFGRQGKRTFMAERQYTRMEDWLTAKLAYNGLPSKTYLSKTLAQYTSKTCSNCGFTITSADYDRVLEKLKKTATGWMTTINGKELKVEGQITYYNRYKRQNVVKDLSVELDRLSEESVNNDISSWTKGRSGEALSLLKKRFSHRPVQEKFVCLNCGFETHADEQAALNIARSWLFLRSQEYKKYQTNKTTGNTDKRAFVETWQSFYRKKLKEVWKPAV

SEQ ID NO: 44194 - protein, 979 aa, synthetic construct
  REGION 1..979: note = engineered CasX variant
QEIKRINKIRRRLVKDSNTKKAGKTGPMKTLLVRVMTPDLRERLENLRKKPENIPQPISNTSRANLNKLLTDYTEMKKAILHVYWEEFQKDPVGLMSRVAQPASKKIDQNKLKPEMDEKGNLTTAGFACSQCGQPLFVYKLEQVSEKGKAYTNYFGRCNVAEHEKLILLAQLKPEKDSDEAVTYSLGKFGQRALDFYSIHVTKESTHPVKPLAQIAGNRYASSPVGKALSDACMGTIASFLSKYQDIIIEHQKVVKGNQKRLESLRELAGKENLEYPSVTLPPQPHTKEGVDAYNEVIARVRMWVNLNLWQKLKLSRDDAKPLLRLKGFPSFPLVERQQANEVDWWDMVCNVKKLINEKKEDGKVFWQNLAGYKRQEALRPYLSSEEDRKKGKKFARYQLGDLLLHLEKKHGEDWGKVYDEAWERIDKKVEGLSKHIKLEEERRSEDAQSKAALTDWLRAKASFVIEGLKEADKDEFCRCELKLQKWYGDLRGKPFAIEAENSILDISGFSKQYNCAFIWQKDGVKKLNLYLIINYFKGGKLRFKKIKPEAFEANRFYTVINKKSGEIVPMEVNFNFDDPNLIILPLAFGKRQGREFIWNDLLSLETGSLKLANGRVIEKTLYNRRTRQDEPALFVALTFERREVLDSSNIKPMNLIGVDRGENIPAVIALTDPEGCPLSRFKDSLGNPTHILRIGESYKEKQRTIQAKKEVEQRRAGGYSRKYASKAKNLADDMVRNTARDLLYYAVTQDAMLIFENLSRGFGRQGKRTFMAERQYTRMEDWLTAKLAYNGLPSKTYLSKTLAQYTSKTCSNCGFTITSADYDRVLEKLKKTATGWMTTINGKELKVEGQITYYNRYKRQNVVKDLSVELDRLSEESVNNDISSWTKGRSGEALSLLKKRFSHRPVQEKFVCLNCGFETHADEQAALNIARSWLFLRSQEYKKYQTNKTTGNTDKRAFVETWQSFYRKKLKEVWKPAV

SEQ ID NO: 44195 - protein, 979 aa, synthetic construct
  REGION 1..979: note = engineered CasX variant
QEIKRINKIRRRLVKDSNTKKAGKTGPMKTLLVRVMTPDLRERLENLRKKPENIPQPISNTSRANLNKLLTDYTEMKKAILHVYWEEFQKDPVGLMSRVAQPASKKIDQNKLKPEMDEKGNLTTAGFACSQCGQPLFVYKLEQVSEKGKAYTNYFGRCNVAEHEKLILLAQLKPEKDSDEAVTYSLGKFGQRALDFYSIHVTKESTHPVKPLAQIAGNRYASTPVGKALSDACMGTIASFLSKYQDIIIEHQKVVKGNQKRLESLRELAGKENLEYPSVTLPPQPHTKEGVDAYNEVIARVRMWVNLNLWQKLKLSRDDAKPLLRLKGFPSFPLVERQQANEVDWWDMVCNVKKLINEKKEDGKVFWQNLAGYKRQEALRPYLSSEEDRKKGKKFARYQLGDLLLHLEKKHGEDWGKVYDEAWERIDKKVEGLSKHIKLEEERRSEDAQSKAALTDWLRAKASFVIEGLKEADKDEFCRCELKLQKWYGDLRGKPFAIEAENSILDISGFSKQYNCAFIWQKDGVKKLNLYLIINYFKGGKLRFKKIKPEAFEANRFYTVINKKSGEIVPMEVNFNFDDPNLIILPLAFGKRQGREFIWNDLLSLETGSLKLANGRVIEKTLYNRRTRQDEPALFVALTFERREVLDSSNIKPMNLIGVDRGENIPAVIALTDPEGCPLSRFKDSLGNPTHILRIGESYKEKQRTIQAKKEVEQRRAGGYSRKYASKAKNLADDMVRNTARDLLYYAVTQDAMLIFENLSRGFGRQGKRTFMAERQYTRMEDWLTAKLAYNGLPSKTYLSKTLAQYTSKTCSNCGFTITSADYDRVLEKLKKTATGWMTTINGKELKVEGQITYYNRYKRQNVVKDLSVELDRLSEESVNNDISSWTKGRSGEALSLLKKRFSHRPVQEKFVCLNCGFETHADEQAALNIARSWLFLRSQEYKKYQTNKTTGNTDKRAFVETWQSFYRKKLKEVWKPAV

SEQ ID NO: 44196 - protein, 979 aa, synthetic construct
  REGION 1..979: note = engineered CasX variant
QEIKRINKIRRRLVKDSNTKKAGKTGPMKTLLVRVMTPDLRERLENLRKKPENIPQPISNTSRANLNKLLTDYTEMKKAILHVYWEEFQKDPVGLMSRVAQPASKKIDQNKLKPEMDEKGNLTTAGFACSQCGQPLFVYKLEQVSEKGKAYTNYFGRCNVAEHEKLILLAQLKPEKDSDEAVTYSLGKFGQRALDFYSIHVTKESTHPVKPLAQIAGNRYASAPVGKALSDACMGTIASFLSKYQDIIIEHQKVVKGNQKRLESLRELAGKENLEYPSVTLPPQPHTKEGVDAYNEVIARVRMWVNLNLWQKLKLSRDDAKPLLRLKGFPSFPLVERQQANEVDWWDMVCNVKKLINEKKEDGKVFWQNLAGYKRQEALRPYLSSEEDRKKGKKFARYQLGDLLLHLEKKHGEDWGKVYDEAWERIDKKVEGLSKHIKLEEERRSEDAQSKAALTDWLRAKASFVIEGLKEADKDEFCRCELKLQKWYGDLRGKPFAIEAENSILDISGFSKQYNCAFIWQKDGVKKLNLYLIINYFKGGKLRFKKIKPEAFEANRFYTVINKKSGEIVPMEVNFNFDDPNLIILPLAFGKRQGREFIWNDLLSLETGSLKLANGRVIEKTLYNRRTRQDEPALFVALTFERREVLDSSNIKPMNLIGVDRGENIPAVIALTDPEGCPLSRFKDSLGNPTHILRIGESYKEKQRTIQAKKEVEQRRAGGYSRKYASKAKNLADDMVRNTARDLLYYAVTQDAMLIFENLSRGFGRQGKRTFMAERQYTRMEDWLTAKLAYNGLPSKTYLSKTLAQYTSKTCSNCGFTITSADYDRVLEKLKKTATGWMTTINGKELKVEGQITYYNRYKRQNVVKDLSVELDRLSEESVNNDISSWTKGRSGEALSLLKKRFSHRPVQEKFVCLNCGFETHADEQAALNIARSWLFLRSQEYKKYQTNKTTGNTDKRAFVETWQSFYRKKLKEVWKPAV

SEQ ID NO: 44197 - protein, 979 aa, synthetic construct
  REGION 1..979: note = engineered CasX variant
QEIKRINKIRRRLVKDSNTKKAGKTGPMKTLLVRVMTPDLRERLENLRKKPENIPQPISNTSRANLNKLLTDYTEMKKAILHVYWEEFQKDPVGLMSRVAQPASKKIDQNKLKPEMDEKGNLTTAGFACSQCGQPLFVYKLEQVSEKGKAYTNYFGRCNVAEHEKLILLAQLKPEKDSDEAVTYSLGKFGQRALDFYSIHVTKESTHPVKPLAQIAGNRYASVPVGKALSDACMGTIASFLSKYQDIIIEHQKVVKGNQKRLESLRELAGKENLEYPSVTLPPQPHTKEGVDAYNEVIARVRMWVNLNLWQKLKLSRDDAKPLLRLKGFPSFPLVERQQANEVDWWDMVCNVKKLINEKKEDGKVFWQNLAGYKRQEALRPYLSSEEDRKKGKKFARYQLGDLLLHLEKKHGEDWGKVYDEAWERIDKKVEGLSKHIKLEEERRSEDAQSKAALTDWLRAKASFVIEGLKEADKDEFCRCELKLQKWYGDLRGKPFAIEAENSILDISGFSKQYNCAFIWQKDGVKKLNLYLIINYFKGGKLRFKKIKPEAFEANRFYTVINKKSGEIVPMEVNFNFDDPNLIILPLAFGKRQGREFIWNDLLSLETGSLKLANGRVIEKTLYNRRTRQDEPALFVALTFERREVLDSSNIKPMNLIGVDRGENIPAVIALTDPEGCPLSRFKDSLGNPTHILRIGESYKEKQRTIQAKKEVEQRRAGGYSRKYASKAKNLADDMVRNTARDLLYYAVTQDAMLIFENLSRGFGRQGKRTFMAERQYTRMEDWLTAKLAYNGLPSKTYLSKTLAQYTSKTCSNCGFTITSADYDRVLEKLKKTATGWMTTINGKELKVEGQITYYNRYKRQNVVKDLSVELDRLSEESVNNDISSWTKGRSGEALSLLKKRFSHRPVQEKFVCLNCGFETHADEQAALNIARSWLFLRSQEYKKYQTNKTTGNTDKRAFVETWQSFYRKKLKEVWKPAV

SEQ ID NO: 44198 - protein, 979 aa, synthetic construct
  REGION 1..979: note = engineered CasX variant
QEIKRINKIRRRLVKDSNTKKAGKTGPMKTLLVRVMTPDLRERLENLRKKPENIPQPISNTSRANLNKLLTDYTEMKKAILHVYWEEFQKDPVGLMSRVAQPASKKIDQNKLKPEMDEKGNLTTAGFACSQCGQPLFVYKLEQVSEKGKAYTNYFGRCNVAEHEKLIKLAQLKPEKDSDEAVTYSLGKFGQRALDFYSIHVTKESTHPVKPLAQIAGNRYASGPVGKALSDACMGTIASFLSKYQDIIIEHQKVVKGNQKRLESLRELAGKENLEYPSVTLPPQPHTKEGVDAYNEVIARVRMWVNLNLWQKLKLSRDDAKPLLRLKGFPSFPLVERQQANEVDWWDMVCNVKKLINEKKEDGKVFWQNLAGYKRQEALRPYLSSEEDRKKGKKFARYQLGDLLLHLEKKHGEDWGKVYDEAWERIDKKVEGLSKHIKLEEERRSEDAQSKAALTDWLRAKASFVIEGLKEADKDEFCRCELKLQKWYGDLRGKPFAIEAENSILDISGFSKQYNCAFIWQKDGVKKLNLYLIINYFKGGKLRFKKIKPEAFEANRFYTVINKKSGEIVPMEVNFNFDDPNLIILPLAFGKRQGREFIWNDLLSLETGSLKLANGRVIEKTLYNRRTRQDEPALFVALTFERREVLDSSNIKPMNLIGVDRGENIPAVIALTDPEGCPLSRFKDSLGNPTHILRIGESYKEKQRTIQAKKEVEQRRAGGYSRKYASKAKNLADDMVRNTARDLLYYAVTQDAMLIFENLSRGFGRQGKRTFMAERQYTRMEDWLTAKLAYNGLPSKTYLSKTLAQYTSKTCSNCGFTITSADYDRVLEKLKKTATGWMTTINGKELKVEGQITYYNRYKRQNVVKDLSVELDRLSEESVNNDISSWTKGRSGEALSLLKKRFSHRPVQEKFVCLNCGFETHADEQAALNIARSWLFLRSQEYKKYQTNKTTGNTDKRAFVETWQSFYRKKLKEVWKPAV

SEQ ID NO: 44199 - protein, 978 aa, synthetic construct
  REGION 1..978: note = engineered CasX variant
QEIKRINKIRRRLVKDSNTKKAGKTGPMKTLLVRVMTPDLRERLENLRKKPENIPQPISNTSRANLNKLLTDYTEMKKAILHVYWEEFQKDPVGLMSRVAQPASKKIDQNKLKPEMDEKGNLTTAGFACSQCGQPLFVYKLEQVSEKGKAYTNYFGRCNVAEHEKLILLAQLKPEKDSDEAVTYSLGKFGQRALDFYSIHVTKESTHPVKPLAQIAGNRYASPVGKALSDACMGTIASFLSKYQDIIIEHQKVVKGNQKRLESLRELAGKENLEYPSVTLPPQPHTKEGVDAYNEVIARVRMWVNLNLWQKLKLSRDDAKPLLRLKGFPSFPLVERQQANEVDWWDMVCNVKKLINEKKEDGKVFWQNLAGYKRQEALRPYLSSEEDRKKGKKFARYQLGDLLLHLEKKHGEDWGKVYDEAWERIDKKVEGLSKHIKLEEERRSEDAQSKAALTDWLRAKASFVIEGLKEADKDEFCRCELKLQKWYGDLRGKPFAIEAENSILDISGFSKQYNCAFIWQKDGVKKLNLYLIINYFKGGKLRFKKIKPEAFEANRFYTVINKKSGEIVPMEVNFNFDDPNLIILPLAFGKRQGREFIWNDLLSLETGSLKLANGRVIEKTLYNRRTRQDEPALFVALTFERREVLDSSNIKPMNLIGVDRGENIPAVIALTDPEGCPLSRFKDSLGNPTHILRIGESYKEKQRTIQAKKEVEQRRAGGYSRKYASKAKNLADDMVRNTARDLLYYAVTQDAMLIFENLSRGFGRQGKRTFMAERQYTRMEDWLTAKLAYNGLPSKTYLSKTLAQYTSKTCSNCGFTITSADYDRVLEKLKKTATGWMTTINGKELKVEGQITYYNRYKRQNVVKDLSVELDRLSEESVNNDISSWTKGRSGEALSLLKKRFSHRPVQEKFVCLNCGFETHADEQAALNIARSWLFLRSQEYKKYQTNKTTGNTDKRAFVETWQSFYRKKLKEVWKPAV

SEQ ID NO: 44200 - protein, 979 aa, synthetic construct
  REGION 1..979: note = engineered CasX variant
QEIKRINKIRRRLVKDSNTKKAGKTGPMKTLLVRVMTPDLRERLENLRKKPENIPQPISNTSRANLNKLLTDYTEMKKAILHVYWEEFQKDPVGLMSRVAQPASKKIDQNKLKPEMDEKGNLTTAGFACSQCGQPLFVYKLEQVSEKGKAYTNYFGRCNVAEHEKLIQLAQLKPEKDSDEAVTYSLGKFGQRALDFYSIHVTKESTHPVKPLAQIAGNRYASYPVGKALSDACMGTIASFLSKYQDIIIEHQKVVKGNQKRLESLRELAGKENLEYPSVTLPPQPHTKEGVDAYNEVIARVRMWVNLNLWQKLKLSRDDAKPLLRLKGFPSFPLVERQQANEVDWWDMVCNVKKLINEKKEDGKVFWQNLAGYKRQEALRPYLSSEEDRKKGKKFARYQLGDLLLHLEKKHGEDWGKVYDEAWERIDKKVEGLSKHIKLEEERRSEDAQSKAALTDWLRAKASFVIEGLKEADKDEFCRCELKLQKWYGDLRGKPFAIEAENSILDISGFSKQYNCAFIWQKDGVKKLNLYLIINYFKGGKLRFKKIKPEAFEANRFYTVINKKSGEIVPMEVNFNFDDPNLIILPLAFGKRQGREFIWNDLLSLETGSLKLANGRVIEKTLYNRRTRQDEPALFVALTFERREVLDSSNIKPMNLIGVDRGENIPAVIALTDPEGCPLSRFKDSLGNPTHILRIGESYKEKQRTIQAKKEVEQRRAGGYSRKYASKAKNLADDMVRNTARDLLYYAVTQDAMLIFENLSRGFGRQGKRTFMAERQYTRMEDWLTAKLAYEGLPSKTYLSKTLAQYTSKTCSNCGFTITSADYDRVLEKLKKTATGWMTTINGKELKVEGQITYYNRYKRQNVVKDLSVELDRLSEESVNNDISSWTKGRSGEALSLLKKRFSHRPVQEKFVCLNCGFETHADEQAALNIARSWLFLRSQEYKKYQTNKTTGNTDKRAFVETWQSFYRKKLKEVWKPAV

SEQ ID NO: 44201 - protein, 979 aa, synthetic construct
  REGION 1..979: note = engineered CasX variant
QEIKRINKIRRRLVKDSNTKKAGKTGPMKTLLVRVMTPDLRERLENLRKKPENIPQPISNTSRANLNKLLTDYTEMKKAILHVYWEEFQKDPVGLMSRVAQPASKKIDQNKLKPEMDEKGNLTTAGFACSQCGQPLFVYKLEQVSEKGKAYTNYFGRCNVAEHEKLIQLAQLKPEKDSDEAVTYSLGKFGQRALDFYSIHVTKESTHPVKPLAQIAGNRYASHPVGKALSDACMGTIASFLSKYQDIIIEHQKVVKGNQKRLESLRELAGKENLEYPSVTLPPQPHTKEGVDAYNEVIARVRMWVNLNLWQKLKLSRDDAKPLLRLKGFPSFPLVERQQANEVDWWDMVCNVKKLINEKKEDGKVFWQNLAGYKRQEALRPYLSSEEDRKKGKKFARYQLGDLLLHLEKKHGEDWGKVYDEAWERIDKKVEGLSKHIKLEEERRSEDAQSKAALTDWLRAKASFVIEGLKEADKDEFCRCELKLQKWYGDLRGKPFAIEAENSILDISGFSKQYNCAFIWQKDGVKKLNLYLIINYFKGGKLRFKKIKPEAFEANRFYTVINKKSGEIVPMEVNFNFDDPNLIILPLAFGKRQGREFIWNDLLSLETGSLKLANGRVIEKTLYNRRTRQDEPALFVALTFERREVLDSSNIKPMNLIGVDRGENIPAVIALTDPEGCPLSRFKDSLGNPTHILRIGESYKEKQRTIQAKKEVEQRRAGGYSRKYASKAKNLADDMVRNTARDLLYYAVTQDAMLIFENLSRGFGRQGKRTFMAERQYTRMEDWLTAKLAYEGLPSKTYLSKTLAQYTSKTCSNCGFTITSADYDRVLEKLKKTATGWMTTINGKELKVEGQITYYNRYKRQNVVKDLSVELDRLSEESVNNDISSWTKGRSGEALSLLKKRFSHRPVQEKFVCLNCGFETHADEQAALNIARSWLFLRSQEYKKYQTNKTTGNTDKRAFVETWQSFYRKKLKEVWKPAV

SEQ ID NO: 44202 - protein, 979 aa, synthetic construct
  REGION 1..979: note = engineered CasX variant
QEIKRINKIRRRLVKDSNTKKAGKTGPMKTLLVRVMTPDLRERLENLRKKPENIPQPISNTSRANLNKLLTDYTEMKKAILHVYWEEFQKDPVGLMSRVAQPASKKIDQNKLKPEMDEKGNLTTAGFACSQCGQPLFVYKLEQVSEKGKAYTNYFGRCNVAEHEKLIQLAQLKPEKDSDEAVTYSLGKFGQRALDFYSIHVTKESTHPVKPLAQIAGNRYASSPVGKALSDACMGTIASFLSKYQDIIIEHQKVVKGNQKRLESLRELAGKENLEYPSVTLPPQPHTKEGVDAYNEVIARVRMWVNLNLWQKLKLSRDDAKPLLRLKGFPSFPLVERQQANEVDWWDMVCNVKKLINEKKEDGKVFWQNLAGYKRQEALRPYLSSEEDRKKGKKFARYQLGDLLLHLEKKHGEDWGKVYDEAWERIDKKVEGLSKHIKLEEERRSEDAQSKAALTDWLRAKASFVIEGLKEADKDEFCRCELKLQKWYGDLRGKPFAIEAENSILDISGFSKQYNCAFIWQKDGVKKLNLYLIINYFKGGKLRFKKIKPEAFEANRFYTVINKKSGEIVPMEVNFNFDDPNLIILPLAFGKRQGREFIWNDLLSLETGSLKLANGRVIEKTLYNRRTRQDEPALFVALTFERREVLDSSNIKPMNLIGVDRGENIPAVIALTDPEGCPLSRFKDSLGNPTHILRIGESYKEKQRTIQAKKEVEQRRAGGYSRKYASKAKNLADDMVRNTARDLLYYAVTQDAMLIFENLSRGFGRQGKRTFMAERQYTRMEDWLTAKLAYEGLPSKTYLSKTLAQYTSKTCSNCGFTITSADYDRVLEKLKKTATGWMTTINGKELKVEGQITYYNRYKRQNVVKDLSVELDRLSEESVNNDISSWTKGRSGEALSLLKKRFSHRPVQEKFVCLNCGFETHADEQAALNIARSWLFLRSQEYKKYQTNKTTGNTDKRAFVETWQSFYRKKLKEVWKPAV

SEQ ID NO: 44203 - protein, 979 aa, synthetic construct
  REGION 1..979: note = engineered CasX variant
QEIKRINKIRRRLVKDSNTKKAGKTGPMKTLLVRVMTPDLRERLENLRKKPENIPQPISNTSRANLNKLLTDYTEMKKAILHVYWEEFQKDPVGLMSRVAQPASKKIDQNKLKPEMDEKGNLTTAGFACSQCGQPLFVYKLEQVSEKGKAYTNYFGRCNVAEHEKLIQLAQLKPEKDSDEAVTYSLGKFGQRALDFYSIHVTKESTHPVKPLAQIAGNRYASTPVGKALSDACMGTIASFLSKYQDIIIEHQKVVKGNQKRLESLRELAGKENLEYPSVTLPPQPHTKEGVDAYNEVIARVRMWVNLNLWQKLKLSRDDAKPLLRLKGFPSFPLVERQQANEVDWWDMVCNVKKLINEKKEDGKVFWQNLAGYKRQEALRPYLSSEEDRKKGKKFARYQLGDLLLHLEKKHGEDWGKVYDEAWERIDKKVEGLSKHIKLEEERRSEDAQSKAALTDWLRAKASFVIEGLKEADKDEFCRCELKLQKWYGDLRGKPFAIEAENSILDISGFSKQYNCAFIWQKDGVKKLNLYLIINYFKGGKLRFKKIKPEAFEANRFYTVINKKSGEIVPMEVNFNFDDPNLIILPLAFGKRQGREFIWNDLLSLETGSLKLANGRVIEKTLYNRRTRQDEPALFVALTFERREVLDSSNIKPMNLIGVDRGENIPAVIALTDPEGCPLSRFKDSLGNPTHILRIGESYKEKQRTIQAKKEVEQRRAGGYSRKYASKAKNLADDMVRNTARDLLYYAVTQDAMLIFENLSRGFGRQGKRTFMAERQYTRMEDWLTAKLAYEGLPSKTYLSKTLAQYTSKTCSNCGFTITSADYDRVLEKLKKTATGWMTTINGKELKVEGQITYYNRYKRQNVVKDLSVELDRLSEESVNNDISSWTKGRSGEALSLLKKRFSHRPVQEKFVCLNCGFETHADEQAALNIARSWLFLRSQEYKKYQTNKTTGNTDKRAFVETWQSFYRKKLKEVWKPAV

SEQ ID NO: 44204 - protein, 979 aa, synthetic construct
  REGION 1..979: note = engineered CasX variant
QEIKRINKIRRRLVKDSNTKKAGKTGPMKTLLVRVMTPDLRERLENLRKKPENIPQPISNTSRANLNKLLTDYTEMKKAILHVYWEEFQKDPVGLMSRVAQPASKKIDQNKLKPEMDEKGNLTTAGFACSQCGQPLFVYKLEQVSEKGKAYTNYFGRCNVAEHEKLIQLAQLKPEKDSDEAVTYSLGKFGQRALDFYSIHVTKESTHPVKPLAQIAGNRYASAPVGKALSDACMGTIASFLSKYQDIIIEHQKVVKGNQKRLESLRELAGKENLEYPSVTLPPQPHTKEGVDAYNEVIARVRMWVNLNLWQKLKLSRDDAKPLLRLKGFPSFPLVERQQANEVDWWDMVCNVKKLINEKKEDGKVFWQNLAGYKRQEALRPYLSSEEDRKKGKKFARYQLGDLLLHLEKKHGEDWGKVYDEAWERIDKKVEGLSKHIKLEEERRSEDAQSKAALTDWLRAKASFVIEGLKEADKDEFCRCELKLQKWYGDLRGKPFAIEAENSILDISGFSKQYNCAFIWQKDGVKKLNLYLIINYFKGGKLRFKKIKPEAFEANRFYTVINKKSGEIVPMEVNFNFDDPNLIILPLAFGKRQGREFIWNDLLSLETGSLKLANGRVIEKTLYNRRTRQDEPALFVALTFERREVLDSSNIKPMNLIGVDRGENIPAVIALTDPEGCPLSRFKDSLGNPTHILRIGESYKEKQRTIQAKKEVEQRRAGGYSRKYASKAKNLADDMVRNTARDLLYYAVTQDAMLIFENLSRGFGRQGKRTFMAERQYTRMEDWLTAKLAYEGLPSKTYLSKTLAQYTSKTCSNCGFTITSADYDRVLEKLKKTATGWMTTINGKELKVEGQITYYNRYKRQNVVKDLSVELDRLSEESVNNDISSWTKGRSGEALSLLKKRFSHRPVQEKFVCLNCGFETHADEQAALNIARSWLFLRSQEYKKYQTNKTTGNTDKRAFVETWQSFYRKKLKEVWKPAV

SEQ ID NO: 44205 - protein, 979 aa, synthetic construct
  REGION 1..979: note = engineered CasX variant
QEIKRINKIRRRLVKDSNTKKAGKTGPMKTLLVRVMTPDLRERLENLRKKPENIPQPISNTSRANLNKLLTDYTEMKKAILHVYWEEFQKDPVGLMSRVAQPASKKIDQNKLKPEMDEKGNLTTAGFACSQCGQPLFVYKLEQVSEKGKAYTNYFGRCNVAEHEKLIQLAQLKPEKDSDEAVTYSLGKFGQRALDFYSIHVTKESTHPVKPLAQIAGNRYASVPVGKALSDACMGTIASFLSKYQDIIIEHQKVVKGNQKRLESLRELAGKENLEYPSVTLPPQPHTKEGVDAYNEVIARVRMWVNLNLWQKLKLSRDDAKPLLRLKGFPSFPLVERQQANEVDWWDMVCNVKKLINEKKEDGKVFWQNLAGYKRQEALRPYLSSEEDRKKGKKFARYQLGDLLLHLEKKHGEDWGKVYDEAWERIDKKVEGLSKHIKLEEERRSEDAQSKAALTDWLRAKASFVIEGLKEADKDEFCRCELKLQKWYGDLRGKPFAIEAENSILDISGFSKQYNCAFIWQKDGVKKLNLYLIINYFKGGKLRFKKIKPEAFEANRFYTVINKKSGEIVPMEVNFNFDDPNLIILPLAFGKRQGREFIWNDLLSLETGSLKLANGRVIEKTLYNRRTRQDEPALFVALTFERREVLDSSNIKPMNLIGVDRGENIPAVIALTDPEGCPLSRFKDSLGNPTHILRIGESYKEKQRTIQAKKEVEQRRAGGYSRKYASKAKNLADDMVRNTARDLLYYAVTQDAMLIFENLSRGFGRQGKRTFMAERQYTRMEDWLTAKLAYEGLPSKTYLSKTLAQYTSKTCSNCGFTITSADYDRVLEKLKKTATGWMTTINGKELKVEGQITYYNRYKRQNVVKDLSVELDRLSEESVNNDISSWTKGRSGEALSLLKKRFSHRPVQEKFVCLNCGFETHADEQAALNIARSWLFLRSQEYKKYQTNKTTGNTDKRAFVETWQSFYRKKLKEVWKPAV

SEQ ID NO: 44206 - protein, 980 aa, synthetic construct
  REGION 1..980: note = engineered CasX variant
QEIKRINKIRRRLVKDSNTKKAGKTGPMKTLLVRVMTPDLRERLENLRKKPENIPQPISNTSRANLNKLLTDYTEMKKAILHVYWEEFQKDPVGLMSRVAQPASKKIDQNKLKPEMDEKGNLTTAGFACSQCGQPLFVYKLEQVSEKGKAYTNYFGRCNVAEHEKLIQKLAQLKPEKDSDEAVTYSLGKFGQRALDFYSIHVTKESTHPVKPLAQIAGNRYASGPVGKALSDACMGTIASFLSKYQDIIIEHQKVVKGNQKRLESLRELAGKENLEYPSVTLPPQPHTKEGVDAYNEVIARVRMWVNLNLWQKLKLSRDDAKPLLRLKGFPSFPLVERQQANEVDWWDMVCNVKKLINEKKEDGKVFWQNLAGYKRQEALRPYLSSEEDRKKGKKFARYQLGDLLLHLEKKHGEDWGKVYDEAWERIDKKVEGLSKHIKLEEERRSEDAQSKAALTDWLRAKASFVIEGLKEADKDEFCRCELKLQKWYGDLRGKPFAIEAENSILDISGFSKQYNCAFIWQKDGVKKLNLYLIINYFKGGKLRFKKIKPEAFEANRFYTVINKKSGEIVPMEVNFNFDDPNLIILPLAFGKRQGREFIWNDLLSLETGSLKLANGRVIEKTLYNRRTRQDEPALFVALTFERREVLDSSNIKPMNLIGVDRGENIPAVIALTDPEGCPLSRFKDSLGNPTHILRIGESYKEKQRTIQAKKEVEQRRAGGYSRKYASKAKNLADDMVRNTARDLLYYAVTQDAMLIFENLSRGFGRQGKRTFMAERQYTRMEDWLTAKLAYEGLPSKTYLSKTLAQYTSKTCSNCGFTITSADYDRVLEKLKKTATGWMTTINGKELKVEGQITYYNRYKRQNVVKDLSVELDRLSEESVNNDISSWTKGRSGEALSLLKKRFSHRPVQEKFVCLNCGFETHADEQAALNIARSWLFLRSQEYKKYQTNKTTGNTDKRAFVETWQSFYRKKLKEVWKPAV

SEQ ID NO: 44207 - protein, 978 aa, synthetic construct
  REGION 1..978: note = engineered CasX variant
QEIKRINKIRRRLVKDSNTKKAGKTGPMKTLLVRVMTPDLRERLENLRKKPENIPQPISNTSRANLNKLLTDYTEMKKAILHVYWEEFQKDPVGLMSRVAQPASKKIDQNKLKPEMDEKGNLTTAGFACSQCGQPLFVYKLEQVSEKGKAYTNYFGRCNVAEHEKLIQLAQLKPEKDSDEAVTYSLGKFGQRALDFYSIHVTKESTHPVKPLAQIAGNRYASPVGKALSDACMGTIASFLSKYQDIIIEHQKVVKGNQKRLESLRELAGKENLEYPSVTLPPQPHTKEGVDAYNEVIARVRMWVNLNLWQKLKLSRDDAKPLLRLKGFPSFPLVERQQANEVDWWDMVCNVKKLINEKKEDGKVFWQNLAGYKRQEALRPYLSSEEDRKKGKKFARYQLGDLLLHLEKKHGEDWGKVYDEAWERIDKKVEGLSKHIKLEEERRSEDAQSKAALTDWLRAKASFVIEGLKEADKDEFCRCELKLQKWYGDLRGKPFAIEAENSILDISGFSKQYNCAFIWQKDGVKKLNLYLIINYFKGGKLRFKKIKPEAFEANRFYTVINKKSGEIVPMEVNFNFDDPNLIILPLAFGKRQGREFIWNDLLSLETGSLKLANGRVIEKTLYNRRTRQDEPALFVALTFERREVLDSSNIKPMNLIGVDRGENIPAVIALTDPEGCPLSRFKDSLGNPTHILRIGESYKEKQRTIQAKKEVEQRRAGGYSRKYASKAKNLADDMVRNTARDLLYYAVTQDAMLIFENLSRGFGRQGKRTFMAERQYTRMEDWLTAKLAYEGLPSKTYLSKTLAQYTSKTCSNCGFTITSADYDRVLEKLKKTATGWMTTINGKELKVEGQITYYNRYKRQNVVKDLSVELDRLSEESVNNDISSWTKGRSGEALSLLKKRFSHRPVQEKFVCLNCGFETHADEQAALNIARSWLFLRSQEYKKYQTNKTTGNTDKRAFVETWQSFYRKKLKEVWKPAV

SEQ ID NO: 44208 - protein, 979 aa, synthetic construct
  REGION 1..979: note = engineered CasX variant
QEIKRINKIRRRLVKDSNTKKAGKTGPMKTLLVRVMTPDLRERLENLRKKPENIPQPISNTSRANLNKLLTDYTEMKKAILHVYWEEFQKDPVGLMSRVAQPASKKIDQNKLKPEMDEKGNLTTAGFACSQCGQPLFVYKLEQVSEKGKAYTNYFGRCNVAEHEKLILLAQLKPEKDSDEAVTYSLGKFGQRALDFYSIHVTKESTHPVKPLAQIAGNRYASYPVGKALSDACMGTIASFLSKYQDIIIEHQKVVKGNQKRLESLRELAGKENLEYPSVTLPPQPHTKEGVDAYNEVIARVRMWVNLNLWQKLKLSRDDAKPLLRLKGFPSFPLVERQQANEVDWWDMVCNVKKLINEKKEDGKVFWQNLAIYKRQEALRPYLSSEEDRKKGKKFARYQLGDLLLHLEKKHGEDWGKVYDEAWERIDKKVEGLSKHIKLEEERRSEDAQSKAALTDWLRAKASFVIEGLKEADKDEFCRCELKLQKWYGDLRGKPFAIEAENSILDISGFSKQYNCAFIWQKDGVKKLNLYLIINYFKGGKLRFKKIKPEAFEANRFYTVINKKSGEIVPMEVNFNFDDPNLIILPLAFGKRQGREFIWNDLLSLETGSLKLANGRVIEKTLYNRRTRQDEPALFVALTFERREVLDSSNIKPMNLIGVDRGENIPAVIALTDPEGCPLSRFKDSLGNPTHILRIGESYKEKQRTIQAKKEVEQRRAGGYSRKYASKAKNLADDMVRNTARDLLYYAVTQDAMLIFENLSRGFGRQGKRTFMAERQYTRMEDWLTAKLAYEGLPSKTYLSKTLAQYTSKTCSNCGFTITSADYDRVLEKLKKTATGWMTTINGKELKVEGQITYYNRYKRQNVVKDLSVELDRLSEESVNNDISSWTKGRSGEALSLLKKRFSHRPVQEKFVCLNCGFETHADEQAALNIARSWLFLRSQEYKKYQTNKTTGNTDKRAFVETWQSFYRKKLKEVWKPAV

SEQ ID NO: 44209 - protein, 979 aa, synthetic construct
  REGION 1..979: note = engineered CasX variant
QEIKRINKIRRRLVKDSNTKKAGKTGPMKTLLVRVMTPDLRERLENLRKKPENIPQPISNTSRANLNKLLTDYTEMKKAILHVYWEEFQKDPVGLMSRVAQPASKKIDQNKLKPEMDEKGNLTTAGFACSQCGQPLFVYKLEQVSEKGKAYTNYFGRCNVAEHEKLILLAQLKPEKDSDEAVTYSLGKFGQRALDFYSIHVTKESTHPVKPLAQIAGNRYASHPVGKALSDACMGTIASFLSKYQDIIIEHQKVVKGNQKRLESLRELAGKENLEYPSVTLPPQPHTKEGVDAYNEVIARVRMWVNLNLWQKLKLSRDDAKPLLRLKGFPSFPLVERQQANEVDWWDMVCNVKKLINEKKEDGKVFWQNLAIYKRQEALRPYLSSEEDRKKGKKFARYQLGDLLLHLEKKHGEDWGKVYDEAWERIDKKVEGLSKHIKLEEERRSEDAQSKAALTDWLRAKASFVIEGLKEADKDEFCRCELKLQKWYGDLRGKPFAIEAENSILDISGFSKQYNCAFIWQKDGVKKLNLYLIINYFKGGKLRFKKIKPEAFEANRFYTVINKKSGEIVPMEVNFNFDDPNLIILPLAFGKRQGREFIWNDLLSLETGSLKLANGRVIEKTLYNRRTRQDEPALFVALTFERREVLDSSNIKPMNLIGVDRGENIPAVIALTDPEGCPLSRFKDSLGNPTHILRIGESYKEKQRTIQAKKEVEQRRAGGYSRKYASKAKNLADDMVRNTARDLLYYAVTQDAMLIFENLSRGFGRQGKRTFMAERQYTRMEDWLTAKLAYEGLPSKTYLSKTLAQYTSKTCSNCGFTITSADYDRVLEKLKKTATGWMTTINGKELKVEGQITYYNRYKRQNVVKDLSVELDRLSEESVNNDISSWTKGRSGEALSLLKKRFSHRPVQEKFVCLNCGFETHADEQAALNIARSWLFLRSQEYKKYQTNKTTGNTDKRAFVETWQSFYRKKLKEVWKPAV

SEQ ID NO: 44210 - protein, 979 aa, synthetic construct
  REGION 1..979: note = engineered CasX variant
QEIKRINKIRRRLVKDSNTKKAGKTGPMKTLLVRVMTPDLRERLENLRKKPENIPQPISNTSRANLNKLLTDYTEMKKAILHVYWEEFQKDPVGLMSRVAQPASKKIDQNKLKPEMDEKGNLTTAGFACSQCGQPLFVYKLEQVSEKGKAYTNYFGRCNVAEHEKLILLAQLKPEKDSDEAVTYSLGKFGQRALDFYSIHVTKESTHPVKPLAQIAGNRYASSPVGKALSDACMGTIASFLSKYQDIIIEHQKVVKGNQKRLESLRELAGKENLEYPSVTLPPQPHTKEGVDAYNEVIARVRMWVNLNLWQKLKLSRDDAKPLLRLKGFPSFPLVERQQANEVDWWDMVCNVKKLINEKKEDGKVFWQNLAIYKRQEALRPYLSSEEDRKKGKKFARYQLGDLLLHLEKKHGEDWGKVYDEAWERIDKKVEGLSKHIKLEEERRSEDAQSKAALTDWLRAKASFVIEGLKEADKDEFCRCELKLQKWYGDLRGKPFAIEAENSILDISGFSKQYNCAFIWQKDGVKKLNLYLIINYFKGGKLRFKKIKPEAFEANRFYTVINKKSGEIVPMEVNFNFDDPNLIILPLAFGKRQGREFIWNDLLSLETGSLKLANGRVIEKTLYNRRTRQDEPALFVALTFERREVLDSSNIKPMNLIGVDRGENIPAVIALTDPEGCPLSRFKDSLGNPTHILRIGESYKEKQRTIQAKKEVEQRRAGGYSRKYASKAKNLADDMVRNTARDLLYYAVTQDAMLIFENLSRGFGRQGKRTFMAERQYTRMEDWLTAKLAYEGLPSKTYLSKTLAQYTSKTCSNCGFTITSADYDRVLEKLKKTATGWMTTINGKELKVEGQITYYNRYKRQNVVKDLSVELDRLSEESVNNDISSWTKGRSGEALSLLKKRFSHRPVQEKFVCLNCGFETHADEQAALNIARSWLFLRSQEYKKYQTNKTTGNTDKRAFVETWQSFYRKKLKEVWKPAV

SEQ ID NO: 44211 - protein, 979 aa, synthetic construct
  REGION 1..979: note = engineered CasX variant
QEIKRINKIRRRLVKDSNTKKAGKTGPMKTLLVRVMTPDLRERLENLRKKPENIPQPISNTSRANLNKLLTDYTEMKKAILHVYWEEFQKDPVGLMSRVAQPASKKIDQNKLKPEMDEKGNLTTAGFACSQCGQPLFVYKLEQVSEKGKAYTNYFGRCNVAEHEKLILLAQLKPEKDSDEAVTYSLGKFGQRALDFYSIHVTKESTHPVKPLAQIAGNRYASTPVGKALSDACMGTIASFLSKYQDIIIEHQKVVKGNQKRLESLRELAGKENLEYPSVTLPPQPHTKEGVDAYNEVIARVRMWVNLNLWQKLKLSRDDAKPLLRLKGFPSFPLVERQQANEVDWWDMVCNVKKLINEKKEDGKVFWQNLAIYKRQEALRPYLSSEEDRKKGKKFARYQLGDLLLHLEKKHGEDWGKVYDEAWERIDKKVEGLSKHIKLEEERRSEDAQSKAALTDWLRAKASFVIEGLKEADKDEFCRCELKLQKWYGDLRGKPFAIEAENSILDISGFSKQYNCAFIWQKDGVKKLNLYLIINYFKGGKLRFKKIKPEAFEANRFYTVINKKSGEIVPMEVNFNFDDPNLIILPLAFGKRQGREFIWNDLLSLETGSLKLANGRVIEKTLYNRRTRQDEPALFVALTFERREVLDSSNIKPMNLIGVDRGENIPAVIALTDPEGCPLSRFKDSLGNPTHILRIGESYKEKQRTIQAKKEVEQRRAGGYSRKYASKAKNLADDMVRNTARDLLYYAVTQDAMLIFENLSRGFGRQGKRTFMAERQYTRMEDWLTAKLAYEGLPSKTYLSKTLAQYTSKTCSNCGFTITSADYDRVLEKLKKTATGWMTTINGKELKVEGQITYYNRYKRQNVVKDLSVELDRLSEESVNNDISSWTKGRSGEALSLLKKRFSHRPVQEKFVCLNCGFETHADEQAALNIARSWLFLRSQEYKKYQTNKTTGNTDKRAFVETWQSFYRKKLKEVWKPAV

SEQ ID NO: 44212 - protein, 979 aa, synthetic construct
  REGION 1..979: note = engineered CasX variant
QEIKRINKIRRRLVKDSNTKKAGKTGPMKTLLVRVMTPDLRERLENLRKKPENIPQPISNTSRANLNKLLTDYTEMKKAILHVYWEEFQKDPVGLMSRVAQPASKKIDQNKLKPEMDEKGNLTTAGFACSQCGQPLFVYKLEQVSEKGKAYTNYFGRCNVAEHEKLILLAQLKPEKDSDEAVTYSLGKFGQRALDFYSIHVTKESTHPVKPLAQIAGNRYASAPVGKALSDACMGTIASFLSKYQDIIIEHQKVVKGNQKRLESLRELAGKENLEYPSVTLPPQPHTKEGVDAYNEVIARVRMWVNLNLWQKLKLSRDDAKPLLRLKGFPSFPLVERQQANEVDWWDMVCNVKKLINEKKEDGKVFWQNLAIYKRQEALRPYLSSEEDRKKGKKFARYQLGDLLLHLEKKHGEDWGKVYDEAWERIDKKVEGLSKHIKLEEERRSEDAQSKAALTDWLRAKASFVIEGLKEADKDEFCRCELKLQKWYGDLRGKPFAIEAENSILDISGFSKQYNCAFIWQKDGVKKLNLYLIINYFKGGKLRFKKIKPEAFEANRFYTVINKKSGEIVPMEVNFNFDDPNLIILPLAFGKRQGREFIWNDLLSLETGSLKLANGRVIEKTLYNRRTRQDEPALFVALTFERREVLDSSNIKPMNLIGVDRGENIPAVIALTDPEGCPLSRFKDSLGNPTHILRIGESYKEKQRTIQAKKEVEQRRAGGYSRKYASKAKNLADDMVRNTARDLLYYAVTQDAMLIFENLSRGFGRQGKRTFMAERQYTRMEDWLTAKLAYEGLPSKTYLSKTLAQYTSKTCSNCGFTITSADYDRVLEKLKKTATGWMTTINGKELKVEGQITYYNRYKRQNVVKDLSVELDRLSEESVNNDISSWTKGRSGEALSLLKKRFSHRPVQEKFVCLNCGFETHADEQAALNIARSWLFLRSQEYKKYQTNKTTGNTDKRAFVETWQSFYRKKLKEVWKPAV

SEQ ID NO: 44213 - protein, 979 aa, synthetic construct
  REGION 1..979: note = engineered CasX variant
QEIKRINKIRRRLVKDSNTKKAGKTGPMKTLLVRVMTPDLRERLENLRKKPENIPQPISNTSRANLNKLLTDYTEMKKAILHVYWEEFQKDPVGLMSRVAQPASKKIDQNKLKPEMDEKGNLTTAGFACSQCGQPLFVYKLEQVSEKGKAYTNYFGRCNVAEHEKLILLAQLKPEKDSDEAVTYSLGKFGQRALDFYSIHVTKESTHPVKPLAQIAGNRYASVPVGKALSDACMGTIASFLSKYQDIIIEHQKVVKGNQKRLESLRELAGKENLEYPSVTLPPQPHTKEGVDAYNEVIARVRMWVNLNLWQKLKLSRDDAKPLLRLKGFPSFPLVERQQANEVDWWDMVCNVKKLINEKKEDGKVFWQNLAIYKRQEALRPYLSSEEDRKKGKKFARYQLGDLLLHLEKKHGEDWGKVYDEAWERIDKKVEGLSKHIKLEEERRSEDAQSKAALTDWLRAKASFVIEGLKEADKDEFCRCELKLQKWYGDLRGKPFAIEAENSILDISGFSKQYNCAFIWQKDGVKKLNLYLIINYFKGGKLRFKKIKPEAFEANRFYTVINKKSGEIVPMEVNFNFDDPNLIILPLAFGKRQGREFIWNDLLSLETGSLKLANGRVIEKTLYNRRTRQDEPALFVALTFERREVLDSSNIKPMNLIGVDRGENIPAVIALTDPEGCPLSRFKDSLGNPTHILRIGESYKEKQRTIQAKKEVEQRRAGGYSRKYASKAKNLADDMVRNTARDLLYYAVTQDAMLIFENLSRGFGRQGKRTFMAERQYTRMEDWLTAKLAYEGLPSKTYLSKTLAQYTSKTCSNCGFTITSADYDRVLEKLKKTATGWMTTINGKELKVEGQITYYNRYKRQNVVKDLSVELDRLSEESVNNDISSWTKGRSGEALSLLKKRFSHRPVQEKFVCLNCGFETHADEQAALNIARSWLFLRSQEYKKYQTNKTTGNTDKRAFVETWQSFYRKKLKEVWKPAV

SEQ ID NO: 44214 - protein, 979 aa, synthetic construct
  REGION 1..979: note = engineered CasX variant
QEIKRINKIRRRLVKDSNTKKAGKTGPMKTLLVRVMTPDLRERLENLRKKPENIPQPISNTSRANLNKLLTDYTEMKKAILHVYWEEFQKDPVGLMSRVAQPASKKIDQNKLKPEMDEKGNLTTAGFACSQCGQPLFVYKLEQVSEKGKAYTNYFGRCNVAEHEKLIKLAQLKPEKDSDEAVTYSLGKFGQRALDFYSIHVTKESTHPVKPLAQIAGNRYASGPVGKALSDACMGTIASFLSKYQDIIIEHQKVVKGNQKRLESLRELAGKENLEYPSVTLPPQPHTKEGVDAYNEVIARVRMWVNLNLWQKLKLSRDDAKPLLRLKGFPSFPLVERQQANEVDWWDMVCNVKKLINEKKEDGKVFWQNLAIYKRQEALRPYLSSEEDRKKGKKFARYQLGDLLLHLEKKHGEDWGKVYDEAWERIDKKVEGLSKHIKLEEERRSEDAQSKAALTDWLRAKASFVIEGLKEADKDEFCRCELKLQKWYGDLRGKPFAIEAENSILDISGFSKQYNCAFIWQKDGVKKLNLYLIINYFKGGKLRFKKIKPEAFEANRFYTVINKKSGEIVPMEVNFNFDDPNLIILPLAFGKRQGREFIWNDLLSLETGSLKLANGRVIEKTLYNRRTRQDEPALFVALTFERREVLDSSNIKPMNLIGVDRGENIPAVIALTDPEGCPLSRFKDSLGNPTHILRIGESYKEKQRTIQAKKEVEQRRAGGYSRKYASKAKNLADDMVRNTARDLLYYAVTQDAMLIFENLSRGFGRQGKRTFMAERQYTRMEDWLTAKLAYEGLPSKTYLSKTLAQYTSKTCSNCGFTITSADYDRVLEKLKKTATGWMTTINGKELKVEGQITYYNRYKRQNVVKDLSVELDRLSEESVNNDISSWTKGRSGEALSLLKKRFSHRPVQEKFVCLNCGFETHADEQAALNIARSWLFLRSQEYKKYQTNKTTGNTDKRAFVETWQSFYRKKLKEVWKPAV

SEQ ID NO: 44215 - protein, 978 aa, synthetic construct
  REGION 1..978: note = engineered CasX variant
QEIKRINKIRRRLVKDSNTKKAGKTGPMKTLLVRVMTPDLRERLENLRKKPENIPQPISNTSRANLNKLLTDYTEMKKAILHVYWEEFQKDPVGLMSRVAQPASKKIDQNKLKPEMDEKGNLTTAGFACSQCGQPLFVYKLEQVSEKGKAYTNYFGRCNVAEHEKLILLAQLKPEKDSDEAVTYSLGKFGQRALDFYSIHVTKESTHPVKPLAQIAGNRYASPVGKALSDACMGTIASFLSKYQDIIIEHQKVVKGNQKRLESLRELAGKENLEYPSVTLPPQPHTKEGVDAYNEVIARVRMWVNLNLWQKLKLSRDDAKPLLRLKGFPSFPLVERQQANEVDWWDMVCNVKKLINEKKEDGKVFWQNLAIYKRQEALRPYLSSEEDRKKGKKFARYQLGDLLLHLEKKHGEDWGKVYDEAWERIDKKVEGLSKHIKLEEERRSEDAQSKAALTDWLRAKASFVIEGLKEADKDEFCRCELKLQKWYGDLRGKPFAIEAENSILDISGFSKQYNCAFIWQKDGVKKLNLYLIINYFKGGKLRFKKIKPEAFEANRFYTVINKKSGEIVPMEVNFNFDDPNLIILPLAFGKRQGREFIWNDLLSLETGSLKLANGRVIEKTLYNRRTRQDEPALFVALTFERREVLDSSNIKPMNLIGVDRGENIPAVIALTDPEGCPLSRFKDSLGNPTHILRIGESYKEKQRTIQAKKEVEQRRAGGYSRKYASKAKNLADDMVRNTARDLLYYAVTQDAMLIFENLSRGFGRQGKRTFMAERQYTRMEDWLTAKLAYEGLPSKTYLSKTLAQYTSKTCSNCGFTITSADYDRVLEKLKKTATGWMTTINGKELKVEGQITYYNRYKRQNVVKDLSVELDRLSEESVNNDISSWTKGRSGEALSLLKKRFSHRPVQEKFVCLNCGFETHADEQAALNIARSWLFLRSQEYKKYQTNKTTGNTDKRAFVETWQSFYRKKLKEVWKPAV

SEQ ID NO: 44216 - protein, 979 aa, synthetic construct
  REGION 1..979: note = engineered CasX variant
QEIKRINKIRRRLVKDSNTKKAGKTGPMKTLLVRVMTPDLRERLENLRKKPENIPQPISNTSRANLNKLLTDYTEMKKAILHVYWEEFQKDPVGLMSRVAQPASKKIDQNKLKPEMDEKGNLTTAGFACSQCGQPLFVYKLEQVSEKGKAYTNYFGRCNVAEHEKLILLAQLKPEKDSDEAVTYSLGKFGQRALDFYSIHVTKESTHPVKPLAQIAGNRYASYPVGKALSDACMGTIASFLSKYQDIIIEHQKVVKGNQKRLESLRELAGKENLEYPSVTLPPQPHTKEGVDAYNEVIARVRMWVNLNLWQKLKLSRDDAKPLLRLKGFPSFPLVERQQANEVDWWDMVCNVKKLINEKKEDGKVFWQNLAGYKRQEALRPYLSSEEDREKGKKFARYQLGDLLLHLEKKHGEDWGKVYDEAWERIDKKVEGLSKHIKLEEERRSEDAQSKAALTDWLRAKASFVIEGLKEADKDEFCRCELKLQKWYGDLRGKPFAIEAENSILDISGFSKQYNCAFIWQKDGVKKLNLYLIINYFKGGKLRFKKIKPEAFEANRFYTVINKKSGEIVPMEVNFNFDDPNLIILPLAFGKRQGREFIWNDLLSLETGSLKLANGRVIEKTLYNRRTRQDEPALFVALTFERREVLDSSNIKPMNLIGVDRGENIPAVIALTDPEGCPLSRFKDSLGNPTHILRIGESYKEKQRTIQAKKEVEQRRAGGYSRKYASKAKNLADDMVRNTARDLLYYAVTQDAMLIFENLSRGFGRQGKRTFMAERQYTRMEDWLTAKLAYEGLPSKTYLSKTLAQYTSKTCSNCGFTITSADYDRVLEKLKKTATGWMTTINGKELKVEGQITYYNRYKRQNVVKDLSVELDRLSEESVNNDISSWTKGRSGEALSLLKKRFSHRPVQEKFVCLNCGFETHADEQAALNIARSWLFLRSQEYKKYQTNKTTGNTDKRAFVETWQSFYRKKLKEVWKPAV

SEQ ID NO: 44217 - protein, 979 aa, synthetic construct
  REGION 1..979: note = engineered CasX variant
QEIKRINKIRRRLVKDSNTKKAGKTGPMKTLLVRVMTPDLRERLENLRKKPENIPQPISNTSRANLNKLLTDYTEMKKAILHVYWEEFQKDPVGLMSRVAQPASKKIDQNKLKPEMDEKGNLTTAGFACSQCGQPLFVYKLEQVSEKGKAYTNYFGRCNVAEHEKLILLAQLKPEKDSDEAVTYSLGKFGQRALDFYSIHVTKESTHPVKPLAQIAGNRYASHPVGKALSDACMGTIASFLSKYQDIIIEHQKVVKGNQKRLESLRELAGKENLEYPSVTLPPQPHTKEGVDAYNEVIARVRMWVNLNLWQKLKLSRDDAKPLLRLKGFPSFPLVERQQANEVDWWDMVCNVKKLINEKKEDGKVFWQNLAGYKRQEALRPYLSSEEDREKGKKFARYQLGDLLLHLEKKHGEDWGKVYDEAWERIDKKVEGLSKHIKLEEERRSEDAQSKAALTDWLRAKASFVIEGLKEADKDEFCRCELKLQKWYGDLRGKPFAIEAENSILDISGFSKQYNCAFIWQKDGVKKLNLYLIINYFKGGKLRFKKIKPEAFEANRFYTVINKKSGEIVPMEVNFNFDDPNLIILPLAFGKRQGREFIWNDLLSLETGSLKLANGRVIEKTLYNRRTRQDEPALFVALTFERREVLDSSNIKPMNLIGVDRGENIPAVIALTDPEGCPLSRFKDSLGNPTHILRIGESYKEKQRTIQAKKEVEQRRAGGYSRKYASKAKNLADDMVRNTARDLLYYAVTQDAMLIFENLSRGFGRQGKRTFMAERQYTRMEDWLTAKLAYEGLPSKTYLSKTLAQYTSKTCSNCGFTITSADYDRVLEKLKKTATGWMTTINGKELKVEGQITYYNRYKRQNVVKDLSVELDRLSEESVNNDISSWTKGRSGEALSLLKKRFSHRPVQEKFVCLNCGFETHADEQAALNIARSWLFLRSQEYKKYQTNKTTGNTDKRAFVETWQSFYRKKLKEVWKPAV

SEQ ID NO: 44218 - protein, 979 aa, synthetic construct
  REGION 1..979: note = engineered CasX variant
QEIKRINKIRRRLVKDSNTKKAGKTGPMKTLLVRVMTPDLRERLENLRKKPENIPQPISNTSRANLNKLLTDYTEMKKAILHVYWEEFQKDPVGLMSRVAQPASKKIDQNKLKPEMDEKGNLTTAGFACSQCGQPLFVYKLEQVSEKGKAYTNYFGRCNVAEHEKLILLAQLKPEKDSDEAVTYSLGKFGQRALDFYSIHVTKESTHPVKPLAQIAGNRYASSPVGKALSDACMGTIASFLSKYQDIIIEHQKVVKGNQKRLESLRELAGKENLEYPSVTLPPQPHTKEGVDAYNEVIARVRMWVNLNLWQKLKLSRDDAKPLLRLKGFPSFPLVERQQANEVDWWDMVCNVKKLINEKKEDGKVFWQNLAGYKRQEALRPYLSSEEDREKGKKFARYQLGDLLLHLEKKHGEDWGKVYDEAWERIDKKVEGLSKHIKLEEERRSEDAQSKAALTDWLRAKASFVIEGLKEADKDEFCRCELKLQKWYGDLRGKPFAIEAENSILDISGFSKQYNCAFIWQKDGVKKLNLYLIINYFKGGKLRFKKIKPEAFEANRFYTVINKKSGEIVPMEVNFNFDDPNLIILPLAFGKRQGREFIWNDLLSLETGSLKLANGRVIEKTLYNRRTRQDEPALFVALTFERREVLDSSNIKPMNLIGVDRGENIPAVIALTDPEGCPLSRFKDSLGNPTHILRIGESYKEKQRTIQAKKEVEQRRAGGYSRKYASKAKNLADDMVRNTARDLLYYAVTQDAMLIFENLSRGFGRQGKRTFMAERQYTRMEDWLTAKLAYEGLPSKTYLSKTLAQYTSKTCSNCGFTITSADYDRVLEKLKKTATGWMTTINGKELKVEGQITYYNRYKRQNVVKDLSVELDRLSEESVNNDISSWTKGRSGEALSLLKKRFSHRPVQEKFVCLNCGFETHADEQAALNIARSWLFLRSQEYKKYQTNKTTGNTDKRAFVETWQSFYRKKLKEVWKPAV

SEQ ID NO: 44219 - protein, 979 aa, synthetic construct
  REGION 1..979: note = engineered CasX variant
QEIKRINKIRRRLVKDSNTKKAGKTGPMKTLLVRVMTPDLRERLENLRKKPENIPQPISNTSRANLNKLLTDYTEMKKAILHVYWEEFQKDPVGLMSRVAQPASKKIDQNKLKPEMDEKGNLTTAGFACSQCGQPLFVYKLEQVSEKGKAYTNYFGRCNVAEHEKLILLAQLKPEKDSDEAVTYSLGKFGQRALDFYSIHVTKESTHPVKPLAQIAGNRYASTPVGKALSDACMGTIASFLSKYQDIIIEHQKVVKGNQKRLESLRELAGKENLEYPSVTLPPQPHTKEGVDAYNEVIARVRMWVNLNLWQKLKLSRDDAKPLLRLKGFPSFPLVERQQANEVDWWDMVCNVKKLINEKKEDGKVFWQNLAGYKRQEALRPYLSSEEDREKGKKFARYQLGDLLLHLEKKHGEDWGKVYDEAWERIDKKVEGLSKHIKLEEERRSEDAQSKAALTDWLRAKASFVIEGLKEADKDEFCRCELKLQKWYGDLRGKPFAIEAENSILDISGFSKQYNCAFIWQKDGVKKLNLYLIINYFKGGKLRFKKIKPEAFEANRFYTVINKKSGEIVPMEVNFNFDDPNLIILPLAFGKRQGREFIWNDLLSLETGSLKLANGRVIEKTLYNRRTRQDEPALFVALTFERREVLDSSNIKPMNLIGVDRGENIPAVIALTDPEGCPLSRFKDSLGNPTHILRIGESYKEKQRTIQAKKEVEQRRAGGYSRKYASKAKNLADDMVRNTARDLLYYAVTQDAMLIFENLSRGFGRQGKRTFMAERQYTRMEDWLTAKLAYEGLPSKTYLSKTLAQYTSKTCSNCGFTITSADYDRVLEKLKKTATGWMTTINGKELKVEGQITYYNRYKRQNVVKDLSVELDRLSEESVNNDISSWTKGRSGEALSLLKKRFSHRPVQEKFVCLNCGFETHADEQAALNIARSWLFLRSQEYKKYQTNKTTGNTDKRAFVETWQSFYRKKLKEVWKPAV

SEQ ID NO: 44220 - protein, 979 aa, synthetic construct
  REGION 1..979: note = engineered CasX variant
QEIKRINKIRRRLVKDSNTKKAGKTGPMKTLLVRVMTPDLRERLENLRKKPENIPQPISNTSRANLNKLLTDYTEMKKAILHVYWEEFQKDPVGLMSRVAQPASKKIDQNKLKPEMDEKGNLTTAGFACSQCGQPLFVYKLEQVSEKGKAYTNYFGRCNVAEHEKLILLAQLKPEKDSDEAVTYSLGKFGQRALDFYSIHVTKESTHPVKPLAQIAGNRYASAPVGKALSDACMGTIASFLSKYQDIIIEHQKVVKGNQKRLESLRELAGKENLEYPSVTLPPQPHTKEGVDAYNEVIARVRMWVNLNLWQKLKLSRDDAKPLLRLKGFPSFPLVERQQANEVDWWDMVCNVKKLINEKKEDGKVFWQNLAGYKRQEALRPYLSSEEDREKGKKFARYQLGDLLLHLEKKHGEDWGKVYDEAWERIDKKVEGLSKHIKLEEERRSEDAQSKAALTDWLRAKASFVIEGLKEADKDEFCRCELKLQKWYGDLRGKPFAIEAENSILDISGFSKQYNCAFIWQKDGVKKLNLYLIINYFKGGKLRFKKIKPEAFEANRFYTVINKKSGEIVPMEVNFNFDDPNLIILPLAFGKRQGREFIWNDLLSLETGSLKLANGRVIEKTLYNRRTRQDEPALFVALTFERREVLDSSNIKPMNLIGVDRGENIPAVIALTDPEGCPLSRFKDSLGNPTHILRIGESYKEKQRTIQAKKEVEQRRAGGYSRKYASKAKNLADDMVRNTARDLLYYAVTQDAMLIFENLSRGFGRQGKRTFMAERQYTRMEDWLTAKLAYEGLPSKTYLSKTLAQYTSKTCSNCGFTITSADYDRVLEKLKKTATGWMTTINGKELKVEGQITYYNRYKRQNVVKDLSVELDRLSEESVNNDISSWTKGRSGEALSLLKKRFSHRPVQEKFVCLNCGFETHADEQAALNIARSWLFLRSQEYKKYQTNKTTGNTDKRAFVETWQSFYRKKLKEVWKPAV

SEQ ID NO: 44221 - protein, 979 aa, synthetic construct
  REGION 1..979: note = engineered CasX variant
QEIKRINKIRRRLVKDSNTKKAGKTGPMKTLLVRVMTPDLRERLENLRKKPENIPQPISNTSRANLNKLLTDYTEMKKAILHVYWEEFQKDPVGLMSRVAQPASKKIDQNKLKPEMDEKGNLTTAGFACSQCGQPLFVYKLEQVSEKGKAYTNYFGRCNVAEHEKLILLAQLKPEKDSDEAVTYSLGKFGQRALDFYSIHVTKESTHPVKPLAQIAGNRYASVPVGKALSDACMGTIASFLSKYQDIIIEHQKVVKGNQKRLESLRELAGKENLEYPSVTLPPQPHTKEGVDAYNEVIARVRMWVNLNLWQKLKLSRDDAKPLLRLKGFPSFPLVERQQANEVDWWDMVCNVKKLINEKKEDGKVFWQNLAGYKRQEALRPYLSSEEDREKGKKFARYQLGDLLLHLEKKHGEDWGKVYDEAWERIDKKVEGLSKHIKLEEERRSEDAQSKAALTDWLRAKASFVIEGLKEADKDEFCRCELKLQKWYGDLRGKPFAIEAENSILDISGFSKQYNCAFIWQKDGVKKLNLYLIINYFKGGKLRFKKIKPEAFEANRFYTVINKKSGEIVPMEVNFNFDDPNLIILPLAFGKRQGREFIWNDLLSLETGSLKLANGRVIEKTLYNRRTRQDEPALFVALTFERREVLDSSNIKPMNLIGVDRGENIPAVIALTDPEGCPLSRFKDSLGNPTHILRIGESYKEKQRTIQAKKEVEQRRAGGYSRKYASKAKNLADDMVRNTARDLLYYAVTQDAMLIFENLSRGFGRQGKRTFMAERQYTRMEDWLTAKLAYEGLPSKTYLSKTLAQYTSKTCSNCGFTITSADYDRVLEKLKKTATGWMTTINGKELKVEGQITYYNRYKRQNVVKDLSVELDRLSEESVNNDISSWTKGRSGEALSLLKKRFSHRPVQEKFVCLNCGFETHADEQAALNIARSWLFLRSQEYKKYQTNKTTGNTDKRAFVETWQSFYRKKLKEVWKPAV

SEQ ID NO: 44222 - protein, 979 aa, synthetic construct
  REGION 1..979: note = engineered CasX variant
QEIKRINKIRRRLVKDSNTKKAGKTGPMKTLLVRVMTPDLRERLENLRKKPENIPQPISNTSRANLNKLLTDYTEMKKAILHVYWEEFQKDPVGLMSRVAQPASKKIDQNKLKPEMDEKGNLTTAGFACSQCGQPLFVYKLEQVSEKGKAYTNYFGRCNVAEHEKLIKLAQLKPEKDSDEAVTYSLGKFGQRALDFYSIHVTKESTHPVKPLAQIAGNRYASGPVGKALSDACMGTIASFLSKYQDIIIEHQKVVKGNQKRLESLRELAGKENLEYPSVTLPPQPHTKEGVDAYNEVIARVRMWVNLNLWQKLKLSRDDAKPLLRLKGFPSFPLVERQQANEVDWWDMVCNVKKLINEKKEDGKVFWQNLAGYKRQEALRPYLSSEEDREKGKKFARYQLGDLLLHLEKKHGEDWGKVYDEAWERIDKKVEGLSKHIKLEEERRSEDAQSKAALTDWLRAKASFVIEGLKEADKDEFCRCELKLQKWYGDLRGKPFAIEAENSILDISGFSKQYNCAFIWQKDGVKKLNLYLIINYFKGGKLRFKKIKPEAFEANRFYTVINKKSGEIVPMEVNFNFDDPNLIILPLAFGKRQGREFIWNDLLSLETGSLKLANGRVIEKTLYNRRTRQDEPALFVALTFERREVLDSSNIKPMNLIGVDRGENIPAVIALTDPEGCPLSRFKDSLGNPTHILRIGESYKEKQRTIQAKKEVEQRRAGGYSRKYASKAKNLADDMVRNTARDLLYYAVTQDAMLIFENLSRGFGRQGKRTFMAERQYTRMEDWLTAKLAYEGLPSKTYLSKTLAQYTSKTCSNCGFTITSADYDRVLEKLKKTATGWMTTINGKELKVEGQITYYNRYKRQNVVKDLSVELDRLSEESVNNDISSWTKGRSGEALSLLKKRFSHRPVQEKFVCLNCGFETHADEQAALNIARSWLFLRSQEYKKYQTNKTTGNTDKRAFVETWQSFYRKKLKEVWKPAV

SEQ ID NO: 44223 - protein, 978 aa, synthetic construct
  REGION 1..978: note = engineered CasX variant
QEIKRINKIRRRLVKDSNTKKAGKTGPMKTLLVRVMTPDLRERLENLRKKPENIPQPISNTSRANLNKLLTDYTEMKKAILHVYWEEFQKDPVGLMSRVAQPASKKIDQNKLKPEMDEKGNLTTAGFACSQCGQPLFVYKLEQVSEKGKAYTNYFGRCNVAEHEKLILLAQLKPEKDSDEAVTYSLGKFGQRALDFYSIHVTKESTHPVKPLAQIAGNRYASPVGKALSDACMGTIASFLSKYQDIIIEHQKVVKGNQKRLESLRELAGKENLEYPSVTLPPQPHTKEGVDAYNEVIARVRMWVNLNLWQKLKLSRDDAKPLLRLKGFPSFPLVERQQANEVDWWDMVCNVKKLINEKKEDGKVFWQNLAGYKRQEALRPYLSSEEDREKGKKFARYQLGDLLLHLEKKHGEDWGKVYDEAWERIDKKVEGLSKHIKLEEERRSEDAQSKAALTDWLRAKASFVIEGLKEADKDEFCRCELKLQKWYGDLRGKPFAIEAENSILDISGFSKQYNCAFIWQKDGVKKLNLYLIINYFKGGKLRFKKIKPEAFEANRFYTVINKKSGEIVPMEVNFNFDDPNLIILPLAFGKRQGREFIWNDLLSLETGSLKLANGRVIEKTLYNRRTRQDEPALFVALTFERREVLDSSNIKPMNLIGVDRGENIPAVIALTDPEGCPLSRFKDSLGNPTHILRIGESYKEKQRTIQAKKEVEQRRAGGYSRKYASKAKNLADDMVRNTARDLLYYAVTQDAMLIFENLSRGFGRQGKRTFMAERQYTRMEDWLTAKLAYEGLPSKTYLSKTLAQYTSKTCSNCGFTITSADYDRVLEKLKKTATGWMTTINGKELKVEGQITYYNRYKRQNVVKDLSVELDRLSEESVNNDISSWTKGRSGEALSLLKKRFSHRPVQEKFVCLNCGFETHADEQAALNIARSWLFLRSQEYKKYQTNKTTGNTDKRAFVETWQSFYRKKLKEVWKPAV

SEQ ID NO: 44224 - protein, 979 aa, synthetic construct
  REGION 1..979: note = engineered CasX variant
QEIKRINKIRRRLVKDSNTKKAGKTGPMKTLLVRVMTPDLRERLENLRKKPENIPQPISNTSRANLNKLLTDYTEMKKAILHVYWEEFQKDPVGLMSRVAQPASKKIDQNKLKPEMDEKGNLTTAGFACSQCGQPLFVYKLEQVSEKGKAYTNYFGRCNVAEHEKLILLAQLKPEKDSDEAVTYSLGKFGQRALDFYSIHVTKESTHPVKPLAQIAGNRYASYPVGKALSDACMGTIASFLSKYQDIIIEHQKVVKGNQKRLESLRELAGKENLEYPSVTLPPQPHTKEGVDAYNEVIARVRMWVNLNLWQKLKLSRDDAKPLLRLKGFPSFPLVERQQANEVDWWDMVCNVKKLINEKKEDGKVFWQNLAGYKRQEALRPYLSSEEDRKKGKKFARYQLGDLLLHLEKKHGEDWGKVYDEAWERIDKKVEGLSKHIKLEEERRSEDAQSKAALTDWLRAKASFVIEGLKEADKDEFCRCELKLQKWYGDLRGKPFAIEAENSILDISGFSKQYNCAFIWQKDGVKKLNLYLIINYFKGGKLRFKKIKPEAFEANRFYTVINKKSGEIVIMEVNFNFDDPNLIILPLAFGKRQGREFIWNDLLSLETGSLKLANGRVIEKTLYNRRTRQDEPALFVALTFERREVLDSSNIKPMNLIGVDRGENIPAVIALTDPEGCPLSRFKDSLGNPTHILRIGESYKEKQRTIQAKKEVEQRRAGGYSRKYASKAKNLADDMVRNTARDLLYYAVTQDAMLIFENLSRGFGRQGKRTFMAERQYTRMEDWLTAKLAYEGLPSKTYLSKTLAQYTSKTCSNCGFTITSADYDRVLEKLKKTATGWMTTINGKELKVEGQITYYNRYKRQNVVKDLSVELDRLSEESVNNDISSWTKGRSGEALSLLKKRFSHRPVQEKFVCLNCGFETHADEQAALNIARSWLFLRSQEYKKYQTNKTTGNTDKRAFVETWQSFYRKKLKEVWKPAV

SEQ ID NO: 44225 - protein, 979 aa, synthetic construct
  REGION 1..979: note = engineered CasX variant
QEIKRINKIRRRLVKDSNTKKAGKTGPMKTLLVRVMTPDLRERLENLRKKPENIPQPISNTSRANLNKLLTDYTEMKKAILHVYWEEFQKDPVGLMSRVAQPASKKIDQNKLKPEMDEKGNLTTAGFACSQCGQPLFVYKLEQVSEKGKAYTNYFGRCNVAEHEKLILLAQLKPEKDSDEAVTYSLGKFGQRALDFYSIHVTKESTHPVKPLAQIAGNRYASHPVGKALSDACMGTIASFLSKYQDIIIEHQKVVKGNQKRLESLRELAGKENLEYPSVTLPPQPHTKEGVDAYNEVIARVRMWVNLNLWQKLKLSRDDAKPLLRLKGFPSFPLVERQQANEVDWWDMVCNVKKLINEKKEDGKVFWQNLAGYKRQEALRPYLSSEEDRKKGKKFARYQLGDLLLHLEKKHGEDWGKVYDEAWERIDKKVEGLSKHIKLEEERRSEDAQSKAALTDWLRAKASFVIEGLKEADKDEFCRCELKLQKWYGDLRGKPFAIEAENSILDISGFSKQYNCAFIWQKDGVKKLNLYLIINYFKGGKLRFKKIKPEAFEANRFYTVINKKSGEIVIMEVNFNFDDPNLIILPLAFGKRQGREFIWNDLLSLETGSLKLANGRVIEKTLYNRRTRQDEPALFVALTFERREVLDSSNIKPMNLIGVDRGENIPAVIALTDPEGCPLSRFKDSLGNPTHILRIGESYKEKQRTIQAKKEVEQRRAGGYSRKYASKAKNLADDMVRNTARDLLYYAVTQDAMLIFENLSRGFGRQGKRTFMAERQYTRMEDWLTAKLAYEGLPSKTYLSKTLAQYTSKTCSNCGFTITSADYDRVLEKLKKTATGWMTTINGKELKVEGQITYYNRYKRQNVVKDLSVELDRLSEESVNNDISSWTKGRSGEALSLLKKRFSHRPVQEKFVCLNCGFETHADEQAALNIARSWLFLRSQEYKKYQTNKTTGNTDKRAFVETWQSFYRKKLKEVWKPAV

SEQ ID NO: 44226 - protein, 979 aa, synthetic construct
  REGION 1..979: note = engineered CasX variant
QEIKRINKIRRRLVKDSNTKKAGKTGPMKTLLVRVMTPDLRERLENLRKKPENIPQPISNTSRANLNKLLTDYTEMKKAILHVYWEEFQKDPVGLMSRVAQPASKKIDQNKLKPEMDEKGNLTTAGFACSQCGQPLFVYKLEQVSEKGKAYTNYFGRCNVAEHEKLILLAQLKPEKDSDEAVTYSLGKFGQRALDFYSIHVTKESTHPVKPLAQIAGNRYASSPVGKALSDACMGTIASFLSKYQDIIIEHQKVVKGNQKRLESLRELAGKENLEYPSVTLPPQPHTKEGVDAYNEVIARVRMWVNLNLWQKLKLSRDDAKPLLRLKGFPSFPLVERQQANEVDWWDMVCNVKKLINEKKEDGKVFWQNLAGYKRQEALRPYLSSEEDRKKGKKFARYQLGDLLLHLEKKHGEDWGKVYDEAWERIDKKVEGLSKHIKLEEERRSEDAQSKAALTDWLRAKASFVIEGLKEADKDEFCRCELKLQKWYGDLRGKPFAIEAENSILDISGFSKQYNCAFIWQKDGVKKLNLYLIINYFKGGKLRFKKIKPEAFEANRFYTVINKKSGEIVIMEVNFNFDDPNLIILPLAFGKRQGREFIWNDLLSLETGSLKLANGRVIEKTLYNRRTRQDEPALFVALTFERREVLDSSNIKPMNLIGVDRGENIPAVIALTDPEGCPLSRFKDSLGNPTHILRIGESYKEKQRTIQAKKEVEQRRAGGYSRKYASKAKNLADDMVRNTARDLLYYAVTQDAMLIFENLSRGFGRQGKRTFMAERQYTRMEDWLTAKLAYEGLPSKTYLSKTLAQYTSKTCSNCGFTITSADYDRVLEKLKKTATGWMTTINGKELKVEGQITYYNRYKRQNVVKDLSVELDRLSEESVNNDISSWTKGRSGEALSLLKKRFSHRPVQEKFVCLNCGFETHADEQAALNIARSWLFLRSQEYKKYQTNKTTGNTDKRAFVETWQSFYRKKLKEVWKPAV

SEQ ID NO: 44227 - protein, 979 aa, synthetic construct
  REGION 1..979: note = engineered CasX variant
QEIKRINKIRRRLVKDSNTKKAGKTGPMKTLLVRVMTPDLRERLENLRKKPENIPQPISNTSRANLNKLLTDYTEMKKAILHVYWEEFQKDPVGLMSRVAQPASKKIDQNKLKPEMDEKGNLTTAGFACSQCGQPLFVYKLEQVSEKGKAYTNYFGRCNVAEHEKLILLAQLKPEKDSDEAVTYSLGKFGQRALDFYSIHVTKESTHPVKPLAQIAGNRYASTPVGKALSDACMGTIASFLSKYQDIIIEHQKVVKGNQKRLESLRELAGKENLEYPSVTLPPQPHTKEGVDAYNEVIARVRMWVNLNLWQKLKLSRDDAKPLLRLKGFPSFPLVERQQANEVDWWDMVCNVKKLINEKKEDGKVFWQNLAGYKRQEALRPYLSSEEDRKKGKKFARYQLGDLLLHLEKKHGEDWGKVYDEAWERIDKKVEGLSKHIKLEEERRSEDAQSKAALTDWLRAKASFVIEGLKEADKDEFCRCELKLQKWYGDLRGKPFAIEAENSILDISGFSKQYNCAFIWQKDGVKKLNLYLIINYFKGGKLRFKKIKPEAFEANRFYTVINKKSGEIVIMEVNFNFDDPNLIILPLAFGKRQGREFIWNDLLSLETGSLKLANGRVIEKTLYNRRTRQDEPALFVALTFERREVLDSSNIKPMNLIGVDRGENIPAVIALTDPEGCPLSRFKDSLGNPTHILRIGESYKEKQRTIQAKKEVEQRRAGGYSRKYASKAKNLADDMVRNTARDLLYYAVTQDAMLIFENLSRGFGRQGKRTFMAERQYTRMEDWLTAKLAYEGLPSKTYLSKTLAQYTSKTCSNCGFTITSADYDRVLEKLKKTATGWMTTINGKELKVEGQITYYNRYKRQNVVKDLSVELDRLSEESVNNDISSWTKGRSGEALSLLKKRFSHRPVQEKFVCLNCGFETHADEQAALNIARSWLFLRSQEYKKYQTNKTTGNTDKRAFVETWQSFYRKKLKEVWKPAV

SEQ ID NO: 44228 - protein, 979 aa, synthetic construct
  REGION 1..979: note = engineered CasX variant
QEIKRINKIRRRLVKDSNTKKAGKTGPMKTLLVRVMTPDLRERLENLRKKPENIPQPISNTSRANLNKLLTDYTEMKKAILHVYWEEFQKDPVGLMSRVAQPASKKIDQNKLKPEMDEKGNLTTAGFACSQCGQPLFVYKLEQVSEKGKAYTNYFGRCNVAEHEKLILLAQLKPEKDSDEAVTYSLGKFGQRALDFYSIHVTKESTHPVKPLAQIAGNRYASAPVGKALSDACMGTIASFLSKYQDIIIEHQKVVKGNQKRLESLRELAGKENLEYPSVTLPPQPHTKEGVDAYNEVIARVRMWVNLNLWQKLKLSRDDAKPLLRLKGFPSFPLVERQQANEVDWWDMVCNVKKLINEKKEDGKVFWQNLAGYKRQEALRPYLSSEEDRKKGKKFARYQLGDLLLHLEKKHGEDWGKVYDEAWERIDKKVEGLSKHIKLEEERRSEDAQSKAALTDWLRAKASFVIEGLKEADKDEFCRCELKLQKWYGDLRGKPFAIEAENSILDISGFSKQYNCAFIWQKDGVKKLNLYLIINYFKGGKLRFKKIKPEAFEANRFYTVINKKSGEIVIMEVNFNFDDPNLIILPLAFGKRQGREFIWNDLLSLETGSLKLANGRVIEKTLYNRRTRQDEPALFVALTFERREVLDSSNIKPMNLIGVDRGENIPAVIALTDPEGCPLSRFKDSLGNPTHILRIGESYKEKQRTIQAKKEVEQRRAGGYSRKYASKAKNLADDMVRNTARDLLYYAVTQDAMLIFENLSRGFGRQGKRTFMAERQYTRMEDWLTAKLAYEGLPSKTYLSKTLAQYTSKTCSNCGFTITSADYDRVLEKLKKTATGWMTTINGKELKVEGQITYYNRYKRQNVVKDLSVELDRLSEESVNNDISSWTKGRSGEALSLLKKRFSHRPVQEKFVCLNCGFETHADEQAALNIARSWLFLRSQEYKKYQTNKTTGNTDKRAFVETWQSFYRKKLKEVWKPAV

SEQ ID NO: 44229 - protein, 979 aa, synthetic construct
  REGION 1..979: note = engineered CasX variant
QEIKRINKIRRRLVKDSNTKKAGKTGPMKTLLVRVMTPDLRERLENLRKKPENIPQPISNTSRANLNKLLTDYTEMKKAILHVYWEEFQKDPVGLMSRVAQPASKKIDQNKLKPEMDEKGNLTTAGFACSQCGQPLFVYKLEQVSEKGKAYTNYFGRCNVAEHEKLILLAQLKPEKDSDEAVTYSLGKFGQRALDFYSIHVTKESTHPVKPLAQIAGNRYASVPVGKALSDACMGTIASFLSKYQDIIIEHQKVVKGNQKRLESLRELAGKENLEYPSVTLPPQPHTKEGVDAYNEVIARVRMWVNLNLWQKLKLSRDDAKPLLRLKGFPSFPLVERQQANEVDWWDMVCNVKKLINEKKEDGKVFWQNLAGYKRQEALRPYLSSEEDRKKGKKFARYQLGDLLLHLEKKHGEDWGKVYDEAWERIDKKVEGLSKHIKLEEERRSEDAQSKAALTDWLRAKASFVIEGLKEADKDEFCRCELKLQKWYGDLRGKPFAIEAENSILDISGFSKQYNCAFIWQKDGVKKLNLYLIINYFKGGKLRFKKIKPEAFEANRFYTVINKKSGEIVIMEVNFNFDDPNLIILPLAFGKRQGREFIWNDLLSLETGSLKLANGRVIEKTLYNRRTRQDEPALFVALTFERREVLDSSNIKPMNLIGVDRGENIPAVIALTDPEGCPLSRFKDSLGNPTHILRIGESYKEKQRTIQAKKEVEQRRAGGYSRKYASKAKNLADDMVRNTARDLLYYAVTQDAMLIFENLSRGFGRQGKRTFMAERQYTRMEDWLTAKLAYEGLPSKTYLSKTLAQYTSKTCSNCGFTITSADYDRVLEKLKKTATGWMTTINGKELKVEGQITYYNRYKRQNVVKDLSVELDRLSEESVNNDISSWTKGRSGEALSLLKKRFSHRPVQEKFVCLNCGFETHADEQAALNIARSWLFLRSQEYKKYQTNKTTGNTDKRAFVETWQSFYRKKLKEVWKPAV

SEQ ID NO: 44230 - protein, 979 aa, synthetic construct
  REGION 1..979: note = engineered CasX variant
QEIKRINKIRRRLVKDSNTKKAGKTGPMKTLLVRVMTPDLRERLENLRKKPENIPQPISNTSRANLNKLLTDYTEMKKAILHVYWEEFQKDPVGLMSRVAQPASKKIDQNKLKPEMDEKGNLTTAGFACSQCGQPLFVYKLEQVSEKGKAYTNYFGRCNVAEHEKLIKLAQLKPEKDSDEAVTYSLGKFGQRALDFYSIHVTKESTHPVKPLAQIAGNRYASGPVGKALSDACMGTIASFLSKYQDIIIEHQKVVKGNQKRLESLRELAGKENLEYPSVTLPPQPHTKEGVDAYNEVIARVRMWVNLNLWQKLKLSRDDAKPLLRLKGFPSFPLVERQQANEVDWWDMVCNVKKLINEKKEDGKVFWQNLAGYKRQEALRPYLSSEEDRKKGKKFARYQLGDLLLHLEKKHGEDWGKVYDEAWERIDKKVEGLSKHIKLEEERRSEDAQSKAALTDWLRAKASFVIEGLKEADKDEFCRCELKLQKWYGDLRGKPFAIEAENSILDISGFSKQYNCAFIWQKDGVKKLNLYLIINYFKGGKLRFKKIKPEAFEANRFYTVINKKSGEIVIMEVNFNFDDPNLIILPLAFGKRQGREFIWNDLLSLETGSLKLANGRVIEKTLYNRRTRQDEPALFVALTFERREVLDSSNIKPMNLIGVDRGENIPAVIALTDPEGCPLSRFKDSLGNPTHILRIGESYKEKQRTIQAKKEVEQRRAGGYSRKYASKAKNLADDMVRNTARDLLYYAVTQDAMLIFENLSRGFGRQGKRTFMAERQYTRMEDWLTAKLAYEGLPSKTYLSKTLAQYTSKTCSNCGFTITSADYDRVLEKLKKTATGWMTTINGKELKVEGQITYYNRYKRQNVVKDLSVELDRLSEESVNNDISSWTKGRSGEALSLLKKRFSHRPVQEKFVCLNCGFETHADEQAALNIARSWLFLRSQEYKKYQTNKTTGNTDKRAFVETWQSFYRKKLKEVWKPAV

SEQ ID NO: 44231 - protein, 978 aa, synthetic construct
  REGION 1..978: note = engineered CasX variant
QEIKRINKIRRRLVKDSNTKKAGKTGPMKTLLVRVMTPDLRERLENLRKKPENIPQPISNTSRANLNKLLTDYTEMKKAILHVYWEEFQKDPVGLMSRVAQPASKKIDQNKLKPEMDEKGNLTTAGFACSQCGQPLFVYKLEQVSEKGKAYTNYFGRCNVAEHEKLILLAQLKPEKDSDEAVTYSLGKFGQRALDFYSIHVTKESTHPVKPLAQIAGNRYASPVGKALSDACMGTIASFLSKYQDIIIEHQKVVKGNQKRLESLRELAGKENLEYPSVTLPPQPHTKEGVDAYNEVIARVRMWVNLNLWQKLKLSRDDAKPLLRLKGFPSFPLVERQQANEVDWWDMVCNVKKLINEKKEDGKVFWQNLAGYKRQEALRPYLSSEEDRKKGKKFARYQLGDLLLHLEKKHGEDWGKVYDEAWERIDKKVEGLSKHIKLEEERRSEDAQSKAALTDWLRAKASFVIEGLKEADKDEFCRCELKLQKWYGDLRGKPFAIEAENSILDISGFSKQYNCAFIWQKDGVKKLNLYLIINYFKGGKLRFKKIKPEAFEANRFYTVINKKSGEIVIMEVNFNFDDPNLIILPLAFGKRQGREFIWNDLLSLETGSLKLANGRVIEKTLYNRRTRQDEPALFVALTFERREVLDSSNIKPMNLIGVDRGENIPAVIALTDPEGCPLSRFKDSLGNPTHILRIGESYKEKQRTIQAKKEVEQRRAGGYSRKYASKAKNLADDMVRNTARDLLYYAVTQDAMLIFENLSRGFGRQGKRTFMAERQYTRMEDWLTAKLAYEGLPSKTYLSKTLAQYTSKTCSNCGFTITSADYDRVLEKLKKTATGWMTTINGKELKVEGQITYYNRYKRQNVVKDLSVELDRLSEESVNNDISSWTKGRSGEALSLLKKRFSHRPVQEKFVCLNCGFETHADEQAALNIARSWLFLRSQEYKKYQTNKTTGNTDKRAFVETWQSFYRKKLKEVWKPAV

SEQ ID NO: 44232 - protein, 979 aa, synthetic construct
  REGION 1..979: note = engineered CasX variant
QEIKRINKIRRRLVKDSNTKKAGKTGPMKTLLVRVMTPDLRERLENLRKKPENIPQPISNTSRANLNKLLTDYTEMKKAILHVYWEEFQKDPVGLMSRVAQPASKKIDQNKLKPEMDEKGNLTTAGFACSQCGQPLFVYKLEQVSEKGKAYTNYFGRCNVAEHEKLILLAQLKPEKDSDEAVTYSLGKFGQRALDFYSIHVTKESTHPVKPLAQIAGNRYASYPVGKALSGACMGTIASFLSKYQDIIIEHQKVVKGNQKRLESLRELAGKENLEYPSVTLPPQPHTKEGVDAYNEVIARVRMWVNLNLWQKLKLSRDDAKPLLRLKGFPSFPLVERQANAEVDWWDMVCNVKKLINEKKEDGKVFWQNLAGYKRQEALRPYLSSEEDRKKGKKFARYQLGDLLLHLEKKHGEDWGKVYDEAWERIDKKVEGLSKHIKLEEERRSEDAQSKAALTDWLRAKASFVIEGLKEADKDEFCRCELKLQKWYGDLRGKPFAIEAENSILDISGFSKQYNCAFIWQKDGVKKLNLYLIINYFKGGKLRFKKIKPEAFEANRFYTVINKKSGEIVPMEVNFNFDDPNLIILPLAFGKRQGREFIWNDLLSLETGSLKLANGRVIEKTLYNRRTRQDEPALFVALTFERREVLDSSNIKPMNLIGVDRGENIPAVIALTDPEGCPLSRFKDSLGNPTHILRIGESYKEKQRTIQAKKEVEQRRAGGYSRKYASKAKNLADDMVRNTARDLLYYAVTQDAMLIFENLSRGFGRQGKRTFMAERQYTRMEDWLTAKLAYEGLPSKTYLSKTLAQYTSKTCSNCGFTITSADYDRVLEKLKKTATGWMTTINGKELKVEGQITYYNRYKRQNVVKDLSVELDRLSEESVNNDISSWTKGRSGEALSLLKKRFSHRPVQEKFVCLNCGFETHADEQAALNIARSWLFLRSQEYKKYQTNKTTGNTDKRAFVETWQSFYRKKLKEVWKPAV

SEQ ID NO: 44233 - protein, 979 aa, synthetic construct
  REGION 1..979: note = engineered CasX variant
QEIKRINKIRRRLVKDSNTKKAGKTGPMKTLLVRVMTPDLRERLENLRKKPENIPQPISNTSRANLNKLLTDYTEMKKAILHVYWEEFQKDPVGLMSRVAQPASKKIDQNKLKPEMDEKGNLTTAGFACSQCGQPLFVYKLEQVSEKGKAYTNYFGRCNVAEHEKLILLAQLKPEKDSDEAVTYSLGKFGQRALDFYSIHVTKESTHPVKPLAQIAGNRYASHPVGKALSGACMGTIASFLSKYQDIIIEHQKVVKGNQKRLESLRELAGKENLEYPSVTLPPQPHTKEGVDAYNEVIARVRMWVNLNLWQKLKLSRDDAKPLLRLKGFPSFPLVERQANAEVDWWDMVCNVKKLINEKKEDGKVFWQNLAGYKRQEALRPYLSSEEDRKKGKKFARYQLGDLLLHLEKKHGEDWGKVYDEAWERIDKKVEGLSKHIKLEEERRSEDAQSKAALTDWLRAKASFVIEGLKEADKDEFCRCELKLQKWYGDLRGKPFAIEAENSILDISGFSKQYNCAFIWQKDGVKKLNLYLIINYFKGGKLRFKKIKPEAFEANRFYTVINKKSGEIVPMEVNFNFDDPNLIILPLAFGKRQGREFIWNDLLSLETGSLKLANGRVIEKTLYNRRTRQDEPALFVALTFERREVLDSSNIKPMNLIGVDRGENIPAVIALTDPEGCPLSRFKDSLGNPTHILRIGESYKEKQRTIQAKKEVEQRRAGGYSRKYASKAKNLADDMVRNTARDLLYYAVTQDAMLIFENLSRGFGRQGKRTFMAERQYTRMEDWLTAKLAYEGLPSKTYLSKTLAQYTSKTCSNCGFTITSADYDRVLEKLKKTATGWMTTINGKELKVEGQITYYNRYKRQNVVKDLSVELDRLSEESVNNDISSWTKGRSGEALSLLKKRFSHRPVQEKFVCLNCGFETHADEQAALNIARSWLFLRSQEYKKYQTNKTTGNTDKRAFVETWQSFYRKKLKEVWKPAV

SEQ ID NO: 44234 - protein, 979 aa, synthetic construct
  REGION 1..979: note = engineered CasX variant
QEIKRINKIRRRLVKDSNTKKAGKTGPMKTLLVRVMTPDLRERLENLRKKPENIPQPISNTSRANLNKLLTDYTEMKKAILHVYWEEFQKDPVGLMSRVAQPASKKIDQNKLKPEMDEKGNLTTAGFACSQCGQPLFVYKLEQVSEKGKAYTNYFGRCNVAEHEKLILLAQLKPEKDSDEAVTYSLGKFGQRALDFYSIHVTKESTHPVKPLAQIAGNRYASSPVGKALSGACMGTIASFLSKYQDIIIEHQKVVKGNQKRLESLRELAGKENLEYPSVTLPPQPHTKEGVDAYNEVIARVRMWVNLNLWQKLKLSRDDAKPLLRLKGFPSFPLVERQANAEVDWWDMVCNVKKLINEKKEDGKVFWQNLAGYKRQEALRPYLSSEEDRKKGKKFARYQLGDLLLHLEKKHGEDWGKVYDEAWERIDKKVEGLSKHIKLEEERRSEDAQSKAALTDWLRAKASFVIEGLKEADKDEFCRCELKLQKWYGDLRGKPFAIEAENSILDISGFSKQYNCAFIWQKDGVKKLNLYLIINYFKGGKLRFKKIKPEAFEANRFYTVINKKSGEIVPMEVNFNFDDPNLIILPLAFGKRQGREFIWNDLLSLETGSLKLANGRVIEKTLYNRRTRQDEPALFVALTFERREVLDSSNIKPMNLIGVDRGENIPAVIALTDPEGCPLSRFKDSLGNPTHILRIGESYKEKQRTIQAKKEVEQRRAGGYSRKYASKAKNLADDMVRNTARDLLYYAVTQDAMLIFENLSRGFGRQGKRTFMAERQYTRMEDWLTAKLAYEGLPSKTYLSKTLAQYTSKTCSNCGFTITSADYDRVLEKLKKTATGWMTTINGKELKVEGQITYYNRYKRQNVVKDLSVELDRLSEESVNNDISSWTKGRSGEALSLLKKRFSHRPVQEKFVCLNCGFETHADEQAALNIARSWLFLRSQEYKKYQTNKTTGNTDKRAFVETWQSFYRKKLKEVWKPAV

SEQ ID NO: 44235 - protein, 979 aa, synthetic construct
  REGION 1..979: note = engineered CasX variant
QEIKRINKIRRRLVKDSNTKKAGKTGPMKTLLVRVMTPDLRERLENLRKKPENIPQPISNTSRANLNKLLTDYTEMKKAILHVYWEEFQKDPVGLMSRVAQPASKKIDQNKLKPEMDEKGNLTTAGFACSQCGQPLFVYKLEQVSEKGKAYTNYFGRCNVAEHEKLILLAQLKPEKDSDEAVTYSLGKFGQRALDFYSIHVTKESTHPVKPLAQIAGNRYASTPVGKALSGACMGTIASFLSKYQDIIIEHQKVVKGNQKRLESLRELAGKENLEYPSVTLPPQPHTKEGVDAYNEVIARVRMWVNLNLWQKLKLSRDDAKPLLRLKGFPSFPLVERQANAEVDWWDMVCNVKKLINEKKEDGKVFWQNLAGYKRQEALRPYLSSEEDRKKGKKFARYQLGDLLLHLEKKHGEDWGKVYDEAWERIDKKVEGLSKHIKLEEERRSEDAQSKAALTDWLRAKASFVIEGLKEADKDEFCRCELKLQKWYGDLRGKPFAIEAENSILDISGFSKQYNCAFIWQKDGVKKLNLYLIINYFKGGKLRFKKIKPEAFEANRFYTVINKKSGEIVPMEVNFNFDDPNLIILPLAFGKRQGREFIWNDLLSLETGSLKLANGRVIEKTLYNRRTRQDEPALFVALTFERREVLDSSNIKPMNLIGVDRGENIPAVIALTDPEGCPLSRFKDSLGNPTHILRIGESYKEKQRTIQAKKEVEQRRAGGYSRKYASKAKNLADDMVRNTARDLLYYAVTQDAMLIFENLSRGFGRQGKRTFMAERQYTRMEDWLTAKLAYEGLPSKTYLSKTLAQYTSKTCSNCGFTITSADYDRVLEKLKKTATGWMTTINGKELKVEGQITYYNRYKRQNVVKDLSVELDRLSEESVNNDISSWTKGRSGEALSLLKKRFSHRPVQEKFVCLNCGFETHADEQAALNIARSWLFLRSQEYKKYQTNKTTGNTDKRAFVETWQSFYRKKLKEVWKPAV

SEQ ID NO: 44236 - protein, 979 aa, synthetic construct
  REGION 1..979: note = engineered CasX variant
QEIKRINKIRRRLVKDSNTKKAGKTGPMKTLLVRVMTPDLRERLENLRKKPENIPQPISNTSRANLNKLLTDYTEMKKAILHVYWEEFQKDPVGLMSRVAQPASKKIDQNKLKPEMDEKGNLTTAGFACSQCGQPLFVYKLEQVSEKGKAYTNYFGRCNVAEHEKLILLAQLKPEKDSDEAVTYSLGKFGQRALDFYSIHVTKESTHPVKPLAQIAGNRYASAPVGKALSGACMGTIASFLSKYQDIIIEHQKVVKGNQKRLESLRELAGKENLEYPSVTLPPQPHTKEGVDAYNEVIARVRMWVNLNLWQKLKLSRDDAKPLLRLKGFPSFPLVERQANAEVDWWDMVCNVKKLINEKKEDGKVFWQNLAGYKRQEALRPYLSSEEDRKKGKKFARYQLGDLLLHLEKKHGEDWGKVYDEAWERIDKKVEGLSKHIKLEEERRSEDAQSKAALTDWLRAKASFVIEGLKEADKDEFCRCELKLQKWYGDLRGKPFAIEAENSILDISGFSKQYNCAFIWQKDGVKKLNLYLIINYFKGGKLRFKKIKPEAFEANRFYTVINKKSGEIVPMEVNFNFDDPNLIILPLAFGKRQGREFIWNDLLSLETGSLKLANGRVIEKTLYNRRTRQDEPALFVALTFERREVLDSSNIKPMNLIGVDRGENIPAVIALTDPEGCPLSRFKDSLGNPTHILRIGESYKEKQRTIQAKKEVEQRRAGGYSRKYASKAKNLADDMVRNTARDLLYYAVTQDAMLIFENLSRGFGRQGKRTFMAERQYTRMEDWLTAKLAYEGLPSKTYLSKTLAQYTSKTCSNCGFTITSADYDRVLEKLKKTATGWMTTINGKELKVEGQITYYNRYKRQNVVKDLSVELDRLSEESVNNDISSWTKGRSGEALSLLKKRFSHRPVQEKFVCLNCGFETHADEQAALNIARSWLFLRSQEYKKYQTNKTTGNTDKRAFVETWQSFYRKKLKEVWKPAV

SEQ ID NO: 44237 - protein, 979 aa, synthetic construct
  REGION 1..979: note = engineered CasX variant
QEIKRINKIRRRLVKDSNTKKAGKTGPMKTLLVRVMTPDLRERLENLRKKPENIPQPISNTSRANLNKLLTDYTEMKKAILHVYWEEFQKDPVGLMSRVAQPASKKIDQNKLKPEMDEKGNLTTAGFACSQCGQPLFVYKLEQVSEKGKAYTNYFGRCNVAEHEKLILLAQLKPEKDSDEAVTYSLGKFGQRALDFYSIHVTKESTHPVKPLAQIAGNRYASVPVGKALSGACMGTIASFLSKYQDIIIEHQKVVKGNQKRLESLRELAGKENLEYPSVTLPPQPHTKEGVDAYNEVIARVRMWVNLNLWQKLKLSRDDAKPLLRLKGFPSFPLVERQANAEVDWWDMVCNVKKLINEKKEDGKVFWQNLAGYKRQEALRPYLSSEEDRKKGKKFARYQLGDLLLHLEKKHGEDWGKVYDEAWERIDKKVEGLSKHIKLEEERRSEDAQSKAALTDWLRAKASFVIEGLKEADKDEFCRCELKLQKWYGDLRGKPFAIEAENSILDISGFSKQYNCAFIWQKDGVKKLNLYLIINYFKGGKLRFKKIKPEAFEANRFYTVINKKSGEIVPMEVNFNFDDPNLIILPLAFGKRQGREFIWNDLLSLETGSLKLANGRVIEKTLYNRRTRQDEPALFVALTFERREVLDSSNIKPMNLIGVDRGENIPAVIALTDPEGCPLSRFKDSLGNPTHILRIGESYKEKQRTIQAKKEVEQRRAGGYSRKYASKAKNLADDMVRNTARDLLYYAVTQDAMLIFENLSRGFGRQGKRTFMAERQYTRMEDWLTAKLAYEGLPSKTYLSKTLAQYTSKTCSNCGFTITSADYDRVLEKLKKTATGWMTTINGKELKVEGQITYYNRYKRQNVVKDLSVELDRLSEESVNNDISSWTKGRSGEALSLLKKRFSHRPVQEKFVCLNCGFETHADEQAALNIARSWLFLRSQEYKKYQTNKTTGNTDKRAFVETWQSFYRKKLKEVWKPAV

SEQ ID NO: 44238 - protein, 979 aa, synthetic construct
  REGION 1..979: note = engineered CasX variant
QEIKRINKIRRRLVKDSNTKKAGKTGPMKTLLVRVMTPDLRERLENLRKKPENIPQPISNTSRANLNKLLTDYTEMKKAILHVYWEEFQKDPVGLMSRVAQPASKKIDQNKLKPEMDEKGNLTTAGFACSQCGQPLFVYKLEQVSEKGKAYTNYFGRCNVAEHEKLIKLAQLKPEKDSDEAVTYSLGKFGQRALDFYSIHVTKESTHPVKPLAQIAGNRYASGPVGKALSGACMGTIASFLSKYQDIIIEHQKVVKGNQKRLESLRELAGKENLEYPSVTLPPQPHTKEGVDAYNEVIARVRMWVNLNLWQKLKLSRDDAKPLLRLKGFPSFPLVERQANAEVDWWDMVCNVKKLINEKKEDGKVFWQNLAGYKRQEALRPYLSSEEDRKKGKKFARYQLGDLLLHLEKKHGEDWGKVYDEAWERIDKKVEGLSKHIKLEEERRSEDAQSKAALTDWLRAKASFVIEGLKEADKDEFCRCELKLQKWYGDLRGKPFAIEAENSILDISGFSKQYNCAFIWQKDGVKKLNLYLIINYFKGGKLRFKKIKPEAFEANRFYTVINKKSGEIVPMEVNFNFDDPNLIILPLAFGKRQGREFIWNDLLSLETGSLKLANGRVIEKTLYNRRTRQDEPALFVALTFERREVLDSSNIKPMNLIGVDRGENIPAVIALTDPEGCPLSRFKDSLGNPTHILRIGESYKEKQRTIQAKKEVEQRRAGGYSRKYASKAKNLADDMVRNTARDLLYYAVTQDAMLIFENLSRGFGRQGKRTFMAERQYTRMEDWLTAKLAYEGLPSKTYLSKTLAQYTSKTCSNCGFTITSADYDRVLEKLKKTATGWMTTINGKELKVEGQITYYNRYKRQNVVKDLSVELDRLSEESVNNDISSWTKGRSGEALSLLKKRFSHRPVQEKFVCLNCGFETHADEQAALNIARSWLFLRSQEYKKYQTNKTTGNTDKRAFVETWQSFYRKKLKEVWKPAV

SEQ ID NO: 44239 - protein, 978 aa, synthetic construct
  REGION 1..978: note = engineered CasX variant
QEIKRINKIRRRLVKDSNTKKAGKTGPMKTLLVRVMTPDLRERLENLRKKPENIPQPISNTSRANLNKLLTDYTEMKKAILHVYWEEFQKDPVGLMSRVAQPASKKIDQNKLKPEMDEKGNLTTAGFACSQCGQPLFVYKLEQVSEKGKAYTNYFGRCNVAEHEKLILLAQLKPEKDSDEAVTYSLGKFGQRALDFYSIHVTKESTHPVKPLAQIAGNRYASPVGKALSGACMGTIASFLSKYQDIIIEHQKVVKGNQKRLESLRELAGKENLEYPSVTLPPQPHTKEGVDAYNEVIARVRMWVNLNLWQKLKLSRDDAKPLLRLKGFPSFPLVERQANAEVDWWDMVCNVKKLINEKKEDGKVFWQNLAGYKRQEALRPYLSSEEDRKKGKKFARYQLGDLLLHLEKKHGEDWGKVYDEAWERIDKKVEGLSKHIKLEEERRSEDAQSKAALTDWLRAKASFVIEGLKEADKDEFCRCELKLQKWYGDLRGKPFAIEAENSILDISGFSKQYNCAFIWQKDGVKKLNLYLIINYFKGGKLRFKKIKPEAFEANRFYTVINKKSGEIVPMEVNFNFDDPNLIILPLAFGKRQGREFIWNDLLSLETGSLKLANGRVIEKTLYNRRTRQDEPALFVALTFERREVLDSSNIKPMNLIGVDRGENIPAVIALTDPEGCPLSRFKDSLGNPTHILRIGESYKEKQRTIQAKKEVEQRRAGGYSRKYASKAKNLADDMVRNTARDLLYYAVTQDAMLIFENLSRGFGRQGKRTFMAERQYTRMEDWLTAKLAYEGLPSKTYLSKTLAQYTSKTCSNCGFTITSADYDRVLEKLKKTATGWMTTINGKELKVEGQITYYNRYKRQNVVKDLSVELDRLSEESVNNDISSWTKGRSGEALSLLKKRFSHRPVQEKFVCLNCGFETHADEQAALNIARSWLFLRSQEYKKYQTNKTTGNTDKRAFVETWQSFYRKKLKEVWKPAV

SEQ ID NO: 44240 - protein, 979 aa, synthetic construct
  REGION 1..979: note = engineered CasX variant
QEIKRINKIRRRLVKDSNTKKAGKTGPMKTLLVRVMTPDLRERLENLRKKPENIPQPISNTSRANLNKLLTDYTEMKKAILHVYWEEFQKDPVGLMSRVAQPASKKIDQNKLKPEMDEKGNLTTAGFACSQCGQPLFVYKLEQVSEKGKAYTNYFGRCNVAEHEKLILLAQLKPEKDSDEAVTYSLGKFGQRALDFYSIHVTKESTHPVKPLAQIAGNRYASYPVGKALSDACMGTIASFLSKYQDIIIEHQKVVKGNQKRLESLRELAGKENLEYPSVTLPPQPHTKEGVDAYNEVIARVRMWVNLNLWQKLKLSRDDAKPLLRLKNFPSFPLVERQANAEVDWWDMVCNVKKLINEKKEDGKVFWQNLAGYKRQEALRPYLSSEEDRKKGKKFARYQLGDLLLHLEKKHGEDWGKVYDEAWERIDKKVEGLSKHIKLEEERRSEDAQSKAALTDWLRAKASFVIEGLKEADKDEFCRCELKLQKWYGDLRGKPFAIEAENSILDISGFSKQYNCAFIWQKDGVKKLNLYLIINYFKGGKLRFKKIKPEAFEANRFYTVINKKSGEIVPMEVNFNFDDPNLIILPLAFGKRQGREFIWNDLLSLETGSLKLANGRVIEKTLYNRRTRQDEPALFVALTFERREVLDSSNIKPMNLIGVDRGENIPAVIALTDPEGCPLSRFKDSLGNPTHILRIGESYKEKQRTIQAKKEVEQRRAGGYSRKYASKAKNLADDMVRNTARDLLYYAVTQDAMLIFENLSRGFGRQGKRTFMAERQYTRMEDWLTAKLAYEGLPSKTYLSKTLAQYTSKTCSNCGFTITSADYDRVLEKLKKTATGWMTTINGKELKVEGQITYYNRYKRQNVVKDLSVELDRLSEESVNNDISSWTKGRSGEALSLLKKRFSHRPVQEKFVCLNCGFETHADEQAALNIARSWLFLRSQEYKKYQTNKTTGNTDKRAFVETWQSFYRKKLKEVWKPAV

SEQ ID NO: 44241 - protein, 979 aa, synthetic construct
  REGION 1..979: note = engineered CasX variant
QEIKRINKIRRRLVKDSNTKKAGKTGPMKTLLVRVMTPDLRERLENLRKKPENIPQPISNTSRANLNKLLTDYTEMKKAILHVYWEEFQKDPVGLMSRVAQPASKKIDQNKLKPEMDEKGNLTTAGFACSQCGQPLFVYKLEQVSEKGKAYTNYFGRCNVAEHEKLILLAQLKPEKDSDEAVTYSLGKFGQRALDFYSIHVTKESTHPVKPLAQIAGNRYASHPVGKALSDACMGTIASFLSKYQDIIIEHQKVVKGNQKRLESLRELAGKENLEYPSVTLPPQPHTKEGVDAYNEVIARVRMWVNLNLWQKLKLSRDDAKPLLRLKNFPSFPLVERQANAEVDWWDMVCNVKKLINEKKEDGKVFWQNLAGYKRQEALRPYLSSEEDRKKGKKFARYQLGDLLLHLEKKHGEDWGKVYDEAWERIDKKVEGLSKHIKLEEERRSEDAQSKAALTDWLRAKASFVIEGLKEADKDEFCRCELKLQKWYGDLRGKPFAIEAENSILDISGFSKQYNCAFIWQKDGVKKLNLYLIINYFKGGKLRFKKIKPEAFEANRFYTVINKKSGEIVPMEVNFNFDDPNLIILPLAFGKRQGREFIWNDLLSLETGSLKLANGRVIEKTLYNRRTRQDEPALFVALTFERREVLDSSNIKPMNLIGVDRGENIPAVIALTDPEGCPLSRFKDSLGNPTHILRIGESYKEKQRTIQAKKEVEQRRAGGYSRKYASKAKNLADDMVRNTARDLLYYAVTQDAMLIFENLSRGFGRQGKRTFMAERQYTRMEDWLTAKLAYEGLPSKTYLSKTLAQYTSKTCSNCGFTITSADYDRVLEKLKKTATGWMTTINGKELKVEGQITYYNRYKRQNVVKDLSVELDRLSEESVNNDISSWTKGRSGEALSLLKKRFSHRPVQEKFVCLNCGFETHADEQAALNIARSWLFLRSQEYKKYQTNKTTGNTDKRAFVETWQSFYRKKLKEVWKPAV

SEQ ID NO: 44242 - protein, 979 aa, synthetic construct
  REGION 1..979: note = engineered CasX variant
QEIKRINKIRRRLVKDSNTKKAGKTGPMKTLLVRVMTPDLRERLENLRKKPENIPQPISNTSRANLNKLLTDYTEMKKAILHVYWEEFQKDPVGLMSRVAQPASKKIDQNKLKPEMDEKGNLTTAGFACSQCGQPLFVYKLEQVSEKGKAYTNYFGRCNVAEHEKLILLAQLKPEKDSDEAVTYSLGKFGQRALDFYSIHVTKESTHPVKPLAQIAGNRYASSPVGKALSDACMGTIASFLSKYQDIIIEHQKVVKGNQKRLESLRELAGKENLEYPSVTLPPQPHTKEGVDAYNEVIARVRMWVNLNLWQKLKLSRDDAKPLLRLKNFPSFPLVERQANAEVDWWDMVCNVKKLINEKKEDGKVFWQNLAGYKRQEALRPYLSSEEDRKKGKKFARYQLGDLLLHLEKKHGEDWGKVYDEAWERIDKKVEGLSKHIKLEEERRSEDAQSKAALTDWLRAKASFVIEGLKEADKDEFCRCELKLQKWYGDLRGKPFAIEAENSILDISGFSKQYNCAFIWQKDGVKKLNLYLIINYFKGGKLRFKKIKPEAFEANRFYTVINKKSGEIVPMEVNFNFDDPNLIILPLAFGKRQGREFIWNDLLSLETGSLKLANGRVIEKTLYNRRTRQDEPALFVALTFERREVLDSSNIKPMNLIGVDRGENIPAVIALTDPEGCPLSRFKDSLGNPTHILRIGESYKEKQRTIQAKKEVEQRRAGGYSRKYASKAKNLADDMVRNTARDLLYYAVTQDAMLIFENLSRGFGRQGKRTFMAERQYTRMEDWLTAKLAYEGLPSKTYLSKTLAQYTSKTCSNCGFTITSADYDRVLEKLKKTATGWMTTINGKELKVEGQITYYNRYKRQNVVKDLSVELDRLSEESVNNDISSWTKGRSGEALSLLKKRFSHRPVQEKFVCLNCGFETHADEQAALNIARSWLFLRSQEYKKYQTNKTTGNTDKRAFVETWQSFYRKKLKEVWKPAV

SEQ ID NO: 44243 - protein, 979 aa, synthetic construct
  REGION 1..979: note = engineered CasX variant
QEIKRINKIRRRLVKDSNTKKAGKTGPMKTLLVRVMTPDLRERLENLRKKPENIPQPISNTSRANLNKLLTDYTEMKKAILHVYWEEFQKDPVGLMSRVAQPASKKIDQNKLKPEMDEKGNLTTAGFACSQCGQPLFVYKLEQVSEKGKAYTNYFGRCNVAEHEKLILLAQLKPEKDSDEAVTYSLGKFGQRALDFYSIHVTKESTHPVKPLAQIAGNRYASTPVGKALSDACMGTIASFLSKYQDIIIEHQKVVKGNQKRLESLRELAGKENLEYPSVTLPPQPHTKEGVDAYNEVIARVRMWVNLNLWQKLKLSRDDAKPLLRLKNFPSFPLVERQANAEVDWWDMVCNVKKLINEKKEDGKVFWQNLAGYKRQEALRPYLSSEEDRKKGKKFARYQLGDLLLHLEKKHGEDWGKVYDEAWERIDKKVEGLSKHIKLEEERRSEDAQSKAALTDWLRAKASFVIEGLKEADKDEFCRCELKLQKWYGDLRGKPFAIEAENSILDISGFSKQYNCAFIWQKDGVKKLNLYLIINYFKGGKLRFKKIKPEAFEANRFYTVINKKSGEIVPMEVNFNFDDPNLIILPLAFGKRQGREFIWNDLLSLETGSLKLANGRVIEKTLYNRRTRQDEPALFVALTFERREVLDSSNIKPMNLIGVDRGENIPAVIALTDPEGCPLSRFKDSLGNPTHILRIGESYKEKQRTIQAKKEVEQRRAGGYSRKYASKAKNLADDMVRNTARDLLYYAVTQDAMLIFENLSRGFGRQGKRTFMAERQYTRMEDWLTAKLAYEGLPSKTYLSKTLAQYTSKTCSNCGFTITSADYDRVLEKLKKTATGWMTTINGKELKVEGQITYYNRYKRQNVVKDLSVELDRLSEESVNNDISSWTKGRSGEALSLLKKRFSHRPVQEKFVCLNCGFETHADEQAALNIARSWLFLRSQEYKKYQTNKTTGNTDKRAFVETWQSFYRKKLKEVWKPAV

SEQ ID NO: 44244 - protein, 979 aa, synthetic construct
  REGION 1..979: note = engineered CasX variant
QEIKRINKIRRRLVKDSNTKKAGKTGPMKTLLVRVMTPDLRERLENLRKKPENIPQPISNTSRANLNKLLTDYTEMKKAILHVYWEEFQKDPVGLMSRVAQPASKKIDQNKLKPEMDEKGNLTTAGFACSQCGQPLFVYKLEQVSEKGKAYTNYFGRCNVAEHEKLILLAQLKPEKDSDEAVTYSLGKFGQRALDFYSIHVTKESTHPVKPLAQIAGNRYASAPVGKALSDACMGTIASFLSKYQDIIIEHQKVVKGNQKRLESLRELAGKENLEYPSVTLPPQPHTKEGVDAYNEVIARVRMWVNLNLWQKLKLSRDDAKPLLRLKNFPSFPLVERQANAEVDWWDMVCNVKKLINEKKEDGKVFWQNLAGYKRQEALRPYLSSEEDRKKGKKFARYQLGDLLLHLEKKHGEDWGKVYDEAWERIDKKVEGLSKHIKLEEERRSEDAQSKAALTDWLRAKASFVIEGLKEADKDEFCRCELKLQKWYGDLRGKPFAIEAENSILDISGFSKQYNCAFIWQKDGVKKLNLYLIINYFKGGKLRFKKIKPEAFEANRFYTVINKKSGEIVPMEVNFNFDDPNLIILPLAFGKRQGREFIWNDLLSLETGSLKLANGRVIEKTLYNRRTRQDEPALFVALTFERREVLDSSNIKPMNLIGVDRGENIPAVIALTDPEGCPLSRFKDSLGNPTHILRIGESYKEKQRTIQAKKEVEQRRAGGYSRKYASKAKNLADDMVRNTARDLLYYAVTQDAMLIFENLSRGFGRQGKRTFMAERQYTRMEDWLTAKLAYEGLPSKTYLSKTLAQYTSKTCSNCGFTITSADYDRVLEKLKKTATGWMTTINGKELKVEGQITYYNRYKRQNVVKDLSVELDRLSEESVNNDISSWTKGRSGEALSLLKKRFSHRPVQEKFVCLNCGFETHADEQAALNIARSWLFLRSQEYKKYQTNKTTGNTDKRAFVETWQSFYRKKLKEVWKPAV

SEQ ID NO: 44245 - protein, 979 aa, synthetic construct
  REGION 1..979: note = engineered CasX variant
QEIKRINKIRRRLVKDSNTKKAGKTGPMKTLLVRVMTPDLRERLENLRKKPENIPQPISNTSRANLNKLLTDYTEMKKAILHVYWEEFQKDPVGLMSRVAQPASKKIDQNKLKPEMDEKGNLTTAGFACSQCGQPLFVYKLEQVSEKGKAYTNYFGRCNVAEHEKLILLAQLKPEKDSDEAVTYSLGKFGQRALDFYSIHVTKESTHPVKPLAQIAGNRYASVPVGKALSDACMGTIASFLSKYQDIIIEHQKVVKGNQKRLESLRELAGKENLEYPSVTLPPQPHTKEGVDAYNEVIARVRMWVNLNLWQKLKLSRDDAKPLLRLKNFPSFPLVERQANAEVDWWDMVCNVKKLINEKKEDGKVFWQNLAGYKRQEALRPYLSSEEDRKKGKKFARYQLGDLLLHLEKKHGEDWGKVYDEAWERIDKKVEGLSKHIKLEEERRSEDAQSKAALTDWLRAKASFVIEGLKEADKDEFCRCELKLQKWYGDLRGKPFAIEAENSILDISGFSKQYNCAFIWQKDGVKKLNLYLIINYFKGGKLRFKKIKPEAFEANRFYTVINKKSGEIVPMEVNFNFDDPNLIILPLAFGKRQGREFIWNDLLSLETGSLKLANGRVIEKTLYNRRTRQDEPALFVALTFERREVLDSSNIKPMNLIGVDRGENIPAVIALTDPEGCPLSRFKDSLGNPTHILRIGESYKEKQRTIQAKKEVEQRRAGGYSRKYASKAKNLADDMVRNTARDLLYYAVTQDAMLIFENLSRGFGRQGKRTFMAERQYTRMEDWLTAKLAYEGLPSKTYLSKTLAQYTSKTCSNCGFTITSADYDRVLEKLKKTATGWMTTINGKELKVEGQITYYNRYKRQNVVKDLSVELDRLSEESVNNDISSWTKGRSGEALSLLKKRFSHRPVQEKFVCLNCGFETHADEQAALNIARSWLFLRSQEYKKYQTNKTTGNTDKRAFVETWQSFYRKKLKEVWKPAV

SEQ ID NO: 44246 - protein, 979 aa, synthetic construct
  REGION 1..979: note = engineered CasX variant
QEIKRINKIRRRLVKDSNTKKAGKTGPMKTLLVRVMTPDLRERLENLRKKPENIPQPISNTSRANLNKLLTDYTEMKKAILHVYWEEFQKDPVGLMSRVAQPASKKIDQNKLKPEMDEKGNLTTAGFACSQCGQPLFVYKLEQVSEKGKAYTNYFGRCNVAEHEKLIKLAQLKPEKDSDEAVTYSLGKFGQRALDFYSIHVTKESTHPVKPLAQIAGNRYASGPVGKALSDACMGTIASFLSKYQDIIIEHQKVVKGNQKRLESLRELAGKENLEYPSVTLPPQPHTKEGVDAYNEVIARVRMWVNLNLWQKLKLSRDDAKPLLRLKNFPSFPLVERQANAEVDWWDMVCNVKKLINEKKEDGKVFWQNLAGYKRQEALRPYLSSEEDRKKGKKFARYQLGDLLLHLEKKHGEDWGKVYDEAWERIDKKVEGLSKHIKLEEERRSEDAQSKAALTDWLRAKASFVIEGLKEADKDEFCRCELKLQKWYGDLRGKPFAIEAENSILDISGFSKQYNCAFIWQKDGVKKLNLYLIINYFKGGKLRFKKIKPEAFEANRFYTVINKKSGEIVPMEVNFNFDDPNLIILPLAFGKRQGREFIWNDLLSLETGSLKLANGRVIEKTLYNRRTRQDEPALFVALTFERREVLDSSNIKPMNLIGVDRGENIPAVIALTDPEGCPLSRFKDSLGNPTHILRIGESYKEKQRTIQAKKEVEQRRAGGYSRKYASKAKNLADDMVRNTARDLLYYAVTQDAMLIFENLSRGFGRQGKRTFMAERQYTRMEDWLTAKLAYEGLPSKTYLSKTLAQYTSKTCSNCGFTITSADYDRVLEKLKKTATGWMTTINGKELKVEGQITYYNRYKRQNVVKDLSVELDRLSEESVNNDISSWTKGRSGEALSLLKKRFSHRPVQEKFVCLNCGFETHADEQAALNIARSWLFLRSQEYKKYQTNKTTGNTDKRAFVETWQSFYRKKLKEVWKPAV

SEQ ID NO: 44247 - protein, 978 aa, synthetic construct
  REGION 1..978: note = engineered CasX variant
QEIKRINKIRRRLVKDSNTKKAGKTGPMKTLLVRVMTPDLRERLENLRKKPENIPQPISNTSRANLNKLLTDYTEMKKAILHVYWEEFQKDPVGLMSRVAQPASKKIDQNKLKPEMDEKGNLTTAGFACSQCGQPLFVYKLEQVSEKGKAYTNYFGRCNVAEHEKLILLAQLKPEKDSDEAVTYSLGKFGQRALDFYSIHVTKESTHPVKPLAQIAGNRYASPVGKALSDACMGTIASFLSKYQDIIIEHQKVVKGNQKRLESLRELAGKENLEYPSVTLPPQPHTKEGVDAYNEVIARVRMWVNLNLWQKLKLSRDDAKPLLRLKNFPSFPLVERQANAEVDWWDMVCNVKKLINEKKEDGKVFWQNLAGYKRQEALRPYLSSEEDRKKGKKFARYQLGDLLLHLEKKHGEDWGKVYDEAWERIDKKVEGLSKHIKLEEERRSEDAQSKAALTDWLRAKASFVIEGLKEADKDEFCRCELKLQKWYGDLRGKPFAIEAENSILDISGFSKQYNCAFIWQKDGVKKLNLYLIINYFKGGKLRFKKIKPEAFEANRFYTVINKKSGEIVPMEVNFNFDDPNLIILPLAFGKRQGREFIWNDLLSLETGSLKLANGRVIEKTLYNRRTRQDEPALFVALTFERREVLDSSNIKPMNLIGVDRGENIPAVIALTDPEGCPLSRFKDSLGNPTHILRIGESYKEKQRTIQAKKEVEQRRAGGYSRKYASKAKNLADDMVRNTARDLLYYAVTQDAMLIFENLSRGFGRQGKRTFMAERQYTRMEDWLTAKLAYEGLPSKTYLSKTLAQYTSKTCSNCGFTITSADYDRVLEKLKKTATGWMTTINGKELKVEGQITYYNRYKRQNVVKDLSVELDRLSEESVNNDISSWTKGRSGEALSLLKKRFSHRPVQEKFVCLNCGFETHADEQAALNIARSWLFLRSQEYKKYQTNKTTGNTDKRAFVETWQSFYRKKLKEVWKPAV

SEQ ID NO: 44248 - protein, 979 aa, synthetic construct
  REGION 1..979: note = engineered CasX variant
QEIKRINKIRRRLVKDSNTKKAGKTGPMKTLLVRVMTPDLRERLENLRKKPENIPQPISNTSRANLNKLLTDYTEMKKAILHVYWEEFQKDPVGLMSRVAQPASKKIDQNKLKPEMDEKGNLTTAGFACSQCGQPLFVYKLEQVSEKGKAYTNYFGRCNVAEHEKLILLAQLKPEKDSDEAVTYSLGKFGQRALDFYSIHVTKESTHPVKPLAQIAGNRYASYPVGKALSDACMGTIASFLSKYQDIIIEHQKVVKGNQKRLESLRELAGKENLEYPSVTLPPQPHTKEGVDAYNEVIARVRMWVNLNLWQKLKLSRDDAKPLLRLKGFPSFPLVERQANAEVDWWDMVCNVKKLINEKKEDGKVFWQNLAGYKRQEALRPYLSSEEDRKKGKKFARYQLGDLLNHLEKKHGEDWGKVYDEAWERIDKKVEGLSKHIKLEEERRSEDAQSKAALTDWLRAKASFVIEGLKEADKDEFCRCELKLQKWYGDLRGKPFAIEAENSILDISGFSKQYNCAFIWQKDGVKKLNLYLIINYFKGGKLRFKKIKPEAFEANRFYTVINKKSGEIVPMEVNFNFDDPNLIILPLAFGKRQGREFIWNDLLSLETGSLKLANGRVIEKTLYNRRTRQDEPALFVALTFERREVLDSSNIKPMNLIGVDRGENIPAVIALTDPEGCPLSRFKDSLGNPTHILRIGESYKEKQRTIQAKKEVEQRRAGGYSRKYASKAKNLADDMVRNTARDLLYYAVTQDAMLIFENLSRGFGRQGKRTFMAERQYTRMEDWLTAKLAYEGLPSKTYLSKTLAQYTSKTCSNCGFTITSADYDRVLEKLKKTATGWMTTINGKELKVEGQITYYNRYKRQNVVKDLSVELDRLSEESVNNDISSWTKGRSGEALSLLKKRFSHRPVQEKFVCLNCGFETHADEQAALNIARSWLFLRSQEYKKYQTNKTTGNTDKRAFVETWQSFYRKKLKEVWKPAV

SEQ ID NO: 44249 - protein, 979 aa, synthetic construct
  REGION 1..979: note = engineered CasX variant
QEIKRINKIRRRLVKDSNTKKAGKTGPMKTLLVRVMTPDLRERLENLRKKPENIPQPISNTSRANLNKLLTDYTEMKKAILHVYWEEFQKDPVGLMSRVAQPASKKIDQNKLKPEMDEKGNLTTAGFACSQCGQPLFVYKLEQVSEKGKAYTNYFGRCNVAEHEKLILLAQLKPEKDSDEAVTYSLGKFGQRALDFYSIHVTKESTHPVKPLAQIAGNRYASHPVGKALSDACMGTIASFLSKYQDIIIEHQKVVKGNQKRLESLRELAGKENLEYPSVTLPPQPHTKEGVDAYNEVIARVRMWVNLNLWQKLKLSRDDAKPLLRLKGFPSFPLVERQANAEVDWWDMVCNVKKLINEKKEDGKVFWQNLAGYKRQEALRPYLSSEEDRKKGKKFARYQLGDLLNHLEKKHGEDWGKVYDEAWERIDKKVEGLSKHIKLEEERRSEDAQSKAALTDWLRAKASFVIEGLKEADKDEFCRCELKLQKWYGDLRGKPFAIEAENSILDISGFSKQYNCAFIWQKDGVKKLNLYLIINYFKGGKLRFKKIKPEAFEANRFYTVINKKSGEIVPMEVNFNFDDPNLIILPLAFGKRQGREFIWNDLLSLETGSLKLANGRVIEKTLYNRRTRQDEPALFVALTFERREVLDSSNIKPMNLIGVDRGENIPAVIALTDPEGCPLSRFKDSLGNPTHILRIGESYKEKQRTIQAKKEVEQRRAGGYSRKYASKAKNLADDMVRNTARDLLYYAVTQDAMLIFENLSRGFGRQGKRTFMAERQYTRMEDWLTAKLAYEGLPSKTYLSKTLAQYTSKTCSNCGFTITSADYDRVLEKLKKTATGWMTTINGKELKVEGQITYYNRYKRQNVVKDLSVELDRLSEESVNNDISSWTKGRSGEALSLLKKRFSHRPVQEKFVCLNCGFETHADEQAALNIARSWLFLRSQEYKKYQTNKTTGNTDKRAFVETWQSFYRKKLKEVWKPAV

SEQ ID NO: 44250 - protein, 979 aa, synthetic construct
  REGION 1..979: note = engineered CasX variant
QEIKRINKIRRRLVKDSNTKKAGKTGPMKTLLVRVMTPDLRERLENLRKKPENIPQPISNTSRANLNKLLTDYTEMKKAILHVYWEEFQKDPVGLMSRVAQPASKKIDQNKLKPEMDEKGNLTTAGFACSQCGQPLFVYKLEQVSEKGKAYTNYFGRCNVAEHEKLILLAQLKPEKDSDEAVTYSLGKFGQRALDFYSIHVTKESTHPVKPLAQIAGNRYASSPVGKALSDACMGTIASFLSKYQDIIIEHQKVVKGNQKRLESLRELAGKENLEYPSVTLPPQPHTKEGVDAYNEVIARVRMWVNLNLWQKLKLSRDDAKPLLRLKGFPSFPLVERQANAEVDWWDMVCNVKKLINEKKEDGKVFWQNLAGYKRQEALRPYLSSEEDRKKGKKFARYQLGDLLNHLEKKHGEDWGKVYDEAWERIDKKVEGLSKHIKLEEERRSEDAQSKAALTDWLRAKASFVIEGLKEADKDEFCRCELKLQKWYGDLRGKPFAIEAENSILDISGFSKQYNCAFIWQKDGVKKLNLYLIINYFKGGKLRFKKIKPEAFEANRFYTVINKKSGEIVPMEVNFNFDDPNLIILPLAFGKRQGREFIWNDLLSLETGSLKLANGRVIEKTLYNRRTRQDEPALFVALTFERREVLDSSNIKPMNLIGVDRGENIPAVIALTDPEGCPLSRFKDSLGNPTHILRIGESYKEKQRTIQAKKEVEQRRAGGYSRKYASKAKNLADDMVRNTARDLLYYAVTQDAMLIFENLSRGFGRQGKRTFMAERQYTRMEDWLTAKLAYEGLPSKTYLSKTLAQYTSKTCSNCGFTITSADYDRVLEKLKKTATGWMTTINGKELKVEGQITYYNRYKRQNVVKDLSVELDRLSEESVNNDISSWTKGRSGEALSLLKKRFSHRPVQEKFVCLNCGFETHADEQAALNIARSWLFLRSQEYKKYQTNKTTGNTDKRAFVETWQSFYRKKLKEVWKPAV

SEQ ID NO: 44251 - protein, 979 aa, synthetic construct
  REGION 1..979: note = engineered CasX variant
QEIKRINKIRRRLVKDSNTKKAGKTGPMKTLLVRVMTPDLRERLENLRKKPENIPQPISNTSRANLNKLLTDYTEMKKAILHVYWEEFQKDPVGLMSRVAQPASKKIDQNKLKPEMDEKGNLTTAGFACSQCGQPLFVYKLEQVSEKGKAYTNYFGRCNVAEHEKLILLAQLKPEKDSDEAVTYSLGKFGQRALDFYSIHVTKESTHPVKPLAQIAGNRYASTPVGKALSDACMGTIASFLSKYQDIIIEHQKVVKGNQKRLESLRELAGKENLEYPSVTLPPQPHTKEGVDAYNEVIARVRMWVNLNLWQKLKLSRDDAKPLLRLKGFPSFPLVERQANAEVDWWDMVCNVKKLINEKKEDGKVFWQNLAGYKRQEALRPYLSSEEDRKKGKKFARYQLGDLLNHLEKKHGEDWGKVYDEAWERIDKKVEGLSKHIKLEEERRSEDAQSKAALTDWLRAKASFVIEGLKEADKDEFCRCELKLQKWYGDLRGKPFAIEAENSILDISGFSKQYNCAFIWQKDGVKKLNLYLIINYFKGGKLRFKKIKPEAFEANRFYTVINKKSGEIVPMEVNFNFDDPNLIILPLAFGKRQGREFIWNDLLSLETGSLKLANGRVIEKTLYNRRTRQDEPALFVALTFERREVLDSSNIKPMNLIGVDRGENIPAVIALTDPEGCPLSRFKDSLGNPTHILRIGESYKEKQRTIQAKKEVEQRRAGGYSRKYASKAKNLADDMVRNTARDLLYYAVTQDAMLIFENLSRGFGRQGKRTFMAERQYTRMEDWLTAKLAYEGLPSKTYLSKTLAQYTSKTCSNCGFTITSADYDRVLEKLKKTATGWMTTINGKELKVEGQITYYNRYKRQNVVKDLSVELDRLSEESVNNDISSWTKGRSGEALSLLKKRFSHRPVQEKFVCLNCGFETHADEQAALNIARSWLFLRSQEYKKYQTNKTTGNTDKRAFVETWQSFYRKKLKEVWKPAV

SEQ ID NO: 44252 - protein, 979 aa, synthetic construct
  REGION 1..979: note = engineered CasX variant
QEIKRINKIRRRLVKDSNTKKAGKTGPMKTLLVRVMTPDLRERLENLRKKPENIPQPISNTSRANLNKLLTDYTEMKKAILHVYWEEFQKDPVGLMSRVAQPASKKIDQNKLKPEMDEKGNLTTAGFACSQCGQPLFVYKLEQVSEKGKAYTNYFGRCNVAEHEKLILLAQLKPEKDSDEAVTYSLGKFGQRALDFYSIHVTKESTHPVKPLAQIAGNRYASAPVGKALSDACMGTIASFLSKYQDIIIEHQKVVKGNQKRLESLRELAGKENLEYPSVTLPPQPHTKEGVDAYNEVIARVRMWVNLNLWQKLKLSRDDAKPLLRLKGFPSFPLVERQANAEVDWWDMVCNVKKLINEKKEDGKVFWQNLAGYKRQEALRPYLSSEEDRKKGKKFARYQLGDLLNHLEKKHGEDWGKVYDEAWERIDKKVEGLSKHIKLEEERRSEDAQSKAALTDWLRAKASFVIEGLKEADKDEFCRCELKLQKWYGDLRGKPFAIEAENSILDISGFSKQYNCAFIWQKDGVKKLNLYLIINYFKGGKLRFKKIKPEAFEANRFYTVINKKSGEIVPMEVNFNFDDPNLIILPLAFGKRQGREFIWNDLLSLETGSLKLANGRVIEKTLYNRRTRQDEPALFVALTFERREVLDSSNIKPMNLIGVDRGENIPAVIALTDPEGCPLSRFKDSLGNPTHILRIGESYKEKQRTIQAKKEVEQRRAGGYSRKYASKAKNLADDMVRNTARDLLYYAVTQDAMLIFENLSRGFGRQGKRTFMAERQYTRMEDWLTAKLAYEGLPSKTYLSKTLAQYTSKTCSNCGFTITSADYDRVLEKLKKTATGWMTTINGKELKVEGQITYYNRYKRQNVVKDLSVELDRLSEESVNNDISSWTKGRSGEALSLLKKRFSHRPVQEKFVCLNCGFETHADEQAALNIARSWLFLRSQEYKKYQTNKTTGNTDKRAFVETWQSFYRKKLKEVWKPAV

SEQ ID NO: 44253 - protein, 979 aa, synthetic construct
  REGION 1..979: note = engineered CasX variant
QEIKRINKIRRRLVKDSNTKKAGKTGPMKTLLVRVMTPDLRERLENLRKKPENIPQPISNTSRANLNKLLTDYTEMKKAILHVYWEEFQKDPVGLMSRVAQPASKKIDQNKLKPEMDEKGNLTTAGFACSQCGQPLFVYKLEQVSEKGKAYTNYFGRCNVAEHEKLILLAQLKPEKDSDEAVTYSLGKFGQRALDFYSIHVTKESTHPVKPLAQIAGNRYASVPVGKALSDACMGTIASFLSKYQDIIIEHQKVVKGNQKRLESLRELAGKENLEYPSVTLPPQPHTKEGVDAYNEVIARVRMWVNLNLWQKLKLSRDDAKPLLRLKGFPSFPLVERQANAEVDWWDMVCNVKKLINEKKEDGKVFWQNLAGYKRQEALRPYLSSEEDRKKGKKFARYQLGDLLNHLEKKHGEDWGKVYDEAWERIDKKVEGLSKHIKLEEERRSEDAQSKAALTDWLRAKASFVIEGLKEADKDEFCRCELKLQKWYGDLRGKPFAIEAENSILDISGFSKQYNCAFIWQKDGVKKLNLYLIINYFKGGKLRFKKIKPEAFEANRFYTVINKKSGEIVPMEVNFNFDDPNLIILPLAFGKRQGREFIWNDLLSLETGSLKLANGRVIEKTLYNRRTRQDEPALFVALTFERREVLDSSNIKPMNLIGVDRGENIPAVIALTDPEGCPLSRFKDSLGNPTHILRIGESYKEKQRTIQAKKEVEQRRAGGYSRKYASKAKNLADDMVRNTARDLLYYAVTQDAMLIFENLSRGFGRQGKRTFMAERQYTRMEDWLTAKLAYEGLPSKTYLSKTLAQYTSKTCSNCGFTITSADYDRVLEKLKKTATGWMTTINGKELKVEGQITYYNRYKRQNVVKDLSVELDRLSEESVNNDISSWTKGRSGEALSLLKKRFSHRPVQEKFVCLNCGFETHADEQAALNIARSWLFLRSQEYKKYQTNKTTGNTDKRAFVETWQSFYRKKLKEVWKPAV

SEQ ID NO: 44254 - protein, 979 aa, synthetic construct
  REGION 1..979: note = engineered CasX variant
QEIKRINKIRRRLVKDSNTKKAGKTGPMKTLLVRVMTPDLRERLENLRKKPENIPQPISNTSRANLNKLLTDYTEMKKAILHVYWEEFQKDPVGLMSRVAQPASKKIDQNKLKPEMDEKGNLTTAGFACSQCGQPLFVYKLEQVSEKGKAYTNYFGRCNVAEHEKLIKLAQLKPEKDSDEAVTYSLGKFGQRALDFYSIHVTKESTHPVKPLAQIAGNRYASGPVGKALSDACMGTIASFLSKYQDIIIEHQKVVKGNQKRLESLRELAGKENLEYPSVTLPPQPHTKEGVDAYNEVIARVRMWVNLNLWQKLKLSRDDAKPLLRLKGFPSFPLVERQANAEVDWWDMVCNVKKLINEKKEDGKVFWQNLAGYKRQEALRPYLSSEEDRKKGKKFARYQLGDLLNHLEKKHGEDWGKVYDEAWERIDKKVEGLSKHIKLEEERRSEDAQSKAALTDWLRAKASFVIEGLKEADKDEFCRCELKLQKWYGDLRGKPFAIEAENSILDISGFSKQYNCAFIWQKDGVKKLNLYLIINYFKGGKLRFKKIKPEAFEANRFYTVINKKSGEIVPMEVNFNFDDPNLIILPLAFGKRQGREFIWNDLLSLETGSLKLANGRVIEKTLYNRRTRQDEPALFVALTFERREVLDSSNIKPMNLIGVDRGENIPAVIALTDPEGCPLSRFKDSLGNPTHILRIGESYKEKQRTIQAKKEVEQRRAGGYSRKYASKAKNLADDMVRNTARDLLYYAVTQDAMLIFENLSRGFGRQGKRTFMAERQYTRMEDWLTAKLAYEGLPSKTYLSKTLAQYTSKTCSNCGFTITSADYDRVLEKLKKTATGWMTTINGKELKVEGQITYYNRYKRQNVVKDLSVELDRLSEESVNNDISSWTKGRSGEALSLLKKRFSHRPVQEKFVCLNCGFETHADEQAALNIARSWLFLRSQEYKKYQTNKTTGNTDKRAFVETWQSFYRKKLKEVWKPAV

SEQ ID NO: 44255 - protein, 978 aa, synthetic construct
  REGION 1..978: note = engineered CasX variant
QEIKRINKIRRRLVKDSNTKKAGKTGPMKTLLVRVMTPDLRERLENLRKKPENIPQPISNTSRANLNKLLTDYTEMKKAILHVYWEEFQKDPVGLMSRVAQPASKKIDQNKLKPEMDEKGNLTTAGFACSQCGQPLFVYKLEQVSEKGKAYTNYFGRCNVAEHEKLILLAQLKPEKDSDEAVTYSLGKFGQRALDFYSIHVTKESTHPVKPLAQIAGNRYASPVGKALSDACMGTIASFLSKYQDIIIEHQKVVKGNQKRLESLRELAGKENLEYPSVTLPPQPHTKEGVDAYNEVIARVRMWVNLNLWQKLKLSRDDAKPLLRLKGFPSFPLVERQANAEVDWWDMVCNVKKLINEKKEDGKVFWQNLAGYKRQEALRPYLSSEEDRKKGKKFARYQLGDLLNHLEKKHGEDWGKVYDEAWERIDKKVEGLSKHIKLEEERRSEDAQSKAALTDWLRAKASFVIEGLKEADKDEFCRCELKLQKWYGDLRGKPFAIEAENSILDISGFSKQYNCAFIWQKDGVKKLNLYLIINYFKGGKLRFKKIKPEAFEANRFYTVINKKSGEIVPMEVNFNFDDPNLIILPLAFGKRQGREFIWNDLLSLETGSLKLANGRVIEKTLYNRRTRQDEPALFVALTFERREVLDSSNIKPMNLIGVDRGENIPAVIALTDPEGCPLSRFKDSLGNPTHILRIGESYKEKQRTIQAKKEVEQRRAGGYSRKYASKAKNLADDMVRNTARDLLYYAVTQDAMLIFENLSRGFGRQGKRTFMAERQYTRMEDWLTAKLAYEGLPSKTYLSKTLAQYTSKTCSNCGFTITSADYDRVLEKLKKTATGWMTTINGKELKVEGQITYYNRYKRQNVVKDLSVELDRLSEESVNNDISSWTKGRSGEALSLLKKRFSHRPVQEKFVCLNCGFETHADEQAALNIARSWLFLRSQEYKKYQTNKTTGNTDKRAFVETWQSFYRKKLKEVWKPAV

SEQ ID NO: 44256 - protein, 979 aa, synthetic construct
  REGION 1..979: note = engineered CasX variant
QEIKRINKIRRRLVKDSNTKKAGKTGPMKTLLVRVMTPDLRERLENLRKKPENIPQPISNTSRANLNKLLTDYTEMKKAILHVYWEEFQKDPVGLMSRVAQPASKKIDQNKLKPEMDEKGNLTTAGFACSQCGQPLFVYKLEQVSEKGKAYTNYFGRCNVAEHEKLILLAQLKPEKDSDEAVTYSLGKFGQRALDFYSIHVTKESTHPVKPLAQIAGNRYASYPVGKALSDACMGTIASFLSKYQDIIIEHQKVVKGNQKRLESLRELAGKENLEYPSVTLPPQPHTKEGVDAYNEVIARVRMWVNLNLWQKLKLSRDDAKPLLRLKGFPSFPLVERQANAEVDWWDMVCNVKKLINEKKEDGKVFWQNLAGYKRQEALRPYLSSEEDRKKGKKFARYQLGDLLWHLEKKHGEDWGKVYDEAWERIDKKVEGLSKHIKLEEERRSEDAQSKAALTDWLRAKASFVIEGLKEADKDEFCRCELKLQKWYGDLRGKPFAIEAENSILDISGFSKQYNCAFIWQKDGVKKLNLYLIINYFKGGKLRFKKIKPEAFEANRFYTVINKKSGEIVPMEVNFNFDDPNLIILPLAFGKRQGREFIWNDLLSLETGSLKLANGRVIEKTLYNRRTRQDEPALFVALTFERREVLDSSNIKPMNLIGVDRGENIPAVIALTDPEGCPLSRFKDSLGNPTHILRIGESYKEKQRTIQAKKEVEQRRAGGYSRKYASKAKNLADDMVRNTARDLLYYAVTQDAMLIFENLSRGFGRQGKRTFMAERQYTRMEDWLTAKLAYEGLPSKTYLSKTLAQYTSKTCSNCGFTITSADYDRVLEKLKKTATGWMTTINGKELKVEGQITYYNRYKRQNVVKDLSVELDRLSEESVNNDISSWTKGRSGEALSLLKKRFSHRPVQEKFVCLNCGFETHADEQAALNIARSWLFLRSQEYKKYQTNKTTGNTDKRAFVETWQSFYRKKLKEVWKPAV

SEQ ID NO: 44257 - protein, 979 aa, synthetic construct
  REGION 1..979: note = engineered CasX variant
QEIKRINKIRRRLVKDSNTKKAGKTGPMKTLLVRVMTPDLRERLENLRKKPENIPQPISNTSRANLNKLLTDYTEMKKAILHVYWEEFQKDPVGLMSRVAQPASKKIDQNKLKPEMDEKGNLTTAGFACSQCGQPLFVYKLEQVSEKGKAYTNYFGRCNVAEHEKLILLAQLKPEKDSDEAVTYSLGKFGQRALDFYSIHVTKESTHPVKPLAQIAGNRYASHPVGKALSDACMGTIASFLSKYQDIIIEHQKVVKGNQKRLESLRELAGKENLEYPSVTLPPQPHTKEGVDAYNEVIARVRMWVNLNLWQKLKLSRDDAKPLLRLKGFPSFPLVERQANAEVDWWDMVCNVKKLINEKKEDGKVFWQNLAGYKRQEALRPYLSSEEDRKKGKKFARYQLGDLLWHLEKKHGEDWGKVYDEAWERIDKKVEGLSKHIKLEEERRSEDAQSKAALTDWLRAKASFVIEGLKEADKDEFCRCELKLQKWYGDLRGKPFAIEAENSILDISGFSKQYNCAFIWQKDGVKKLNLYLIINYFKGGKLRFKKIKPEAFEANRFYTVINKKSGEIVPMEVNFNFDDPNLIILPLAFGKRQGREFIWNDLLSLETGSLKLANGRVIEKTLYNRRTRQDEPALFVALTFERREVLDSSNIKPMNLIGVDRGENIPAVIALTDPEGCPLSRFKDSLGNPTHILRIGESYKEKQRTIQAKKEVEQRRAGGYSRKYASKAKNLADDMVRNTARDLLYYAVTQDAMLIFENLSRGFGRQGKRTFMAERQYTRMEDWLTAKLAYEGLPSKTYLSKTLAQYTSKTCSNCGFTITSADYDRVLEKLKKTATGWMTTINGKELKVEGQITYYNRYKRQNVVKDLSVELDRLSEESVNNDISSWTKGRSGEALSLLKKRFSHRPVQEKFVCLNCGFETHADEQAALNIARSWLFLRSQEYKKYQTNKTTGNTDKRAFVETWQSFYRKKLKEVWKPAV

SEQ ID NO: 44258 - protein, 979 aa, synthetic construct
  REGION 1..979: note = engineered CasX variant
QEIKRINKIRRRLVKDSNTKKAGKTGPMKTLLVRVMTPDLRERLENLRKKPENIPQPISNTSRANLNKLLTDYTEMKKAILHVYWEEFQKDPVGLMSRVAQPASKKIDQNKLKPEMDEKGNLTTAGFACSQCGQPLFVYKLEQVSEKGKAYTNYFGRCNVAEHEKLILLAQLKPEKDSDEAVTYSLGKFGQRALDFYSIHVTKESTHPVKPLAQIAGNRYASSPVGKALSDACMGTIASFLSKYQDIIIEHQKVVKGNQKRLESLRELAGKENLEYPSVTLPPQPHTKEGVDAYNEVIARVRMWVNLNLWQKLKLSRDDAKPLLRLKGFPSFPLVERQANAEVDWWDMVCNVKKLINEKKEDGKVFWQNLAGYKRQEALRPYLSSEEDRKKGKKFARYQLGDLLWHLEKKHGEDWGKVYDEAWERIDKKVEGLSKHIKLEEERRSEDAQSKAALTDWLRAKASFVIEGLKEADKDEFCRCELKLQKWYGDLRGKPFAIEAENSILDISGFSKQYNCAFIWQKDGVKKLNLYLIINYFKGGKLRFKKIKPEAFEANRFYTVINKKSGEIVPMEVNFNFDDPNLIILPLAFGKRQGREFIWNDLLSLETGSLKLANGRVIEKTLYNRRTRQDEPALFVALTFERREVLDSSNIKPMNLIGVDRGENIPAVIALTDPEGCPLSRFKDSLGNPTHILRIGESYKEKQRTIQAKKEVEQRRAGGYSRKYASKAKNLADDMVRNTARDLLYYAVTQDAMLIFENLSRGFGRQGKRTFMAERQYTRMEDWLTAKLAYEGLPSKTYLSKTLAQYTSKTCSNCGFTITSADYDRVLEKLKKTATGWMTTINGKELKVEGQITYYNRYKRQNVVKDLSVELDRLSEESVNNDISSWTKGRSGEALSLLKKRFSHRPVQEKFVCLNCGFETHADEQAALNIARSWLFLRSQEYKKYQTNKTTGNTDKRAFVETWQSFYRKKLKEVWKPAV

SEQ ID NO: 44259 - protein, 979 aa, synthetic construct
  REGION 1..979: note = engineered CasX variant
QEIKRINKIRRRLVKDSNTKKAGKTGPMKTLLVRVMTPDLRERLENLRKKPENIPQPISNTSRANLNKLLTDYTEMKKAILHVYWEEFQKDPVGLMSRVAQPASKKIDQNKLKPEMDEKGNLTTAGFACSQCGQPLFVYKLEQVSEKGKAYTNYFGRCNVAEHEKLILLAQLKPEKDSDEAVTYSLGKFGQRALDFYSIHVTKESTHPVKPLAQIAGNRYASTPVGKALSDACMGTIASFLSKYQDIIIEHQKVVKGNQKRLESLRELAGKENLEYPSVTLPPQPHTKEGVDAYNEVIARVRMWVNLNLWQKLKLSRDDAKPLLRLKGFPSFPLVERQANAEVDWWDMVCNVKKLINEKKEDGKVFWQNLAGYKRQEALRPYLSSEEDRKKGKKFARYQLGDLLWHLEKKHGEDWGKVYDEAWERIDKKVEGLSKHIKLEEERRSEDAQSKAALTDWLRAKASFVIEGLKEADKDEFCRCELKLQKWYGDLRGKPFAIEAENSILDISGFSKQYNCAFIWQKDGVKKLNLYLIINYFKGGKLRFKKIKPEAFEANRFYTVINKKSGEIVPMEVNFNFDDPNLIILPLAFGKRQGREFIWNDLLSLETGSLKLANGRVIEKTLYNRRTRQDEPALFVALTFERREVLDSSNIKPMNLIGVDRGENIPAVIALTDPEGCPLSRFKDSLGNPTHILRIGESYKEKQRTIQAKKEVEQRRAGGYSRKYASKAKNLADDMVRNTARDLLYYAVTQDAMLIFENLSRGFGRQGKRTFMAERQYTRMEDWLTAKLAYEGLPSKTYLSKTLAQYTSKTCSNCGFTITSADYDRVLEKLKKTATGWMTTINGKELKVEGQITYYNRYKRQNVVKDLSVELDRLSEESVNNDISSWTKGRSGEALSLLKKRFSHRPVQEKFVCLNCGFETHADEQAALNIARSWLFLRSQEYKKYQTNKTTGNTDKRAFVETWQSFYRKKLKEVWKPAV

SEQ ID NO: 44260 - protein, 979 aa, synthetic construct
  REGION 1..979: note = engineered CasX variant
QEIKRINKIRRRLVKDSNTKKAGKTGPMKTLLVRVMTPDLRERLENLRKKPENIPQPISNTSRANLNKLLTDYTEMKKAILHVYWEEFQKDPVGLMSRVAQPASKKIDQNKLKPEMDEKGNLTTAGFACSQCGQPLFVYKLEQVSEKGKAYTNYFGRCNVAEHEKLILLAQLKPEKDSDEAVTYSLGKFGQRALDFYSIHVTKESTHPVKPLAQIAGNRYASAPVGKALSDACMGTIASFLSKYQDIIIEHQKVVKGNQKRLESLRELAGKENLEYPSVTLPPQPHTKEGVDAYNEVIARVRMWVNLNLWQKLKLSRDDAKPLLRLKGFPSFPLVERQANAEVDWWDMVCNVKKLINEKKEDGKVFWQNLAGYKRQEALRPYLSSEEDRKKGKKFARYQLGDLLWHLEKKHGEDWGKVYDEAWERIDKKVEGLSKHIKLEEERRSEDAQSKAALTDWLRAKASFVIEGLKEADKDEFCRCELKLQKWYGDLRGKPFAIEAENSILDISGFSKQYNCAFIWQKDGVKKLNLYLIINYFKGGKLRFKKIKPEAFEANRFYTVINKKSGEIVPMEVNFNFDDPNLIILPLAFGKRQGREFIWNDLLSLETGSLKLANGRVIEKTLYNRRTRQDEPALFVALTFERREVLDSSNIKPMNLIGVDRGENIPAVIALTDPEGCPLSRFKDSLGNPTHILRIGESYKEKQRTIQAKKEVEQRRAGGYSRKYASKAKNLADDMVRNTARDLLYYAVTQDAMLIFENLSRGFGRQGKRTFMAERQYTRMEDWLTAKLAYEGLPSKTYLSKTLAQYTSKTCSNCGFTITSADYDRVLEKLKKTATGWMTTINGKELKVEGQITYYNRYKRQNVVKDLSVELDRLSEESVNNDISSWTKGRSGEALSLLKKRFSHRPVQEKFVCLNCGFETHADEQAALNIARSWLFLRSQEYKKYQTNKTTGNTDKRAFVETWQSFYRKKLKEVWKPAV

SEQ ID NO: 44261 - protein, 979 aa, synthetic construct
  REGION 1..979: note = engineered CasX variant
QEIKRINKIRRRLVKDSNTKKAGKTGPMKTLLVRVMTPDLRERLENLRKKPENIPQPISNTSRANLNKLLTDYTEMKKAILHVYWEEFQKDPVGLMSRVAQPASKKIDQNKLKPEMDEKGNLTTAGFACSQCGQPLFVYKLEQVSEKGKAYTNYFGRCNVAEHEKLILLAQLKPEKDSDEAVTYSLGKFGQRALDFYSIHVTKESTHPVKPLAQIAGNRYASVPVGKALSDACMGTIASFLSKYQDIIIEHQKVVKGNQKRLESLRELAGKENLEYPSVTLPPQPHTKEGVDAYNEVIARVRMWVNLNLWQKLKLSRDDAKPLLRLKGFPSFPLVERQANAEVDWWDMVCNVKKLINEKKEDGKVFWQNLAGYKRQEALRPYLSSEEDRKKGKKFARYQLGDLLWHLEKKHGEDWGKVYDEAWERIDKKVEGLSKHIKLEEERRSEDAQSKAALTDWLRAKASFVIEGLKEADKDEFCRCELKLQKWYGDLRGKPFAIEAENSILDISGFSKQYNCAFIWQKDGVKKLNLYLIINYFKGGKLRFKKIKPEAFEANRFYTVINKKSGEIVPMEVNFNFDDPNLIILPLAFGKRQGREFIWNDLLSLETGSLKLANGRVIEKTLYNRRTRQDEPALFVALTFERREVLDSSNIKPMNLIGVDRGENIPAVIALTDPEGCPLSRFKDSLGNPTHILRIGESYKEKQRTIQAKKEVEQRRAGGYSRKYASKAKNLADDMVRNTARDLLYYAVTQDAMLIFENLSRGFGRQGKRTFMAERQYTRMEDWLTAKLAYEGLPSKTYLSKTLAQYTSKTCSNCGFTITSADYDRVLEKLKKTATGWMTTINGKELKVEGQITYYNRYKRQNVVKDLSVELDRLSEESVNNDISSWTKGRSGEALSLLKKRFSHRPVQEKFVCLNCGFETHADEQAALNIARSWLFLRSQEYKKYQTNKTTGNTDKRAFVETWQSFYRKKLKEVWKPAV

SEQ ID NO: 44262 - protein, 979 aa, synthetic construct
  REGION 1..979: note = engineered CasX variant
QEIKRINKIRRRLVKDSNTKKAGKTGPMKTLLVRVMTPDLRERLENLRKKPENIPQPISNTSRANLNKLLTDYTEMKKAILHVYWEEFQKDPVGLMSRVAQPASKKIDQNKLKPEMDEKGNLTTAGFACSQCGQPLFVYKLEQVSEKGKAYTNYFGRCNVAEHEKLIKLAQLKPEKDSDEAVTYSLGKFGQRALDFYSIHVTKESTHPVKPLAQIAGNRYASGPVGKALSDACMGTIASFLSKYQDIIIEHQKVVKGNQKRLESLRELAGKENLEYPSVTLPPQPHTKEGVDAYNEVIARVRMWVNLNLWQKLKLSRDDAKPLLRLKGFPSFPLVERQANAEVDWWDMVCNVKKLINEKKEDGKVFWQNLAGYKRQEALRPYLSSEEDRKKGKKFARYQLGDLLWHLEKKHGEDWGKVYDEAWERIDKKVEGLSKHIKLEEERRSEDAQSKAALTDWLRAKASFVIEGLKEADKDEFCRCELKLQKWYGDLRGKPFAIEAENSILDISGFSKQYNCAFIWQKDGVKKLNLYLIINYFKGGKLRFKKIKPEAFEANRFYTVINKKSGEIVPMEVNFNFDDPNLIILPLAFGKRQGREFIWNDLLSLETGSLKLANGRVIEKTLYNRRTRQDEPALFVALTFERREVLDSSNIKPMNLIGVDRGENIPAVIALTDPEGCPLSRFKDSLGNPTHILRIGESYKEKQRTIQAKKEVEQRRAGGYSRKYASKAKNLADDMVRNTARDLLYYAVTQDAMLIFENLSRGFGRQGKRTFMAERQYTRMEDWLTAKLAYEGLPSKTYLSKTLAQYTSKTCSNCGFTITSADYDRVLEKLKKTATGWMTTINGKELKVEGQITYYNRYKRQNVVKDLSVELDRLSEESVNNDISSWTKGRSGEALSLLKKRFSHRPVQEKFVCLNCGFETHADEQAALNIARSWLFLRSQEYKKYQTNKTTGNTDKRAFVETWQSFYRKKLKEVWKPAV

SEQ ID NO: 44263 - protein, 978 aa, synthetic construct
  REGION 1..978: note = engineered CasX variant
QEIKRINKIRRRLVKDSNTKKAGKTGPMKTLLVRVMTPDLRERLENLRKKPENIPQPISNTSRANLNKLLTDYTEMKKAILHVYWEEFQKDPVGLMSRVAQPASKKIDQNKLKPEMDEKGNLTTAGFACSQCGQPLFVYKLEQVSEKGKAYTNYFGRCNVAEHEKLILLAQLKPEKDSDEAVTYSLGKFGQRALDFYSIHVTKESTHPVKPLAQIAGNRYASPVGKALSDACMGTIASFLSKYQDIIIEHQKVVKGNQKRLESLRELAGKENLEYPSVTLPPQPHTKEGVDAYNEVIARVRMWVNLNLWQKLKLSRDDAKPLLRLKGFPSFPLVERQANAEVDWWDMVCNVKKLINEKKEDGKVFWQNLAGYKRQEALRPYLSSEEDRKKGKKFARYQLGDLLWHLEKKHGEDWGKVYDEAWERIDKKVEGLSKHIKLEEERRSEDAQSKAALTDWLRAKASFVIEGLKEADKDEFCRCELKLQKWYGDLRGKPFAIEAENSILDISGFSKQYNCAFIWQKDGVKKLNLYLIINYFKGGKLRFKKIKPEAFEANRFYTVINKKSGEIVPMEVNFNFDDPNLIILPLAFGKRQGREFIWNDLLSLETGSLKLANGRVIEKTLYNRRTRQDEPALFVALTFERREVLDSSNIKPMNLIGVDRGENIPAVIALTDPEGCPLSRFKDSLGNPTHILRIGESYKEKQRTIQAKKEVEQRRAGGYSRKYASKAKNLADDMVRNTARDLLYYAVTQDAMLIFENLSRGFGRQGKRTFMAERQYTRMEDWLTAKLAYEGLPSKTYLSKTLAQYTSKTCSNCGFTITSADYDRVLEKLKKTATGWMTTINGKELKVEGQITYYNRYKRQNVVKDLSVELDRLSEESVNNDISSWTKGRSGEALSLLKKRFSHRPVQEKFVCLNCGFETHADEQAALNIARSWLFLRSQEYKKYQTNKTTGNTDKRAFVETWQSFYRKKLKEVWKPAV

SEQ ID NO: 44264 - protein, 979 aa, synthetic construct
  REGION 1..979: note = engineered CasX variant
QEIKRINKIRRRLVKDSNTKKAGKTGPMKTLLVRVMTPDLRERLENLRKKPENIPQPISNTSRANLNKLLTDYTEMKKAILHVYWEEFQKDPVGLMSRVAQPASKKIDQNKLKPEMDEKGNLTTAGFACSQCGQPLFVYKLEQVSEKGKAYTNYFGRCNVAEHEKLILLAQLKPEKDSDEAVTYSLGKFGQRALDFYSIHVTKESTHPVKPLAQIAGNRYASYPVGKALSDACMGTIASFLSKYQDIIIEHQKVVKGNQKRLESLRELAGKENLEYPSVTLPPQPHTKEGVDAYNEVIARVRMWVNLNLWQKLKLSRDDAKPLLRLKGFPSFPLVERQANAEVDWWDMVCNVKKLINEKKEDGKVFWQNLAGYKRQEALRPYLSSEEDRKKGKKFARYQLGDLLLHLYKKHGEDWGKVYDEAWERIDKKVEGLSKHIKLEEERRSEDAQSKAALTDWLRAKASFVIEGLKEADKDEFCRCELKLQKWYGDLRGKPFAIEAENSILDISGFSKQYNCAFIWQKDGVKKLNLYLIINYFKGGKLRFKKIKPEAFEANRFYTVINKKSGEIVPMEVNFNFDDPNLIILPLAFGKRQGREFIWNDLLSLETGSLKLANGRVIEKTLYNRRTRQDEPALFVALTFERREVLDSSNIKPMNLIGVDRGENIPAVIALTDPEGCPLSRFKDSLGNPTHILRIGESYKEKQRTIQAKKEVEQRRAGGYSRKYASKAKNLADDMVRNTARDLLYYAVTQDAMLIFENLSRGFGRQGKRTFMAERQYTRMEDWLTAKLAYEGLPSKTYLSKTLAQYTSKTCSNCGFTITSADYDRVLEKLKKTATGWMTTINGKELKVEGQITYYNRYKRQNVVKDLSVELDRLSEESVNNDISSWTKGRSGEALSLLKKRFSHRPVQEKFVCLNCGFETHADEQAALNIARSWLFLRSQEYKKYQTNKTTGNTDKRAFVETWQSFYRKKLKEVWKPAV

SEQ ID NO: 44265 - protein, 979 aa, synthetic construct
  REGION 1..979: note = engineered CasX variant
QEIKRINKIRRRLVKDSNTKKAGKTGPMKTLLVRVMTPDLRERLENLRKKPENIPQPISNTSRANLNKLLTDYTEMKKAILHVYWEEFQKDPVGLMSRVAQPASKKIDQNKLKPEMDEKGNLTTAGFACSQCGQPLFVYKLEQVSEKGKAYTNYFGRCNVAEHEKLILLAQLKPEKDSDEAVTYSLGKFGQRALDFYSIHVTKESTHPVKPLAQIAGNRYASHPVGKALSDACMGTIASFLSKYQDIIIEHQKVVKGNQKRLESLRELAGKENLEYPSVTLPPQPHTKEGVDAYNEVIARVRMWVNLNLWQKLKLSRDDAKPLLRLKGFPSFPLVERQANAEVDWWDMVCNVKKLINEKKEDGKVFWQNLAGYKRQEALRPYLSSEEDRKKGKKFARYQLGDLLLHLYKKHGEDWGKVYDEAWERIDKKVEGLSKHIKLEEERRSEDAQSKAALTDWLRAKASFVIEGLKEADKDEFCRCELKLQKWYGDLRGKPFAIEAENSILDISGFSKQYNCAFIWQKDGVKKLNLYLIINYFKGGKLRFKKIKPEAFEANRFYTVINKKSGEIVPMEVNFNFDDPNLIILPLAFGKRQGREFIWNDLLSLETGSLKLANGRVIEKTLYNRRTRQDEPALFVALTFERREVLDSSNIKPMNLIGVDRGENIPAVIALTDPEGCPLSRFKDSLGNPTHILRIGESYKEKQRTIQAKKEVEQRRAGGYSRKYASKAKNLADDMVRNTARDLLYYAVTQDAMLIFENLSRGFGRQGKRTFMAERQYTRMEDWLTAKLAYEGLPSKTYLSKTLAQYTSKTCSNCGFTITSADYDRVLEKLKKTATGWMTTINGKELKVEGQITYYNRYKRQNVVKDLSVELDRLSEESVNNDISSWTKGRSGEALSLLKKRFSHRPVQEKFVCLNCGFETHADEQAALNIARSWLFLRSQEYKKYQTNKTTGNTDKRAFVETWQSFYRKKLKEVWKPAV

SEQ ID NO: 44266 - protein, 979 aa, synthetic construct
  REGION 1..979: note = engineered CasX variant
QEIKRINKIRRRLVKDSNTKKAGKTGPMKTLLVRVMTPDLRERLENLRKKPENIPQPISNTSRANLNKLLTDYTEMKKAILHVYWEEFQKDPVGLMSRVAQPASKKIDQNKLKPEMDEKGNLTTAGFACSQCGQPLFVYKLEQVSEKGKAYTNYFGRCNVAEHEKLILLAQLKPEKDSDEAVTYSLGKFGQRALDFYSIHVTKESTHPVKPLAQIAGNRYASSPVGKALSDACMGTIASFLSKYQDIIIEHQKVVKGNQKRLESLRELAGKENLEYPSVTLPPQPHTKEGVDAYNEVIARVRMWVNLNLWQKLKLSRDDAKPLLRLKGFPSFPLVERQANAEVDWWDMVCNVKKLINEKKEDGKVFWQNLAGYKRQEALRPYLSSEEDRKKGKKFARYQLGDLLLHLYKKHGEDWGKVYDEAWERIDKKVEGLSKHIKLEEERRSEDAQSKAALTDWLRAKASFVIEGLKEADKDEFCRCELKLQKWYGDLRGKPFAIEAENSILDISGFSKQYNCAFIWQKDGVKKLNLYLIINYFKGGKLRFKKIKPEAFEANRFYTVINKKSGEIVPMEVNFNFDDPNLIILPLAFGKRQGREFIWNDLLSLETGSLKLANGRVIEKTLYNRRTRQDEPALFVALTFERREVLDSSNIKPMNLIGVDRGENIPAVIALTDPEGCPLSRFKDSLGNPTHILRIGESYKEKQRTIQAKKEVEQRRAGGYSRKYASKAKNLADDMVRNTARDLLYYAVTQDAMLIFENLSRGFGRQGKRTFMAERQYTRMEDWLTAKLAYEGLPSKTYLSKTLAQYTSKTCSNCGFTITSADYDRVLEKLKKTATGWMTTINGKELKVEGQITYYNRYKRQNVVKDLSVELDRLSEESVNNDISSWTKGRSGEALSLLKKRFSHRPVQEKFVCLNCGFETHADEQAALNIARSWLFLRSQEYKKYQTNKTTGNTDKRAFVETWQSFYRKKLKEVWKPAV

SEQ ID NO: 44267 - protein, 979 aa, synthetic construct
  REGION 1..979: note = engineered CasX variant
QEIKRINKIRRRLVKDSNTKKAGKTGPMKTLLVRVMTPDLRERLENLRKKPENIPQPISNTSRANLNKLLTDYTEMKKAILHVYWEEFQKDPVGLMSRVAQPASKKIDQNKLKPEMDEKGNLTTAGFACSQCGQPLFVYKLEQVSEKGKAYTNYFGRCNVAEHEKLILLAQLKPEKDSDEAVTYSLGKFGQRALDFYSIHVTKESTHPVKPLAQIAGNRYASTPVGKALSDACMGTIASFLSKYQDIIIEHQKVVKGNQKRLESLRELAGKENLEYPSVTLPPQPHTKEGVDAYNEVIARVRMWVNLNLWQKLKLSRDDAKPLLRLKGFPSFPLVERQANAEVDWWDMVCNVKKLINEKKEDGKVFWQNLAGYKRQEALRPYLSSEEDRKKGKKFARYQLGDLLLHLYKKHGEDWGKVYDEAWERIDKKVEGLSKHIKLEEERRSEDAQSKAALTDWLRAKASFVIEGLKEADKDEFCRCELKLQKWYGDLRGKPFAIEAENSILDISGFSKQYNCAFIWQKDGVKKLNLYLIINYFKGGKLRFKKIKPEAFEANRFYTVINKKSGEIVPMEVNFNFDDPNLIILPLAFGKRQGREFIWNDLLSLETGSLKLANGRVIEKTLYNRRTRQDEPALFVALTFERREVLDSSNIKPMNLIGVDRGENIPAVIALTDPEGCPLSRFKDSLGNPTHILRIGESYKEKQRTIQAKKEVEQRRAGGYSRKYASKAKNLADDMVRNTARDLLYYAVTQDAMLIFENLSRGFGRQGKRTFMAERQYTRMEDWLTAKLAYEGLPSKTYLSKTLAQYTSKTCSNCGFTITSADYDRVLEKLKKTATGWMTTINGKELKVEGQITYYNRYKRQNVVKDLSVELDRLSEESVNNDISSWTKGRSGEALSLLKKRFSHRPVQEKFVCLNCGFETHADEQAALNIARSWLFLRSQEYKKYQTNKTTGNTDKRAFVETWQSFYRKKLKEVWKPAV

SEQ ID NO: 44268 - protein, 979 aa, synthetic construct
  REGION 1..979: note = engineered CasX variant
QEIKRINKIRRRLVKDSNTKKAGKTGPMKTLLVRVMTPDLRERLENLRKKPENIPQPISNTSRANLNKLLTDYTEMKKAILHVYWEEFQKDPVGLMSRVAQPASKKIDQNKLKPEMDEKGNLTTAGFACSQCGQPLFVYKLEQVSEKGKAYTNYFGRCNVAEHEKLILLAQLKPEKDSDEAVTYSLGKFGQRALDFYSIHVTKESTHPVKPLAQIAGNRYASAPVGKALSDACMGTIASFLSKYQDIIIEHQKVVKGNQKRLESLRELAGKENLEYPSVTLPPQPHTKEGVDAYNEVIARVRMWVNLNLWQKLKLSRDDAKPLLRLKGFPSFPLVERQANAEVDWWDMVCNVKKLINEKKEDGKVFWQNLAGYKRQEALRPYLSSEEDRKKGKKFARYQLGDLLLHLYKKHGEDWGKVYDEAWERIDKKVEGLSKHIKLEEERRSEDAQSKAALTDWLRAKASFVIEGLKEADKDEFCRCELKLQKWYGDLRGKPFAIEAENSILDISGFSKQYNCAFIWQKDGVKKLNLYLIINYFKGGKLRFKKIKPEAFEANRFYTVINKKSGEIVPMEVNFNFDDPNLIILPLAFGKRQGREFIWNDLLSLETGSLKLANGRVIEKTLYNRRTRQDEPALFVALTFERREVLDSSNIKPMNLIGVDRGENIPAVIALTDPEGCPLSRFKDSLGNPTHILRIGESYKEKQRTIQAKKEVEQRRAGGYSRKYASKAKNLADDMVRNTARDLLYYAVTQDAMLIFENLSRGFGRQGKRTFMAERQYTRMEDWLTAKLAYEGLPSKTYLSKTLAQYTSKTCSNCGFTITSADYDRVLEKLKKTATGWMTTINGKELKVEGQITYYNRYKRQNVVKDLSVELDRLSEESVNNDISSWTKGRSGEALSLLKKRFSHRPVQEKFVCLNCGFETHADEQAALNIARSWLFLRSQEYKKYQTNKTTGNTDKRAFVETWQSFYRKKLKEVWKPAV

SEQ ID NO: 44269 - protein, 979 aa, synthetic construct
  REGION 1..979: note = engineered CasX variant
QEIKRINKIRRRLVKDSNTKKAGKTGPMKTLLVRVMTPDLRERLENLRKKPENIPQPISNTSRANLNKLLTDYTEMKKAILHVYWEEFQKDPVGLMSRVAQPASKKIDQNKLKPEMDEKGNLTTAGFACSQCGQPLFVYKLEQVSEKGKAYTNYFGRCNVAEHEKLILLAQLKPEKDSDEAVTYSLGKFGQRALDFYSIHVTKESTHPVKPLAQIAGNRYASVPVGKALSDACMGTIASFLSKYQDIIIEHQKVVKGNQKRLESLRELAGKENLEYPSVTLPPQPHTKEGVDAYNEVIARVRMWVNLNLWQKLKLSRDDAKPLLRLKGFPSFPLVERQANAEVDWWDMVCNVKKLINEKKEDGKVFWQNLAGYKRQEALRPYLSSEEDRKKGKKFARYQLGDLLLHLYKKHGEDWGKVYDEAWERIDKKVEGLSKHIKLEEERRSEDAQSKAALTDWLRAKASFVIEGLKEADKDEFCRCELKLQKWYGDLRGKPFAIEAENSILDISGFSKQYNCAFIWQKDGVKKLNLYLIINYFKGGKLRFKKIKPEAFEANRFYTVINKKSGEIVPMEVNFNFDDPNLIILPLAFGKRQGREFIWNDLLSLETGSLKLANGRVIEKTLYNRRTRQDEPALFVALTFERREVLDSSNIKPMNLIGVDRGENIPAVIALTDPEGCPLSRFKDSLGNPTHILRIGESYKEKQRTIQAKKEVEQRRAGGYSRKYASKAKNLADDMVRNTARDLLYYAVTQDAMLIFENLSRGFGRQGKRTFMAERQYTRMEDWLTAKLAYEGLPSKTYLSKTLAQYTSKTCSNCGFTITSADYDRVLEKLKKTATGWMTTINGKELKVEGQITYYNRYKRQNVVKDLSVELDRLSEESVNNDISSWTKGRSGEALSLLKKRFSHRPVQEKFVCLNCGFETHADEQAALNIARSWLFLRSQEYKKYQTNKTTGNTDKRAFVETWQSFYRKKLKEVWKPAV

SEQ ID NO: 44270 - protein, 979 aa, synthetic construct
  REGION 1..979: note = engineered CasX variant
QEIKRINKIRRRLVKDSNTKKAGKTGPMKTLLVRVMTPDLRERLENLRKKPENIPQPISNTSRANLNKLLTDYTEMKKAILHVYWEEFQKDPVGLMSRVAQPASKKIDQNKLKPEMDEKGNLTTAGFACSQCGQPLFVYKLEQVSEKGKAYTNYFGRCNVAEHEKLIKLAQLKPEKDSDEAVTYSLGKFGQRALDFYSIHVTKESTHPVKPLAQIAGNRYASGPVGKALSDACMGTIASFLSKYQDIIIEHQKVVKGNQKRLESLRELAGKENLEYPSVTLPPQPHTKEGVDAYNEVIARVRMWVNLNLWQKLKLSRDDAKPLLRLKGFPSFPLVERQANAEVDWWDMVCNVKKLINEKKEDGKVFWQNLAGYKRQEALRPYLSSEEDRKKGKKFARYQLGDLLLHLYKKHGEDWGKVYDEAWERIDKKVEGLSKHIKLEEERRSEDAQSKAALTDWLRAKASFVIEGLKEADKDEFCRCELKLQKWYGDLRGKPFAIEAENSILDISGFSKQYNCAFIWQKDGVKKLNLYLIINYFKGGKLRFKKIKPEAFEANRFYTVINKKSGEIVPMEVNFNFDDPNLIILPLAFGKRQGREFIWNDLLSLETGSLKLANGRVIEKTLYNRRTRQDEPALFVALTFERREVLDSSNIKPMNLIGVDRGENIPAVIALTDPEGCPLSRFKDSLGNPTHILRIGESYKEKQRTIQAKKEVEQRRAGGYSRKYASKAKNLADDMVRNTARDLLYYAVTQDAMLIFENLSRGFGRQGKRTFMAERQYTRMEDWLTAKLAYEGLPSKTYLSKTLAQYTSKTCSNCGFTITSADYDRVLEKLKKTATGWMTTINGKELKVEGQITYYNRYKRQNVVKDLSVELDRLSEESVNNDISSWTKGRSGEALSLLKKRFSHRPVQEKFVCLNCGFETHADEQAALNIARSWLFLRSQEYKKYQTNKTTGNTDKRAFVETWQSFYRKKLKEVWKPAV

SEQ ID NO: 44271 - protein, 978 aa, synthetic construct
  REGION 1..978: note = engineered CasX variant
QEIKRINKIRRRLVKDSNTKKAGKTGPMKTLLVRVMTPDLRERLENLRKKPENIPQPISNTSRANLNKLLTDYTEMKKAILHVYWEEFQKDPVGLMSRVAQPASKKIDQNKLKPEMDEKGNLTTAGFACSQCGQPLFVYKLEQVSEKGKAYTNYFGRCNVAEHEKLILLAQLKPEKDSDEAVTYSLGKFGQRALDFYSIHVTKESTHPVKPLAQIAGNRYASPVGKALSDACMGTIASFLSKYQDIIIEHQKVVKGNQKRLESLRELAGKENLEYPSVTLPPQPHTKEGVDAYNEVIARVRMWVNLNLWQKLKLSRDDAKPLLRLKGFPSFPLVERQANAEVDWWDMVCNVKKLINEKKEDGKVFWQNLAGYKRQEALRPYLSSEEDRKKGKKFARYQLGDLLLHLYKKHGEDWGKVYDEAWERIDKKVEGLSKHIKLEEERRSEDAQSKAALTDWLRAKASFVIEGLKEADKDEFCRCELKLQKWYGDLRGKPFAIEAENSILDISGFSKQYNCAFIWQKDGVKKLNLYLIINYFKGGKLRFKKIKPEAFEANRFYTVINKKSGEIVPMEVNFNFDDPNLIILPLAFGKRQGREFIWNDLLSLETGSLKLANGRVIEKTLYNRRTRQDEPALFVALTFERREVLDSSNIKPMNLIGVDRGENIPAVIALTDPEGCPLSRFKDSLGNPTHILRIGESYKEKQRTIQAKKEVEQRRAGGYSRKYASKAKNLADDMVRNTARDLLYYAVTQDAMLIFENLSRGFGRQGKRTFMAERQYTRMEDWLTAKLAYEGLPSKTYLSKTLAQYTSKTCSNCGFTITSADYDRVLEKLKKTATGWMTTINGKELKVEGQITYYNRYKRQNVVKDLSVELDRLSEESVNNDISSWTKGRSGEALSLLKKRFSHRPVQEKFVCLNCGFETHADEQAALNIARSWLFLRSQEYKKYQTNKTTGNTDKRAFVETWQSFYRKKLKEVWKPAV

SEQ ID NO: 44272 - protein, 979 aa, synthetic construct
  REGION 1..979: note = engineered CasX variant
QEIKRINKIRRRLVKDSNTKKAGKTGPMKTLLVRVMTPDLRERLENLRKKPENIPQPISNTSRANLNKLLTDYTEMKKAILHVYWEEFQKDPVGLMSRVAQPASKKIDQNKLKPEMDEKGNLTTAGFACSQCGQPLFVYKLEQVSEKGKAYTNYFGRCNVAEHEKLILLAQLKPEKDSDEAVTYSLGKFGQRALDFYSIHVTKESTHPVKPLAQIAGNRYASYPVGKALSDACMGTIASFLSKYQDIIIEHQKVVKGNQKRLESLRELAGKENLEYPSVTLPPQPHTKEGVDAYNEVIARVRMWVNLNLWQKLKLSRDDAKPLLRLKGFPSFPLVERQANAEVDWWDMVCNVKKLINEKKEDGKVFWQNLAGYKRQEALRPYLSSEEDRKKGKKFARYQLGDLLLHLEKKHPEDWGKVYDEAWERIDKKVEGLSKHIKLEEERRSEDAQSKAALTDWLRAKASFVIEGLKEADKDEFCRCELKLQKWYGDLRGKPFAIEAENSILDISGFSKQYNCAFIWQKDGVKKLNLYLIINYFKGGKLRFKKIKPEAFEANRFYTVINKKSGEIVPMEVNFNFDDPNLIILPLAFGKRQGREFIWNDLLSLETGSLKLANGRVIEKTLYNRRTRQDEPALFVALTFERREVLDSSNIKPMNLIGVDRGENIPAVIALTDPEGCPLSRFKDSLGNPTHILRIGESYKEKQRTIQAKKEVEQRRAGGYSRKYASKAKNLADDMVRNTARDLLYYAVTQDAMLIFENLSRGFGRQGKRTFMAERQYTRMEDWLTAKLAYEGLPSKTYLSKTLAQYTSKTCSNCGFTITSADYDRVLEKLKKTATGWMTTINGKELKVEGQITYYNRYKRQNVVKDLSVELDRLSEESVNNDISSWTKGRSGEALSLLKKRFSHRPVQEKFVCLNCGFETHADEQAALNIARSWLFLRSQEYKKYQTNKTTGNTDKRAFVETWQSFYRKKLKEVWKPAV

SEQ ID NO: 44273 - protein, 979 aa, synthetic construct
  REGION 1..979: note = engineered CasX variant
QEIKRINKIRRRLVKDSNTKKAGKTGPMKTLLVRVMTPDLRERLENLRKKPENIPQPISNTSRANLNKLLTDYTEMKKAILHVYWEEFQKDPVGLMSRVAQPASKKIDQNKLKPEMDEKGNLTTAGFACSQCGQPLFVYKLEQVSEKGKAYTNYFGRCNVAEHEKLILLAQLKPEKDSDEAVTYSLGKFGQRALDFYSIHVTKESTHPVKPLAQIAGNRYASHPVGKALSDACMGTIASFLSKYQDIIIEHQKVVKGNQKRLESLRELAGKENLEYPSVTLPPQPHTKEGVDAYNEVIARVRMWVNLNLWQKLKLSRDDAKPLLRLKGFPSFPLVERQANAEVDWWDMVCNVKKLINEKKEDGKVFWQNLAGYKRQEALRPYLSSEEDRKKGKKFARYQLGDLLLHLEKKHPEDWGKVYDEAWERIDKKVEGLSKHIKLEEERRSEDAQSKAALTDWLRAKASFVIEGLKEADKDEFCRCELKLQKWYGDLRGKPFAIEAENSILDISGFSKQYNCAFIWQKDGVKKLNLYLIINYFKGGKLRFKKIKPEAFEANRFYTVINKKSGEIVPMEVNFNFDDPNLIILPLAFGKRQGREFIWNDLLSLETGSLKLANGRVIEKTLYNRRTRQDEPALFVALTFERREVLDSSNIKPMNLIGVDRGENIPAVIALTDPEGCPLSRFKDSLGNPTHILRIGESYKEKQRTIQAKKEVEQRRAGGYSRKYASKAKNLADDMVRNTARDLLYYAVTQDAMLIFENLSRGFGRQGKRTFMAERQYTRMEDWLTAKLAYEGLPSKTYLSKTLAQYTSKTCSNCGFTITSADYDRVLEKLKKTATGWMTTINGKELKVEGQITYYNRYKRQNVVKDLSVELDRLSEESVNNDISSWTKGRSGEALSLLKKRFSHRPVQEKFVCLNCGFETHADEQAALNIARSWLFLRSQEYKKYQTNKTTGNTDKRAFVETWQSFYRKKLKEVWKPAV

SEQ ID NO: 44274 - protein, 979 aa, synthetic construct
  REGION 1..979: note = engineered CasX variant
QEIKRINKIRRRLVKDSNTKKAGKTGPMKTLLVRVMTPDLRERLENLRKKPENIPQPISNTSRANLNKLLTDYTEMKKAILHVYWEEFQKDPVGLMSRVAQPASKKIDQNKLKPEMDEKGNLTTAGFACSQCGQPLFVYKLEQVSEKGKAYTNYFGRCNVAEHEKLILLAQLKPEKDSDEAVTYSLGKFGQRALDFYSIHVTKESTHPVKPLAQIAGNRYASSPVGKALSDACMGTIASFLSKYQDIIIEHQKVVKGNQKRLESLRELAGKENLEYPSVTLPPQPHTKEGVDAYNEVIARVRMWVNLNLWQKLKLSRDDAKPLLRLKGFPSFPLVERQANAEVDWWDMVCNVKKLINEKKEDGKVFWQNLAGYKRQEALRPYLSSEEDRKKGKKFARYQLGDLLLHLEKKHPEDWGKVYDEAWERIDKKVEGLSKHIKLEEERRSEDAQSKAALTDWLRAKASFVIEGLKEADKDEFCRCELKLQKWYGDLRGKPFAIEAENSILDISGFSKQYNCAFIWQKDGVKKLNLYLIINYFKGGKLRFKKIKPEAFEANRFYTVINKKSGEIVPMEVNFNFDDPNLIILPLAFGKRQGREFIWNDLLSLETGSLKLANGRVIEKTLYNRRTRQDEPALFVALTFERREVLDSSNIKPMNLIGVDRGENIPAVIALTDPEGCPLSRFKDSLGNPTHILRIGESYKEKQRTIQAKKEVEQRRAGGYSRKYASKAKNLADDMVRNTARDLLYYAVTQDAMLIFENLSRGFGRQGKRTFMAERQYTRMEDWLTAKLAYEGLPSKTYLSKTLAQYTSKTCSNCGFTITSADYDRVLEKLKKTATGWMTTINGKELKVEGQITYYNRYKRQNVVKDLSVELDRLSEESVNNDISSWTKGRSGEALSLLKKRFSHRPVQEKFVCLNCGFETHADEQAALNIARSWLFLRSQEYKKYQTNKTTGNTDKRAFVETWQSFYRKKLKEVWKPAV

SEQ ID NO: 44275 - protein, 979 aa, synthetic construct
  REGION 1..979: note = engineered CasX variant
QEIKRINKIRRRLVKDSNTKKAGKTGPMKTLLVRVMTPDLRERLENLRKKPENIPQPISNTSRANLNKLLTDYTEMKKAILHVYWEEFQKDPVGLMSRVAQPASKKIDQNKLKPEMDEKGNLTTAGFACSQCGQPLFVYKLEQVSEKGKAYTNYFGRCNVAEHEKLILLAQLKPEKDSDEAVTYSLGKFGQRALDFYSIHVTKESTHPVKPLAQIAGNRYASTPVGKALSDACMGTIASFLSKYQDIIIEHQKVVKGNQKRLESLRELAGKENLEYPSVTLPPQPHTKEGVDAYNEVIARVRMWVNLNLWQKLKLSRDDAKPLLRLKGFPSFPLVERQANAEVDWWDMVCNVKKLINEKKEDGKVFWQNLAGYKRQEALRPYLSSEEDRKKGKKFARYQLGDLLLHLEKKHPEDWGKVYDEAWERIDKKVEGLSKHIKLEEERRSEDAQSKAALTDWLRAKASFVIEGLKEADKDEFCRCELKLQKWYGDLRGKPFAIEAENSILDISGFSKQYNCAFIWQKDGVKKLNLYLIINYFKGGKLRFKKIKPEAFEANRFYTVINKKSGEIVPMEVNFNFDDPNLIILPLAFGKRQGREFIWNDLLSLETGSLKLANGRVIEKTLYNRRTRQDEPALFVALTFERREVLDSSNIKPMNLIGVDRGENIPAVIALTDPEGCPLSRFKDSLGNPTHILRIGESYKEKQRTIQAKKEVEQRRAGGYSRKYASKAKNLADDMVRNTARDLLYYAVTQDAMLIFENLSRGFGRQGKRTFMAERQYTRMEDWLTAKLAYEGLPSKTYLSKTLAQYTSKTCSNCGFTITSADYDRVLEKLKKTATGWMTTINGKELKVEGQITYYNRYKRQNVVKDLSVELDRLSEESVNNDISSWTKGRSGEALSLLKKRFSHRPVQEKFVCLNCGFETHADEQAALNIARSWLFLRSQEYKKYQTNKTTGNTDKRAFVETWQSFYRKKLKEVWKPAV

SEQ ID NO: 44276 - protein, 979 aa, synthetic construct
  REGION 1..979: note = engineered CasX variant
QEIKRINKIRRRLVKDSNTKKAGKTGPMKTLLVRVMTPDLRERLENLRKKPENIPQPISNTSRANLNKLLTDYTEMKKAILHVYWEEFQKDPVGLMSRVAQPASKKIDQNKLKPEMDEKGNLTTAGFACSQCGQPLFVYKLEQVSEKGKAYTNYFGRCNVAEHEKLILLAQLKPEKDSDEAVTYSLGKFGQRALDFYSIHVTKESTHPVKPLAQIAGNRYASAPVGKALSDACMGTIASFLSKYQDIIIEHQKVVKGNQKRLESLRELAGKENLEYPSVTLPPQPHTKEGVDAYNEVIARVRMWVNLNLWQKLKLSRDDAKPLLRLKGFPSFPLVERQANAEVDWWDMVCNVKKLINEKKEDGKVFWQNLAGYKRQEALRPYLSSEEDRKKGKKFARYQLGDLLLHLEKKHPEDWGKVYDEAWERIDKKVEGLSKHIKLEEERRSEDAQSKAALTDWLRAKASFVIEGLKEADKDEFCRCELKLQKWYGDLRGKPFAIEAENSILDISGFSKQYNCAFIWQKDGVKKLNLYLIINYFKGGKLRFKKIKPEAFEANRFYTVINKKSGEIVPMEVNFNFDDPNLIILPLAFGKRQGREFIWNDLLSLETGSLKLANGRVIEKTLYNRRTRQDEPALFVALTFERREVLDSSNIKPMNLIGVDRGENIPAVIALTDPEGCPLSRFKDSLGNPTHILRIGESYKEKQRTIQAKKEVEQRRAGGYSRKYASKAKNLADDMVRNTARDLLYYAVTQDAMLIFENLSRGFGRQGKRTFMAERQYTRMEDWLTAKLAYEGLPSKTYLSKTLAQYTSKTCSNCGFTITSADYDRVLEKLKKTATGWMTTINGKELKVEGQITYYNRYKRQNVVKDLSVELDRLSEESVNNDISSWTKGRSGEALSLLKKRFSHRPVQEKFVCLNCGFETHADEQAALNIARSWLFLRSQEYKKYQTNKTTGNTDKRAFVETWQSFYRKKLKEVWKPAV

SEQ ID NO: 44277 - protein, 979 aa, synthetic construct
  REGION 1..979: note = engineered CasX variant
QEIKRINKIRRRLVKDSNTKKAGKTGPMKTLLVRVMTPDLRERLENLRKKPENIPQPISNTSRANLNKLLTDYTEMKKAILHVYWEEFQKDPVGLMSRVAQPASKKIDQNKLKPEMDEKGNLTTAGFACSQCGQPLFVYKLEQVSEKGKAYTNYFGRCNVAEHEKLILLAQLKPEKDSDEAVTYSLGKFGQRALDFYSIHVTKESTHPVKPLAQIAGNRYASVPVGKALSDACMGTIASFLSKYQDIIIEHQKVVKGNQKRLESLRELAGKENLEYPSVTLPPQPHTKEGVDAYNEVIARVRMWVNLNLWQKLKLSRDDAKPLLRLKGFPSFPLVERQANAEVDWWDMVCNVKKLINEKKEDGKVFWQNLAGYKRQEALRPYLSSEEDRKKGKKFARYQLGDLLLHLEKKHPEDWGKVYDEAWERIDKKVEGLSKHIKLEEERRSEDAQSKAALTDWLRAKASFVIEGLKEADKDEFCRCELKLQKWYGDLRGKPFAIEAENSILDISGFSKQYNCAFIWQKDGVKKLNLYLIINYFKGGKLRFKKIKPEAFEANRFYTVINKKSGEIVPMEVNFNFDDPNLIILPLAFGKRQGREFIWNDLLSLETGSLKLANGRVIEKTLYNRRTRQDEPALFVALTFERREVLDSSNIKPMNLIGVDRGENIPAVIALTDPEGCPLSRFKDSLGNPTHILRIGESYKEKQRTIQAKKEVEQRRAGGYSRKYASKAKNLADDMVRNTARDLLYYAVTQDAMLIFENLSRGFGRQGKRTFMAERQYTRMEDWLTAKLAYEGLPSKTYLSKTLAQYTSKTCSNCGFTITSADYDRVLEKLKKTATGWMTTINGKELKVEGQITYYNRYKRQNVVKDLSVELDRLSEESVNNDISSWTKGRSGEALSLLKKRFSHRPVQEKFVCLNCGFETHADEQAALNIARSWLFLRSQEYKKYQTNKTTGNTDKRAFVETWQSFYRKKLKEVWKPAV

SEQ ID NO: 44278 - protein, 979 aa, synthetic construct
  REGION 1..979: note = engineered CasX variant
QEIKRINKIRRRLVKDSNTKKAGKTGPMKTLLVRVMTPDLRERLENLRKKPENIPQPISNTSRANLNKLLTDYTEMKKAILHVYWEEFQKDPVGLMSRVAQPASKKIDQNKLKPEMDEKGNLTTAGFACSQCGQPLFVYKLEQVSEKGKAYTNYFGRCNVAEHEKLIKLAQLKPEKDSDEAVTYSLGKFGQRALDFYSIHVTKESTHPVKPLAQIAGNRYASGPVGKALSDACMGTIASFLSKYQDIIIEHQKVVKGNQKRLESLRELAGKENLEYPSVTLPPQPHTKEGVDAYNEVIARVRMWVNLNLWQKLKLSRDDAKPLLRLKGFPSFPLVERQANAEVDWWDMVCNVKKLINEKKEDGKVFWQNLAGYKRQEALRPYLSSEEDRKKGKKFARYQLGDLLLHLEKKHPEDWGKVYDEAWERIDKKVEGLSKHIKLEEERRSEDAQSKAALTDWLRAKASFVIEGLKEADKDEFCRCELKLQKWYGDLRGKPFAIEAENSILDISGFSKQYNCAFIWQKDGVKKLNLYLIINYFKGGKLRFKKIKPEAFEANRFYTVINKKSGEIVPMEVNFNFDDPNLIILPLAFGKRQGREFIWNDLLSLETGSLKLANGRVIEKTLYNRRTRQDEPALFVALTFERREVLDSSNIKPMNLIGVDRGENIPAVIALTDPEGCPLSRFKDSLGNPTHILRIGESYKEKQRTIQAKKEVEQRRAGGYSRKYASKAKNLADDMVRNTARDLLYYAVTQDAMLIFENLSRGFGRQGKRTFMAERQYTRMEDWLTAKLAYEGLPSKTYLSKTLAQYTSKTCSNCGFTITSADYDRVLEKLKKTATGWMTTINGKELKVEGQITYYNRYKRQNVVKDLSVELDRLSEESVNNDISSWTKGRSGEALSLLKKRFSHRPVQEKFVCLNCGFETHADEQAALNIARSWLFLRSQEYKKYQTNKTTGNTDKRAFVETWQSFYRKKLKEVWKPAV

SEQ ID NO: 44279 - protein, 978 aa, synthetic construct
  REGION 1..978: note = engineered CasX variant
QEIKRINKIRRRLVKDSNTKKAGKTGPMKTLLVRVMTPDLRERLENLRKKPENIPQPISNTSRANLNKLLTDYTEMKKAILHVYWEEFQKDPVGLMSRVAQPASKKIDQNKLKPEMDEKGNLTTAGFACSQCGQPLFVYKLEQVSEKGKAYTNYFGRCNVAEHEKLILLAQLKPEKDSDEAVTYSLGKFGQRALDFYSIHVTKESTHPVKPLAQIAGNRYASPVGKALSDACMGTIASFLSKYQDIIIEHQKVVKGNQKRLESLRELAGKENLEYPSVTLPPQPHTKEGVDAYNEVIARVRMWVNLNLWQKLKLSRDDAKPLLRLKGFPSFPLVERQANAEVDWWDMVCNVKKLINEKKEDGKVFWQNLAGYKRQEALRPYLSSEEDRKKGKKFARYQLGDLLLHLEKKHPEDWGKVYDEAWERIDKKVEGLSKHIKLEEERRSEDAQSKAALTDWLRAKASFVIEGLKEADKDEFCRCELKLQKWYGDLRGKPFAIEAENSILDISGFSKQYNCAFIWQKDGVKKLNLYLIINYFKGGKLRFKKIKPEAFEANRFYTVINKKSGEIVPMEVNFNFDDPNLIILPLAFGKRQGREFIWNDLLSLETGSLKLANGRVIEKTLYNRRTRQDEPALFVALTFERREVLDSSNIKPMNLIGVDRGENIPAVIALTDPEGCPLSRFKDSLGNPTHILRIGESYKEKQRTIQAKKEVEQRRAGGYSRKYASKAKNLADDMVRNTARDLLYYAVTQDAMLIFENLSRGFGRQGKRTFMAERQYTRMEDWLTAKLAYEGLPSKTYLSKTLAQYTSKTCSNCGFTITSADYDRVLEKLKKTATGWMTTINGKELKVEGQITYYNRYKRQNVVKDLSVELDRLSEESVNNDISSWTKGRSGEALSLLKKRFSHRPVQEKFVCLNCGFETHADEQAALNIARSWLFLRSQEYKKYQTNKTTGNTDKRAFVETWQSFYRKKLKEVWKPAV

SEQ ID NO: 44280 - protein, 980 aa, synthetic construct
  REGION 1..980: note = engineered CasX variant
QEIKRINKIRRRLVKDSNTKKAGKTGPMKTLLVRVMTPDLRERLENLRKKPENIPQPISNTSRANLNKLLTDYTEMKKAILHVYWEEFQKDPVGLMSRVAQPASKKIDQNKLKPEMDEKGNLTTAGFACSQCGQPLFVYKLEQVSEKGKAYTNYFGRCNVAEHEKLILLAQLKPEKDSDEAVTYSLGKFGQRALDFYSIHVTKESTHPVKPLAQIAGNRYASYPVGKALSDACMGTIASFLSKYQDIIIEHQKVVKGNQKRLESLRELAGKENLEYPSVTLPPQPHTKEGVDAYNEVIARVRMWVNLNLWQKLKLSRDDAKPLLRLKGFPSFPLVERQANAEVDWWDMVCNVKKLINEKKEDGKVFWQNLAGYKRQEALRPYLSSEEDRKKGKKFARYQLGDLLLHLEKKHGERDWGKVYDEAWERIDKKVEGLSKHIKLEEERRSEDAQSKAALTDWLRAKASFVIEGLKEADKDEFCRCELKLQKWYGDLRGKPFAIEAENSILDISGFSKQYNCAFIWQKDGVKKLNLYLIINYFKGGKLRFKKIKPEAFEANRFYTVINKKSGEIVPMEVNFNFDDPNLIILPLAFGKRQGREFIWNDLLSLETGSLKLANGRVIEKTLYNRRTRQDEPALFVALTFERREVLDSSNIKPMNLIGVDRGENIPAVIALTDPEGCPLSRFKDSLGNPTHILRIGESYKEKQRTIQAKKEVEQRRAGGYSRKYASKAKNLADDMVRNTARDLLYYAVTQDAMLIFENLSRGFGRQGKRTFMAERQYTRMEDWLTAKLAYEGLPSKTYLSKTLAQYTSKTCSNCGFTITSADYDRVLEKLKKTATGWMTTINGKELKVEGQITYYNRYKRQNVVKDLSVELDRLSEESVNNDISSWTKGRSGEALSLLKKRFSHRPVQEKFVCLNCGFETHADEQAALNIARSWLFLRSQEYKKYQTNKTTGNTDKRAFVETWQSFYRKKLKEVWKPAV

SEQ ID NO: 44281 - protein, 980 aa, synthetic construct
  REGION 1..980: note = engineered CasX variant
QEIKRINKIRRRLVKDSNTKKAGKTGPMKTLLVRVMTPDLRERLENLRKKPENIPQPISNTSRANLNKLLTDYTEMKKAILHVYWEEFQKDPVGLMSRVAQPASKKIDQNKLKPEMDEKGNLTTAGFACSQCGQPLFVYKLEQVSEKGKAYTNYFGRCNVAEHEKLILLAQLKPEKDSDEAVTYSLGKFGQRALDFYSIHVTKESTHPVKPLAQIAGNRYASHPVGKALSDACMGTIASFLSKYQDIIIEHQKVVKGNQKRLESLRELAGKENLEYPSVTLPPQPHTKEGVDAYNEVIARVRMWVNLNLWQKLKLSRDDAKPLLRLKGFPSFPLVERQANAEVDWWDMVCNVKKLINEKKEDGKVFWQNLAGYKRQEALRPYLSSEEDRKKGKKFARYQLGDLLLHLEKKHGERDWGKVYDEAWERIDKKVEGLSKHIKLEEERRSEDAQSKAALTDWLRAKASFVIEGLKEADKDEFCRCELKLQKWYGDLRGKPFAIEAENSILDISGFSKQYNCAFIWQKDGVKKLNLYLIINYFKGGKLRFKKIKPEAFEANRFYTVINKKSGEIVPMEVNFNFDDPNLIILPLAFGKRQGREFIWNDLLSLETGSLKLANGRVIEKTLYNRRTRQDEPALFVALTFERREVLDSSNIKPMNLIGVDRGENIPAVIALTDPEGCPLSRFKDSLGNPTHILRIGESYKEKQRTIQAKKEVEQRRAGGYSRKYASKAKNLADDMVRNTARDLLYYAVTQDAMLIFENLSRGFGRQGKRTFMAERQYTRMEDWLTAKLAYEGLPSKTYLSKTLAQYTSKTCSNCGFTITSADYDRVLEKLKKTATGWMTTINGKELKVEGQITYYNRYKRQNVVKDLSVELDRLSEESVNNDISSWTKGRSGEALSLLKKRFSHRPVQEKFVCLNCGFETHADEQAALNIARSWLFLRSQEYKKYQTNKTTGNTDKRAFVETWQSFYRKKLKEVWKPAV

SEQ ID NO: 44282 - protein, 980 aa, synthetic construct
  REGION 1..980: note = engineered CasX variant
QEIKRINKIRRRLVKDSNTKKAGKTGPMKTLLVRVMTPDLRERLENLRKKPENIPQPISNTSRANLNKLLTDYTEMKKAILHVYWEEFQKDPVGLMSRVAQPASKKIDQNKLKPEMDEKGNLTTAGFACSQCGQPLFVYKLEQVSEKGKAYTNYFGRCNVAEHEKLILLAQLKPEKDSDEAVTYSLGKFGQRALDFYSIHVTKESTHPVKPLAQIAGNRYASSPVGKALSDACMGTIASFLSKYQDIIIEHQKVVKGNQKRLESLRELAGKENLEYPSVTLPPQPHTKEGVDAYNEVIARVRMWVNLNLWQKLKLSRDDAKPLLRLKGFPSFPLVERQANAEVDWWDMVCNVKKLINEKKEDGKVFWQNLAGYKRQEALRPYLSSEEDRKKGKKFARYQLGDLLLHLEKKHGERDWGKVYDEAWERIDKKVEGLSKHIKLEEERRSEDAQSKAALTDWLRAKASFVIEGLKEADKDEFCRCELKLQKWYGDLRGKPFAIEAENSILDISGFSKQYNCAFIWQKDGVKKLNLYLIINYFKGGKLRFKKIKPEAFEANRFYTVINKKSGEIVPMEVNFNFDDPNLIILPLAFGKRQGREFIWNDLLSLETGSLKLANGRVIEKTLYNRRTRQDEPALFVALTFERREVLDSSNIKPMNLIGVDRGENIPAVIALTDPEGCPLSRFKDSLGNPTHILRIGESYKEKQRTIQAKKEVEQRRAGGYSRKYASKAKNLADDMVRNTARDLLYYAVTQDAMLIFENLSRGFGRQGKRTFMAERQYTRMEDWLTAKLAYEGLPSKTYLSKTLAQYTSKTCSNCGFTITSADYDRVLEKLKKTATGWMTTINGKELKVEGQITYYNRYKRQNVVKDLSVELDRLSEESVNNDISSWTKGRSGEALSLLKKRFSHRPVQEKFVCLNCGFETHADEQAALNIARSWLFLRSQEYKKYQTNKTTGNTDKRAFVETWQSFYRKKLKEVWKPAV

SEQ ID NO: 44283 - protein, 980 aa, synthetic construct
  REGION 1..980: note = engineered CasX variant
QEIKRINKIRRRLVKDSNTKKAGKTGPMKTLLVRVMTPDLRERLENLRKKPENIPQPISNTSRANLNKLLTDYTEMKKAILHVYWEEFQKDPVGLMSRVAQPASKKIDQNKLKPEMDEKGNLTTAGFACSQCGQPLFVYKLEQVSEKGKAYTNYFGRCNVAEHEKLILLAQLKPEKDSDEAVTYSLGKFGQRALDFYSIHVTKESTHPVKPLAQIAGNRYASTPVGKALSDACMGTIASFLSKYQDIIIEHQKVVKGNQKRLESLRELAGKENLEYPSVTLPPQPHTKEGVDAYNEVIARVRMWVNLNLWQKLKLSRDDAKPLLRLKGFPSFPLVERQANAEVDWWDMVCNVKKLINEKKEDGKVFWQNLAGYKRQEALRPYLSSEEDRKKGKKFARYQLGDLLLHLEKKHGERDWGKVYDEAWERIDKKVEGLSKHIKLEEERRSEDAQSKAALTDWLRAKASFVIEGLKEADKDEFCRCELKLQKWYGDLRGKPFAIEAENSILDISGFSKQYNCAFIWQKDGVKKLNLYLIINYFKGGKLRFKKIKPEAFEANRFYTVINKKSGEIVPMEVNFNFDDPNLIILPLAFGKRQGREFIWNDLLSLETGSLKLANGRVIEKTLYNRRTRQDEPALFVALTFERREVLDSSNIKPMNLIGVDRGENIPAVIALTDPEGCPLSRFKDSLGNPTHILRIGESYKEKQRTIQAKKEVEQRRAGGYSRKYASKAKNLADDMVRNTARDLLYYAVTQDAMLIFENLSRGFGRQGKRTFMAERQYTRMEDWLTAKLAYEGLPSKTYLSKTLAQYTSKTCSNCGFTITSADYDRVLEKLKKTATGWMTTINGKELKVEGQITYYNRYKRQNVVKDLSVELDRLSEESVNNDISSWTKGRSGEALSLLKKRFSHRPVQEKFVCLNCGFETHADEQAALNIARSWLFLRSQEYKKYQTNKTTGNTDKRAFVETWQSFYRKKLKEVWKPAV

SEQ ID NO: 44284 - protein, 980 aa, synthetic construct
  REGION 1..980: note = engineered CasX variant
QEIKRINKIRRRLVKDSNTKKAGKTGPMKTLLVRVMTPDLRERLENLRKKPENIPQPISNTSRANLNKLLTDYTEMKKAILHVYWEEFQKDPVGLMSRVAQPASKKIDQNKLKPEMDEKGNLTTAGFACSQCGQPLFVYKLEQVSEKGKAYTNYFGRCNVAEHEKLILLAQLKPEKDSDEAVTYSLGKFGQRALDFYSIHVTKESTHPVKPLAQIAGNRYASAPVGKALSDACMGTIASFLSKYQDIIIEHQKVVKGNQKRLESLRELAGKENLEYPSVTLPPQPHTKEGVDAYNEVIARVRMWVNLNLWQKLKLSRDDAKPLLRLKGFPSFPLVERQANAEVDWWDMVCNVKKLINEKKEDGKVFWQNLAGYKRQEALRPYLSSEEDRKKGKKFARYQLGDLLLHLEKKHGERDWGKVYDEAWERIDKKVEGLSKHIKLEEERRSEDAQSKAALTDWLRAKASFVIEGLKEADKDEFCRCELKLQKWYGDLRGKPFAIEAENSILDISGFSKQYNCAFIWQKDGVKKLNLYLIINYFKGGKLRFKKIKPEAFEANRFYTVINKKSGEIVPMEVNFNFDDPNLIILPLAFGKRQGREFIWNDLLSLETGSLKLANGRVIEKTLYNRRTRQDEPALFVALTFERREVLDSSNIKPMNLIGVDRGENIPAVIALTDPEGCPLSRFKDSLGNPTHILRIGESYKEKQRTIQAKKEVEQRRAGGYSRKYASKAKNLADDMVRNTARDLLYYAVTQDAMLIFENLSRGFGRQGKRTFMAERQYTRMEDWLTAKLAYEGLPSKTYLSKTLAQYTSKTCSNCGFTITSADYDRVLEKLKKTATGWMTTINGKELKVEGQITYYNRYKRQNVVKDLSVELDRLSEESVNNDISSWTKGRSGEALSLLKKRFSHRPVQEKFVCLNCGFETHADEQAALNIARSWLFLRSQEYKKYQTNKTTGNTDKRAFVETWQSFYRKKLKEVWKPAV

SEQ ID NO: 44285 - protein, 980 aa, synthetic construct
  REGION 1..980: note = engineered CasX variant
QEIKRINKIRRRLVKDSNTKKAGKTGPMKTLLVRVMTPDLRERLENLRKKPENIPQPISNTSRANLNKLLTDYTEMKKAILHVYWEEFQKDPVGLMSRVAQPASKKIDQNKLKPEMDEKGNLTTAGFACSQCGQPLFVYKLEQVSEKGKAYTNYFGRCNVAEHEKLILLAQLKPEKDSDEAVTYSLGKFGQRALDFYSIHVTKESTHPVKPLAQIAGNRYASVPVGKALSDACMGTIASFLSKYQDIIIEHQKVVKGNQKRLESLRELAGKENLEYPSVTLPPQPHTKEGVDAYNEVIARVRMWVNLNLWQKLKLSRDDAKPLLRLKGFPSFPLVERQANAEVDWWDMVCNVKKLINEKKEDGKVFWQNLAGYKRQEALRPYLSSEEDRKKGKKFARYQLGDLLLHLEKKHGERDWGKVYDEAWERIDKKVEGLSKHIKLEEERRSEDAQSKAALTDWLRAKASFVIEGLKEADKDEFCRCELKLQKWYGDLRGKPFAIEAENSILDISGFSKQYNCAFIWQKDGVKKLNLYLIINYFKGGKLRFKKIKPEAFEANRFYTVINKKSGEIVPMEVNFNFDDPNLIILPLAFGKRQGREFIWNDLLSLETGSLKLANGRVIEKTLYNRRTRQDEPALFVALTFERREVLDSSNIKPMNLIGVDRGENIPAVIALTDPEGCPLSRFKDSLGNPTHILRIGESYKEKQRTIQAKKEVEQRRAGGYSRKYASKAKNLADDMVRNTARDLLYYAVTQDAMLIFENLSRGFGRQGKRTFMAERQYTRMEDWLTAKLAYEGLPSKTYLSKTLAQYTSKTCSNCGFTITSADYDRVLEKLKKTATGWMTTINGKELKVEGQITYYNRYKRQNVVKDLSVELDRLSEESVNNDISSWTKGRSGEALSLLKKRFSHRPVQEKFVCLNCGFETHADEQAALNIARSWLFLRSQEYKKYQTNKTTGNTDKRAFVETWQSFYRKKLKEVWKPAV

SEQ ID NO: 44286 - protein, 980 aa, synthetic construct
  REGION 1..980: note = engineered CasX variant
QEIKRINKIRRRLVKDSNTKKAGKTGPMKTLLVRVMTPDLRERLENLRKKPENIPQPISNTSRANLNKLLTDYTEMKKAILHVYWEEFQKDPVGLMSRVAQPASKKIDQNKLKPEMDEKGNLTTAGFACSQCGQPLFVYKLEQVSEKGKAYTNYFGRCNVAEHEKLIKLAQLKPEKDSDEAVTYSLGKFGQRALDFYSIHVTKESTHPVKPLAQIAGNRYASGPVGKALSDACMGTIASFLSKYQDIIIEHQKVVKGNQKRLESLRELAGKENLEYPSVTLPPQPHTKEGVDAYNEVIARVRMWVNLNLWQKLKLSRDDAKPLLRLKGFPSFPLVERQANAEVDWWDMVCNVKKLINEKKEDGKVFWQNLAGYKRQEALRPYLSSEEDRKKGKKFARYQLGDLLLHLEKKHGERDWGKVYDEAWERIDKKVEGLSKHIKLEEERRSEDAQSKAALTDWLRAKASFVIEGLKEADKDEFCRCELKLQKWYGDLRGKPFAIEAENSILDISGFSKQYNCAFIWQKDGVKKLNLYLIINYFKGGKLRFKKIKPEAFEANRFYTVINKKSGEIVPMEVNFNFDDPNLIILPLAFGKRQGREFIWNDLLSLETGSLKLANGRVIEKTLYNRRTRQDEPALFVALTFERREVLDSSNIKPMNLIGVDRGENIPAVIALTDPEGCPLSRFKDSLGNPTHILRIGESYKEKQRTIQAKKEVEQRRAGGYSRKYASKAKNLADDMVRNTARDLLYYAVTQDAMLIFENLSRGFGRQGKRTFMAERQYTRMEDWLTAKLAYEGLPSKTYLSKTLAQYTSKTCSNCGFTITSADYDRVLEKLKKTATGWMTTINGKELKVEGQITYYNRYKRQNVVKDLSVELDRLSEESVNNDISSWTKGRSGEALSLLKKRFSHRPVQEKFVCLNCGFETHADEQAALNIARSWLFLRSQEYKKYQTNKTTGNTDKRAFVETWQSFYRKKLKEVWKPAV

SEQ ID NO: 44287 - protein, 979 aa, synthetic construct
  REGION 1..979: note = engineered CasX variant
QEIKRINKIRRRLVKDSNTKKAGKTGPMKTLLVRVMTPDLRERLENLRKKPENIPQPISNTSRANLNKLLTDYTEMKKAILHVYWEEFQKDPVGLMSRVAQPASKKIDQNKLKPEMDEKGNLTTAGFACSQCGQPLFVYKLEQVSEKGKAYTNYFGRCNVAEHEKLILLAQLKPEKDSDEAVTYSLGKFGQRALDFYSIHVTKESTHPVKPLAQIAGNRYASPVGKALSDACMGTIASFLSKYQDIIIEHQKVVKGNQKRLESLRELAGKENLEYPSVTLPPQPHTKEGVDAYNEVIARVRMWVNLNLWQKLKLSRDDAKPLLRLKGFPSFPLVERQANAEVDWWDMVCNVKKLINEKKEDGKVFWQNLAGYKRQEALRPYLSSEEDRKKGKKFARYQLGDLLLHLEKKHGERDWGKVYDEAWERIDKKVEGLSKHIKLEEERRSEDAQSKAALTDWLRAKASFVIEGLKEADKDEFCRCELKLQKWYGDLRGKPFAIEAENSILDISGFSKQYNCAFIWQKDGVKKLNLYLIINYFKGGKLRFKKIKPEAFEANRFYTVINKKSGEIVPMEVNFNFDDPNLIILPLAFGKRQGREFIWNDLLSLETGSLKLANGRVIEKTLYNRRTRQDEPALFVALTFERREVLDSSNIKPMNLIGVDRGENIPAVIALTDPEGCPLSRFKDSLGNPTHILRIGESYKEKQRTIQAKKEVEQRRAGGYSRKYASKAKNLADDMVRNTARDLLYYAVTQDAMLIFENLSRGFGRQGKRTFMAERQYTRMEDWLTAKLAYEGLPSKTYLSKTLAQYTSKTCSNCGFTITSADYDRVLEKLKKTATGWMTTINGKELKVEGQITYYNRYKRQNVVKDLSVELDRLSEESVNNDISSWTKGRSGEALSLLKKRFSHRPVQEKFVCLNCGFETHADEQAALNIARSWLFLRSQEYKKYQTNKTTGNTDKRAFVETWQSFYRKKLKEVWKPAV

SEQ ID NO: 44288 - protein, 980 aa, synthetic construct
  REGION 1..980: note = engineered CasX variant
QEIKRINKIRRRLVKDSNTKKAGKTGPMKTLLVRVMTPDLRERLENLRKKPENIPQPISNTSRANLNKLLTDYTEMKKAILHVYWEEFQKDPVGLMSRVAQPASKKIDQNKLKPEMDEKGNLTTAGFACSQCGQPLFVYKLEQVSEKGKAYTNYFGRCNVAEHEKLILLAQLKPEKDSDEAVTYSLGKFGQRALDFYSIHVTKESTHPVKPLAQIAGNRYASYPVGKALSDACMGTIASFLSKYQDIIIEHQKVVKGNQKRLESLRELAGKENLEYPSVTLPPQPHTKEGVDAYNEVIARVRMWVNLNLWQKLKLSRDDAKPLLRLKGFPSFPLVERQANAEVDWWDMVCNVKKLINEKKEDGKVFWQNLAGYKRQEALRPYLSSEEDRKKGKKFARYQLGDLLLHLEKKHGEYDWGKVYDEAWERIDKKVEGLSKHIKLEEERRSEDAQSKAALTDWLRAKASFVIEGLKEADKDEFCRCELKLQKWYGDLRGKPFAIEAENSILDISGFSKQYNCAFIWQKDGVKKLNLYLIINYFKGGKLRFKKIKPEAFEANRFYTVINKKSGEIVPMEVNFNFDDPNLIILPLAFGKRQGREFIWNDLLSLETGSLKLANGRVIEKTLYNRRTRQDEPALFVALTFERREVLDSSNIKPMNLIGVDRGENIPAVIALTDPEGCPLSRFKDSLGNPTHILRIGESYKEKQRTIQAKKEVEQRRAGGYSRKYASKAKNLADDMVRNTARDLLYYAVTQDAMLIFENLSRGFGRQGKRTFMAERQYTRMEDWLTAKLAYEGLPSKTYLSKTLAQYTSKTCSNCGFTITSADYDRVLEKLKKTATGWMTTINGKELKVEGQITYYNRYKRQNVVKDLSVELDRLSEESVNNDISSWTKGRSGEALSLLKKRFSHRPVQEKFVCLNCGFETHADEQAALNIARSWLFLRSQEYKKYQTNKTTGNTDKRAFVETWQSFYRKKLKEVWKPAV

SEQ ID NO: 44289 - protein, 980 aa, synthetic construct
  REGION 1..980: note = engineered CasX variant
QEIKRINKIRRRLVKDSNTKKAGKTGPMKTLLVRVMTPDLRERLENLRKKPENIPQPISNTSRANLNKLLTDYTEMKKAILHVYWEEFQKDPVGLMSRVAQPASKKIDQNKLKPEMDEKGNLTTAGFACSQCGQPLFVYKLEQVSEKGKAYTNYFGRCNVAEHEKLILLAQLKPEKDSDEAVTYSLGKFGQRALDFYSIHVTKESTHPVKPLAQIAGNRYASHPVGKALSDACMGTIASFLSKYQDIIIEHQKVVKGNQKRLESLRELAGKENLEYPSVTLPPQPHTKEGVDAYNEVIARVRMWVNLNLWQKLKLSRDDAKPLLRLKGFPSFPLVERQANAEVDWWDMVCNVKKLINEKKEDGKVFWQNLAGYKRQEALRPYLSSEEDRKKGKKFARYQLGDLLLHLEKKHGEYDWGKVYDEAWERIDKKVEGLSKHIKLEEERRSEDAQSKAALTDWLRAKASFVIEGLKEADKDEFCRCELKLQKWYGDLRGKPFAIEAENSILDISGFSKQYNCAFIWQKDGVKKLNLYLIINYFKGGKLRFKKIKPEAFEANRFYTVINKKSGEIVPMEVNFNFDDPNLIILPLAFGKRQGREFIWNDLLSLETGSLKLANGRVIEKTLYNRRTRQDEPALFVALTFERREVLDSSNIKPMNLIGVDRGENIPAVIALTDPEGCPLSRFKDSLGNPTHILRIGESYKEKQRTIQAKKEVEQRRAGGYSRKYASKAKNLADDMVRNTARDLLYYAVTQDAMLIFENLSRGFGRQGKRTFMAERQYTRMEDWLTAKLAYEGLPSKTYLSKTLAQYTSKTCSNCGFTITSADYDRVLEKLKKTATGWMTTINGKELKVEGQITYYNRYKRQNVVKDLSVELDRLSEESVNNDISSWTKGRSGEALSLLKKRFSHRPVQEKFVCLNCGFETHADEQAALNIARSWLFLRSQEYKKYQTNKTTGNTDKRAFVETWQSFYRKKLKEVWKPAV

SEQ ID NO: 44290 - protein, 980 aa, synthetic construct
  REGION 1..980: note = engineered CasX variant
QEIKRINKIRRRLVKDSNTKKAGKTGPMKTLLVRVMTPDLRERLENLRKKPENIPQPISNTSRANLNKLLTDYTEMKKAILHVYWEEFQKDPVGLMSRVAQPASKKIDQNKLKPEMDEKGNLTTAGFACSQCGQPLFVYKLEQVSEKGKAYTNYFGRCNVAEHEKLILLAQLKPEKDSDEAVTYSLGKFGQRALDFYSIHVTKESTHPVKPLAQIAGNRYASSPVGKALSDACMGTIASFLSKYQDIIIEHQKVVKGNQKRLESLRELAGKENLEYPSVTLPPQPHTKEGVDAYNEVIARVRMWVNLNLWQKLKLSRDDAKPLLRLKGFPSFPLVERQANAEVDWWDMVCNVKKLINEKKEDGKVFWQNLAGYKRQEALRPYLSSEEDRKKGKKFARYQLGDLLLHLEKKHGEYDWGKVYDEAWERIDKKVEGLSKHIKLEEERRSEDAQSKAALTDWLRAKASFVIEGLKEADKDEFCRCELKLQKWYGDLRGKPFAIEAENSILDISGFSKQYNCAFIWQKDGVKKLNLYLIINYFKGGKLRFKKIKPEAFEANRFYTVINKKSGEIVPMEVNFNFDDPNLIILPLAFGKRQGREFIWNDLLSLETGSLKLANGRVIEKTLYNRRTRQDEPALFVALTFERREVLDSSNIKPMNLIGVDRGENIPAVIALTDPEGCPLSRFKDSLGNPTHILRIGESYKEKQRTIQAKKEVEQRRAGGYSRKYASKAKNLADDMVRNTARDLLYYAVTQDAMLIFENLSRGFGRQGKRTFMAERQYTRMEDWLTAKLAYEGLPSKTYLSKTLAQYTSKTCSNCGFTITSADYDRVLEKLKKTATGWMTTINGKELKVEGQITYYNRYKRQNVVKDLSVELDRLSEESVNNDISSWTKGRSGEALSLLKKRFSHRPVQEKFVCLNCGFETHADEQAALNIARSWLFLRSQEYKKYQTNKTTGNTDKRAFVETWQSFYRKKLKEVWKPAV

SEQ ID NO: 44291 - protein, 980 aa, synthetic construct
  REGION 1..980: note = engineered CasX variant
QEIKRINKIRRRLVKDSNTKKAGKTGPMKTLLVRVMTPDLRERLENLRKKPENIPQPISNTSRANLNKLLTDYTEMKKAILHVYWEEFQKDPVGLMSRVAQPASKKIDQNKLKPEMDEKGNLTTAGFACSQCGQPLFVYKLEQVSEKGKAYTNYFGRCNVAEHEKLILLAQLKPEKDSDEAVTYSLGKFGQRALDFYSIHVTKESTHPVKPLAQIAGNRYASTPVGKALSDACMGTIASFLSKYQDIIIEHQKVVKGNQKRLESLRELAGKENLEYPSVTLPPQPHTKEGVDAYNEVIARVRMWVNLNLWQKLKLSRDDAKPLLRLKGFPSFPLVERQANAEVDWWDMVCNVKKLINEKKEDGKVFWQNLAGYKRQEALRPYLSSEEDRKKGKKFARYQLGDLLLHLEKKHGEYDWGKVYDEAWERIDKKVEGLSKHIKLEEERRSEDAQSKAALTDWLRAKASFVIEGLKEADKDEFCRCELKLQKWYGDLRGKPFAIEAENSILDISGFSKQYNCAFIWQKDGVKKLNLYLIINYFKGGKLRFKKIKPEAFEANRFYTVINKKSGEIVPMEVNFNFDDPNLIILPLAFGKRQGREFIWNDLLSLETGSLKLANGRVIEKTLYNRRTRQDEPALFVALTFERREVLDSSNIKPMNLIGVDRGENIPAVIALTDPEGCPLSRFKDSLGNPTHILRIGESYKEKQRTIQAKKEVEQRRAGGYSRKYASKAKNLADDMVRNTARDLLYYAVTQDAMLIFENLSRGFGRQGKRTFMAERQYTRMEDWLTAKLAYEGLPSKTYLSKTLAQYTSKTCSNCGFTITSADYDRVLEKLKKTATGWMTTINGKELKVEGQITYYNRYKRQNVVKDLSVELDRLSEESVNNDISSWTKGRSGEALSLLKKRFSHRPVQEKFVCLNCGFETHADEQAALNIARSWLFLRSQEYKKYQTNKTTGNTDKRAFVETWQSFYRKKLKEVWKPAV

SEQ ID NO: 44292 - protein, 980 aa, synthetic construct
  REGION 1..980: note = engineered CasX variant
QEIKRINKIRRRLVKDSNTKKAGKTGPMKTLLVRVMTPDLRERLENLRKKPENIPQPISNTSRANLNKLLTDYTEMKKAILHVYWEEFQKDPVGLMSRVAQPASKKIDQNKLKPEMDEKGNLTTAGFACSQCGQPLFVYKLEQVSEKGKAYTNYFGRCNVAEHEKLILLAQLKPEKDSDEAVTYSLGKFGQRALDFYSIHVTKESTHPVKPLAQIAGNRYASAPVGKALSDACMGTIASFLSKYQDIIIEHQKVVKGNQKRLESLRELAGKENLEYPSVTLPPQPHTKEGVDAYNEVIARVRMWVNLNLWQKLKLSRDDAKPLLRLKGFPSFPLVERQANAEVDWWDMVCNVKKLINEKKEDGKVFWQNLAGYKRQEALRPYLSSEEDRKKGKKFARYQLGDLLLHLEKKHGEYDWGKVYDEAWERIDKKVEGLSKHIKLEEERRSEDAQSKAALTDWLRAKASFVIEGLKEADKDEFCRCELKLQKWYGDLRGKPFAIEAENSILDISGFSKQYNCAFIWQKDGVKKLNLYLIINYFKGGKLRFKKIKPEAFEANRFYTVINKKSGEIVPMEVNFNFDDPNLIILPLAFGKRQGREFIWNDLLSLETGSLKLANGRVIEKTLYNRRTRQDEPALFVALTFERREVLDSSNIKPMNLIGVDRGENIPAVIALTDPEGCPLSRFKDSLGNPTHILRIGESYKEKQRTIQAKKEVEQRRAGGYSRKYASKAKNLADDMVRNTARDLLYYAVTQDAMLIFENLSRGFGRQGKRTFMAERQYTRMEDWLTAKLAYEGLPSKTYLSKTLAQYTSKTCSNCGFTITSADYDRVLEKLKKTATGWMTTINGKELKVEGQITYYNRYKRQNVVKDLSVELDRLSEESVNNDISSWTKGRSGEALSLLKKRFSHRPVQEKFVCLNCGFETHADEQAALNIARSWLFLRSQEYKKYQTNKTTGNTDKRAFVETWQSFYRKKLKEVWKPAV

SEQ ID NO: 44293 - protein, 980 aa, synthetic construct
  REGION 1..980: note = engineered CasX variant
QEIKRINKIRRRLVKDSNTKKAGKTGPMKTLLVRVMTPDLRERLENLRKKPENIPQPISNTSRANLNKLLTDYTEMKKAILHVYWEEFQKDPVGLMSRVAQPASKKIDQNKLKPEMDEKGNLTTAGFACSQCGQPLFVYKLEQVSEKGKAYTNYFGRCNVAEHEKLILLAQLKPEKDSDEAVTYSLGKFGQRALDFYSIHVTKESTHPVKPLAQIAGNRYASVPVGKALSDACMGTIASFLSKYQDIIIEHQKVVKGNQKRLESLRELAGKENLEYPSVTLPPQPHTKEGVDAYNEVIARVRMWVNLNLWQKLKLSRDDAKPLLRLKGFPSFPLVERQANAEVDWWDMVCNVKKLINEKKEDGKVFWQNLAGYKRQEALRPYLSSEEDRKKGKKFARYQLGDLLLHLEKKHGEYDWGKVYDEAWERIDKKVEGLSKHIKLEEERRSEDAQSKAALTDWLRAKASFVIEGLKEADKDEFCRCELKLQKWYGDLRGKPFAIEAENSILDISGFSKQYNCAFIWQKDGVKKLNLYLIINYFKGGKLRFKKIKPEAFEANRFYTVINKKSGEIVPMEVNFNFDDPNLIILPLAFGKRQGREFIWNDLLSLETGSLKLANGRVIEKTLYNRRTRQDEPALFVALTFERREVLDSSNIKPMNLIGVDRGENIPAVIALTDPEGCPLSRFKDSLGNPTHILRIGESYKEKQRTIQAKKEVEQRRAGGYSRKYASKAKNLADDMVRNTARDLLYYAVTQDAMLIFENLSRGFGRQGKRTFMAERQYTRMEDWLTAKLAYEGLPSKTYLSKTLAQYTSKTCSNCGFTITSADYDRVLEKLKKTATGWMTTINGKELKVEGQITYYNRYKRQNVVKDLSVELDRLSEESVNNDISSWTKGRSGEALSLLKKRFSHRPVQEKFVCLNCGFETHADEQAALNIARSWLFLRSQEYKKYQTNKTTGNTDKRAFVETWQSFYRKKLKEVWKPAV

SEQ ID NO: 44294 - protein, 980 aa, synthetic construct
  REGION 1..980: note = engineered CasX variant
QEIKRINKIRRRLVKDSNTKKAGKTGPMKTLLVRVMTPDLRERLENLRKKPENIPQPISNTSRANLNKLLTDYTEMKKAILHVYWEEFQKDPVGLMSRVAQPASKKIDQNKLKPEMDEKGNLTTAGFACSQCGQPLFVYKLEQVSEKGKAYTNYFGRCNVAEHEKLIKLAQLKPEKDSDEAVTYSLGKFGQRALDFYSIHVTKESTHPVKPLAQIAGNRYASGPVGKALSDACMGTIASFLSKYQDIIIEHQKVVKGNQKRLESLRELAGKENLEYPSVTLPPQPHTKEGVDAYNEVIARVRMWVNLNLWQKLKLSRDDAKPLLRLKGFPSFPLVERQANAEVDWWDMVCNVKKLINEKKEDGKVFWQNLAGYKRQEALRPYLSSEEDRKKGKKFARYQLGDLLLHLEKKHGEYDWGKVYDEAWERIDKKVEGLSKHIKLEEERRSEDAQSKAALTDWLRAKASFVIEGLKEADKDEFCRCELKLQKWYGDLRGKPFAIEAENSILDISGFSKQYNCAFIWQKDGVKKLNLYLIINYFKGGKLRFKKIKPEAFEANRFYTVINKKSGEIVPMEVNFNFDDPNLIILPLAFGKRQGREFIWNDLLSLETGSLKLANGRVIEKTLYNRRTRQDEPALFVALTFERREVLDSSNIKPMNLIGVDRGENIPAVIALTDPEGCPLSRFKDSLGNPTHILRIGESYKEKQRTIQAKKEVEQRRAGGYSRKYASKAKNLADDMVRNTARDLLYYAVTQDAMLIFENLSRGFGRQGKRTFMAERQYTRMEDWLTAKLAYEGLPSKTYLSKTLAQYTSKTCSNCGFTITSADYDRVLEKLKKTATGWMTTINGKELKVEGQITYYNRYKRQNVVKDLSVELDRLSEESVNNDISSWTKGRSGEALSLLKKRFSHRPVQEKFVCLNCGFETHADEQAALNIARSWLFLRSQEYKKYQTNKTTGNTDKRAFVETWQSFYRKKLKEVWKPAV

SEQ ID NO: 44295 - protein, 979 aa, synthetic construct
  REGION 1..979: note = engineered CasX variant
QEIKRINKIRRRLVKDSNTKKAGKTGPMKTLLVRVMTPDLRERLENLRKKPENIPQPISNTSRANLNKLLTDYTEMKKAILHVYWEEFQKDPVGLMSRVAQPASKKIDQNKLKPEMDEKGNLTTAGFACSQCGQPLFVYKLEQVSEKGKAYTNYFGRCNVAEHEKLILLAQLKPEKDSDEAVTYSLGKFGQRALDFYSIHVTKESTHPVKPLAQIAGNRYASPVGKALSDACMGTIASFLSKYQDIIIEHQKVVKGNQKRLESLRELAGKENLEYPSVTLPPQPHTKEGVDAYNEVIARVRMWVNLNLWQKLKLSRDDAKPLLRLKGFPSFPLVERQANAEVDWWDMVCNVKKLINEKKEDGKVFWQNLAGYKRQEALRPYLSSEEDRKKGKKFARYQLGDLLLHLEKKHGEYDWGKVYDEAWERIDKKVEGLSKHIKLEEERRSEDAQSKAALTDWLRAKASFVIEGLKEADKDEFCRCELKLQKWYGDLRGKPFAIEAENSILDISGFSKQYNCAFIWQKDGVKKLNLYLIINYFKGGKLRFKKIKPEAFEANRFYTVINKKSGEIVPMEVNFNFDDPNLIILPLAFGKRQGREFIWNDLLSLETGSLKLANGRVIEKTLYNRRTRQDEPALFVALTFERREVLDSSNIKPMNLIGVDRGENIPAVIALTDPEGCPLSRFKDSLGNPTHILRIGESYKEKQRTIQAKKEVEQRRAGGYSRKYASKAKNLADDMVRNTARDLLYYAVTQDAMLIFENLSRGFGRQGKRTFMAERQYTRMEDWLTAKLAYEGLPSKTYLSKTLAQYTSKTCSNCGFTITSADYDRVLEKLKKTATGWMTTINGKELKVEGQITYYNRYKRQNVVKDLSVELDRLSEESVNNDISSWTKGRSGEALSLLKKRFSHRPVQEKFVCLNCGFETHADEQAALNIARSWLFLRSQEYKKYQTNKTTGNTDKRAFVETWQSFYRKKLKEVWKPAV

SEQ ID NO: 44296 - protein, 979 aa, synthetic construct
  REGION 1..979: note = engineered CasX variant
QEIKRINKIRRRLVKDSNTKKAGKTGPMKTLLVRVMTPDLRERLENLRKKPENIPQPISNTSRANLNKLLTDYTEMKKAILHVYWEEFQKDPVGLMSRVAQPASKKIDQNKLKPEMDEKGNLTTAGFACSQCGQPLFVYKLEQVSEKGKAYTNYFGRCNVAEHEKLILLAQLKPEKDSDEAVTYSLGKFGQRALDFYSIHVTKESTHPVKPLAQIAGNRYASYPVGKALSDACMGTIASFLSKYQDIIIEHQKVVKGNQKRLESLRELAGKENLEYPSVTLPPQPHTKEGVDAYNEVIARVRMWVNLNLWQKLKLSRDDAKPLLRLKGFPSFPLVERQANAEVDWWDMVCNVKKLINEKKEDGKVFWQNLAGYKRQEALRPYLSSEEDRKKGKKFARYQLGDLLLHLEKKHGEDWGDVYDEAWERIDKKVEGLSKHIKLEEERRSEDAQSKAALTDWLRAKASFVIEGLKEADKDEFCRCELKLQKWYGDLRGKPFAIEAENSILDISGFSKQYNCAFIWQKDGVKKLNLYLIINYFKGGKLRFKKIKPEAFEANRFYTVINKKSGEIVPMEVNFNFDDPNLIILPLAFGKRQGREFIWNDLLSLETGSLKLANGRVIEKTLYNRRTRQDEPALFVALTFERREVLDSSNIKPMNLIGVDRGENIPAVIALTDPEGCPLSRFKDSLGNPTHILRIGESYKEKQRTIQAKKEVEQRRAGGYSRKYASKAKNLADDMVRNTARDLLYYAVTQDAMLIFENLSRGFGRQGKRTFMAERQYTRMEDWLTAKLAYEGLPSKTYLSKTLAQYTSKTCSNCGFTITSADYDRVLEKLKKTATGWMTTINGKELKVEGQITYYNRYKRQNVVKDLSVELDRLSEESVNNDISSWTKGRSGEALSLLKKRFSHRPVQEKFVCLNCGFETHADEQAALNIARSWLFLRSQEYKKYQTNKTTGNTDKRAFVETWQSFYRKKLKEVWKPAV

SEQ ID NO: 44297 - protein, 979 aa, synthetic construct
  REGION 1..979: note = engineered CasX variant
QEIKRINKIRRRLVKDSNTKKAGKTGPMKTLLVRVMTPDLRERLENLRKKPENIPQPISNTSRANLNKLLTDYTEMKKAILHVYWEEFQKDPVGLMSRVAQPASKKIDQNKLKPEMDEKGNLTTAGFACSQCGQPLFVYKLEQVSEKGKAYTNYFGRCNVAEHEKLILLAQLKPEKDSDEAVTYSLGKFGQRALDFYSIHVTKESTHPVKPLAQIAGNRYASHPVGKALSDACMGTIASFLSKYQDIIIEHQKVVKGNQKRLESLRELAGKENLEYPSVTLPPQPHTKEGVDAYNEVIARVRMWVNLNLWQKLKLSRDDAKPLLRLKGFPSFPLVERQANAEVDWWDMVCNVKKLINEKKEDGKVFWQNLAGYKRQEALRPYLSSEEDRKKGKKFARYQLGDLLLHLEKKHGEDWGDVYDEAWERIDKKVEGLSKHIKLEEERRSEDAQSKAALTDWLRAKASFVIEGLKEADKDEFCRCELKLQKWYGDLRGKPFAIEAENSILDISGFSKQYNCAFIWQKDGVKKLNLYLIINYFKGGKLRFKKIKPEAFEANRFYTVINKKSGEIVPMEVNFNFDDPNLIILPLAFGKRQGREFIWNDLLSLETGSLKLANGRVIEKTLYNRRTRQDEPALFVALTFERREVLDSSNIKPMNLIGVDRGENIPAVIALTDPEGCPLSRFKDSLGNPTHILRIGESYKEKQRTIQAKKEVEQRRAGGYSRKYASKAKNLADDMVRNTARDLLYYAVTQDAMLIFENLSRGFGRQGKRTFMAERQYTRMEDWLTAKLAYEGLPSKTYLSKTLAQYTSKTCSNCGFTITSADYDRVLEKLKKTATGWMTTINGKELKVEGQITYYNRYKRQNVVKDLSVELDRLSEESVNNDISSWTKGRSGEALSLLKKRFSHRPVQEKFVCLNCGFETHADEQAALNIARSWLFLRSQEYKKYQTNKTTGNTDKRAFVETWQSFYRKKLKEVWKPAV

SEQ ID NO: 44298 - protein, 979 aa, synthetic construct
  REGION 1..979: note = engineered CasX variant
QEIKRINKIRRRLVKDSNTKKAGKTGPMKTLLVRVMTPDLRERLENLRKKPENIPQPISNTSRANLNKLLTDYTEMKKAILHVYWEEFQKDPVGLMSRVAQPASKKIDQNKLKPEMDEKGNLTTAGFACSQCGQPLFVYKLEQVSEKGKAYTNYFGRCNVAEHEKLILLAQLKPEKDSDEAVTYSLGKFGQRALDFYSIHVTKESTHPVKPLAQIAGNRYASSPVGKALSDACMGTIASFLSKYQDIIIEHQKVVKGNQKRLESLRELAGKENLEYPSVTLPPQPHTKEGVDAYNEVIARVRMWVNLNLWQKLKLSRDDAKPLLRLKGFPSFPLVERQANAEVDWWDMVCNVKKLINEKKEDGKVFWQNLAGYKRQEALRPYLSSEEDRKKGKKFARYQLGDLLLHLEKKHGEDWGDVYDEAWERIDKKVEGLSKHIKLEEERRSEDAQSKAALTDWLRAKASFVIEGLKEADKDEFCRCELKLQKWYGDLRGKPFAIEAENSILDISGFSKQYNCAFIWQKDGVKKLNLYLIINYFKGGKLRFKKIKPEAFEANRFYTVINKKSGEIVPMEVNFNFDDPNLIILPLAFGKRQGREFIWNDLLSLETGSLKLANGRVIEKTLYNRRTRQDEPALFVALTFERREVLDSSNIKPMNLIGVDRGENIPAVIALTDPEGCPLSRFKDSLGNPTHILRIGESYKEKQRTIQAKKEVEQRRAGGYSRKYASKAKNLADDMVRNTARDLLYYAVTQDAMLIFENLSRGFGRQGKRTFMAERQYTRMEDWLTAKLAYEGLPSKTYLSKTLAQYTSKTCSNCGFTITSADYDRVLEKLKKTATGWMTTINGKELKVEGQITYYNRYKRQNVVKDLSVELDRLSEESVNNDISSWTKGRSGEALSLLKKRFSHRPVQEKFVCLNCGFETHADEQAALNIARSWLFLRSQEYKKYQTNKTTGNTDKRAFVETWQSFYRKKLKEVWKPAV

SEQ ID NO: 44299 - protein, 979 aa, synthetic construct
  REGION 1..979: note = engineered CasX variant
QEIKRINKIRRRLVKDSNTKKAGKTGPMKTLLVRVMTPDLRERLENLRKKPENIPQPISNTSRANLNKLLTDYTEMKKAILHVYWEEFQKDPVGLMSRVAQPASKKIDQNKLKPEMDEKGNLTTAGFACSQCGQPLFVYKLEQVSEKGKAYTNYFGRCNVAEHEKLILLAQLKPEKDSDEAVTYSLGKFGQRALDFYSIHVTKESTHPVKPLAQIAGNRYASTPVGKALSDACMGTIASFLSKYQDIIIEHQKVVKGNQKRLESLRELAGKENLEYPSVTLPPQPHTKEGVDAYNEVIARVRMWVNLNLWQKLKLSRDDAKPLLRLKGFPSFPLVERQANAEVDWWDMVCNVKKLINEKKEDGKVFWQNLAGYKRQEALRPYLSSEEDRKKGKKFARYQLGDLLLHLEKKHGEDWGDVYDEAWERIDKKVEGLSKHIKLEEERRSEDAQSKAALTDWLRAKASFVIEGLKEADKDEFCRCELKLQKWYGDLRGKPFAIEAENSILDISGFSKQYNCAFIWQKDGVKKLNLYLIINYFKGGKLRFKKIKPEAFEANRFYTVINKKSGEIVPMEVNFNFDDPNLIILPLAFGKRQGREFIWNDLLSLETGSLKLANGRVIEKTLYNRRTRQDEPALFVALTFERREVLDSSNIKPMNLIGVDRGENIPAVIALTDPEGCPLSRFKDSLGNPTHILRIGESYKEKQRTIQAKKEVEQRRAGGYSRKYASKAKNLADDMVRNTARDLLYYAVTQDAMLIFENLSRGFGRQGKRTFMAERQYTRMEDWLTAKLAYEGLPSKTYLSKTLAQYTSKTCSNCGFTITSADYDRVLEKLKKTATGWMTTINGKELKVEGQITYYNRYKRQNVVKDLSVELDRLSEESVNNDISSWTKGRSGEALSLLKKRFSHRPVQEKFVCLNCGFETHADEQAALNIARSWLFLRSQEYKKYQTNKTTGNTDKRAFVETWQSFYRKKLKEVWKPAV

SEQ ID NO: 44300 - protein, 979 aa, synthetic construct
  REGION 1..979: note = engineered CasX variant
QEIKRINKIRRRLVKDSNTKKAGKTGPMKTLLVRVMTPDLRERLENLRKKPENIPQPISNTSRANLNKLLTDYTEMKKAILHVYWEEFQKDPVGLMSRVAQPASKKIDQNKLKPEMDEKGNLTTAGFACSQCGQPLFVYKLEQVSEKGKAYTNYFGRCNVAEHEKLILLAQLKPEKDSDEAVTYSLGKFGQRALDFYSIHVTKESTHPVKPLAQIAGNRYASAPVGKALSDACMGTIASFLSKYQDIIIEHQKVVKGNQKRLESLRELAGKENLEYPSVTLPPQPHTKEGVDAYNEVIARVRMWVNLNLWQKLKLSRDDAKPLLRLKGFPSFPLVERQANAEVDWWDMVCNVKKLINEKKEDGKVFWQNLAGYKRQEALRPYLSSEEDRKKGKKFARYQLGDLLLHLEKKHGEDWGDVYDEAWERIDKKVEGLSKHIKLEEERRSEDAQSKAALTDWLRAKASFVIEGLKEADKDEFCRCELKLQKWYGDLRGKPFAIEAENSILDISGFSKQYNCAFIWQKDGVKKLNLYLIINYFKGGKLRFKKIKPEAFEANRFYTVINKKSGEIVPMEVNFNFDDPNLIILPLAFGKRQGREFIWNDLLSLETGSLKLANGRVIEKTLYNRRTRQDEPALFVALTFERREVLDSSNIKPMNLIGVDRGENIPAVIALTDPEGCPLSRFKDSLGNPTHILRIGESYKEKQRTIQAKKEVEQRRAGGYSRKYASKAKNLADDMVRNTARDLLYYAVTQDAMLIFENLSRGFGRQGKRTFMAERQYTRMEDWLTAKLAYEGLPSKTYLSKTLAQYTSKTCSNCGFTITSADYDRVLEKLKKTATGWMTTINGKELKVEGQITYYNRYKRQNVVKDLSVELDRLSEESVNNDISSWTKGRSGEALSLLKKRFSHRPVQEKFVCLNCGFETHADEQAALNIARSWLFLRSQEYKKYQTNKTTGNTDKRAFVETWQSFYRKKLKEVWKPAV

SEQ ID NO: 44301 - protein, 979 aa, synthetic construct
  REGION 1..979: note = engineered CasX variant
QEIKRINKIRRRLVKDSNTKKAGKTGPMKTLLVRVMTPDLRERLENLRKKPENIPQPISNTSRANLNKLLTDYTEMKKAILHVYWEEFQKDPVGLMSRVAQPASKKIDQNKLKPEMDEKGNLTTAGFACSQCGQPLFVYKLEQVSEKGKAYTNYFGRCNVAEHEKLILLAQLKPEKDSDEAVTYSLGKFGQRALDFYSIHVTKESTHPVKPLAQIAGNRYASVPVGKALSDACMGTIASFLSKYQDIIIEHQKVVKGNQKRLESLRELAGKENLEYPSVTLPPQPHTKEGVDAYNEVIARVRMWVNLNLWQKLKLSRDDAKPLLRLKGFPSFPLVERQANAEVDWWDMVCNVKKLINEKKEDGKVFWQNLAGYKRQEALRPYLSSEEDRKKGKKFARYQLGDLLLHLEKKHGEDWGDVYDEAWERIDKKVEGLSKHIKLEEERRSEDAQSKAALTDWLRAKASFVIEGLKEADKDEFCRCELKLQKWYGDLRGKPFAIEAENSILDISGFSKQYNCAFIWQKDGVKKLNLYLIINYFKGGKLRFKKIKPEAFEANRFYTVINKKSGEIVPMEVNFNFDDPNLIILPLAFGKRQGREFIWNDLLSLETGSLKLANGRVIEKTLYNRRTRQDEPALFVALTFERREVLDSSNIKPMNLIGVDRGENIPAVIALTDPEGCPLSRFKDSLGNPTHILRIGESYKEKQRTIQAKKEVEQRRAGGYSRKYASKAKNLADDMVRNTARDLLYYAVTQDAMLIFENLSRGFGRQGKRTFMAERQYTRMEDWLTAKLAYEGLPSKTYLSKTLAQYTSKTCSNCGFTITSADYDRVLEKLKKTATGWMTTINGKELKVEGQITYYNRYKRQNVVKDLSVELDRLSEESVNNDISSWTKGRSGEALSLLKKRFSHRPVQEKFVCLNCGFETHADEQAALNIARSWLFLRSQEYKKYQTNKTTGNTDKRAFVETWQSFYRKKLKEVWKPAV

SEQ ID NO: 44302 - protein, 979 aa, synthetic construct
  REGION 1..979: note = engineered CasX variant
QEIKRINKIRRRLVKDSNTKKAGKTGPMKTLLVRVMTPDLRERLENLRKKPENIPQPISNTSRANLNKLLTDYTEMKKAILHVYWEEFQKDPVGLMSRVAQPASKKIDQNKLKPEMDEKGNLTTAGFACSQCGQPLFVYKLEQVSEKGKAYTNYFGRCNVAEHEKLIKLAQLKPEKDSDEAVTYSLGKFGQRALDFYSIHVTKESTHPVKPLAQIAGNRYASGPVGKALSDACMGTIASFLSKYQDIIIEHQKVVKGNQKRLESLRELAGKENLEYPSVTLPPQPHTKEGVDAYNEVIARVRMWVNLNLWQKLKLSRDDAKPLLRLKGFPSFPLVERQANAEVDWWDMVCNVKKLINEKKEDGKVFWQNLAGYKRQEALRPYLSSEEDRKKGKKFARYQLGDLLLHLEKKHGEDWGDVYDEAWERIDKKVEGLSKHIKLEEERRSEDAQSKAALTDWLRAKASFVIEGLKEADKDEFCRCELKLQKWYGDLRGKPFAIEAENSILDISGFSKQYNCAFIWQKDGVKKLNLYLIINYFKGGKLRFKKIKPEAFEANRFYTVINKKSGEIVPMEVNFNFDDPNLIILPLAFGKRQGREFIWNDLLSLETGSLKLANGRVIEKTLYNRRTRQDEPALFVALTFERREVLDSSNIKPMNLIGVDRGENIPAVIALTDPEGCPLSRFKDSLGNPTHILRIGESYKEKQRTIQAKKEVEQRRAGGYSRKYASKAKNLADDMVRNTARDLLYYAVTQDAMLIFENLSRGFGRQGKRTFMAERQYTRMEDWLTAKLAYEGLPSKTYLSKTLAQYTSKTCSNCGFTITSADYDRVLEKLKKTATGWMTTINGKELKVEGQITYYNRYKRQNVVKDLSVELDRLSEESVNNDISSWTKGRSGEALSLLKKRFSHRPVQEKFVCLNCGFETHADEQAALNIARSWLFLRSQEYKKYQTNKTTGNTDKRAFVETWQSFYRKKLKEVWKPAV

SEQ ID NO: 44303 - protein, 978 aa, synthetic construct
  REGION 1..978: note = engineered CasX variant
QEIKRINKIRRRLVKDSNTKKAGKTGPMKTLLVRVMTPDLRERLENLRKKPENIPQPISNTSRANLNKLLTDYTEMKKAILHVYWEEFQKDPVGLMSRVAQPASKKIDQNKLKPEMDEKGNLTTAGFACSQCGQPLFVYKLEQVSEKGKAYTNYFGRCNVAEHEKLILLAQLKPEKDSDEAVTYSLGKFGQRALDFYSIHVTKESTHPVKPLAQIAGNRYASPVGKALSDACMGTIASFLSKYQDIIIEHQKVVKGNQKRLESLRELAGKENLEYPSVTLPPQPHTKEGVDAYNEVIARVRMWVNLNLWQKLKLSRDDAKPLLRLKGFPSFPLVERQANAEVDWWDMVCNVKKLINEKKEDGKVFWQNLAGYKRQEALRPYLSSEEDRKKGKKFARYQLGDLLLHLEKKHGEDWGDVYDEAWERIDKKVEGLSKHIKLEEERRSEDAQSKAALTDWLRAKASFVIEGLKEADKDEFCRCELKLQKWYGDLRGKPFAIEAENSILDISGFSKQYNCAFIWQKDGVKKLNLYLIINYFKGGKLRFKKIKPEAFEANRFYTVINKKSGEIVPMEVNFNFDDPNLIILPLAFGKRQGREFIWNDLLSLETGSLKLANGRVIEKTLYNRRTRQDEPALFVALTFERREVLDSSNIKPMNLIGVDRGENIPAVIALTDPEGCPLSRFKDSLGNPTHILRIGESYKEKQRTIQAKKEVEQRRAGGYSRKYASKAKNLADDMVRNTARDLLYYAVTQDAMLIFENLSRGFGRQGKRTFMAERQYTRMEDWLTAKLAYEGLPSKTYLSKTLAQYTSKTCSNCGFTITSADYDRVLEKLKKTATGWMTTINGKELKVEGQITYYNRYKRQNVVKDLSVELDRLSEESVNNDISSWTKGRSGEALSLLKKRFSHRPVQEKFVCLNCGFETHADEQAALNIARSWLFLRSQEYKKYQTNKTTGNTDKRAFVETWQSFYRKKLKEVWKPAV

SEQ ID NO: 44304 - protein, 979 aa, synthetic construct
  REGION 1..979: note = engineered CasX variant
QEIKRINKIRRRLVKDSNTKKAGKTGPMKTLLVRVMTPDLRERLENLRKKPENIPQPISNTSRANLNKLLTDYTEMKKAILHVYWEEFQKDPVGLMSRVAQPASKKIDQNKLKPEMDEKGNLTTAGFACSQCGQPLFVYKLEQVSEKGKAYTNYFGRCNVAEHEKLILLAQLKPEKDSDEAVTYSLGKFGQRALDFYSIHVTKESTHPVKPLAQIAGNRYASYPVGKALSDACMGTIASFLSKYQDIIIEHQKVVKGNQKRLESLRELAGKENLEYPSVTLPPQPHTKEGVDAYNEVIARVRMWVNLNLWQKLKLSRDDAKPLLRLKGFPSFPLVERQANAEVDWWDMVCNVKKLINEKKEDGKVFWQNLAGYKRQEALRPYLSSEEDRKKGKKFARYQLGDLLLHLEKKHGEDWGKVYGEAWERIDKKVEGLSKHIKLEEERRSEDAQSKAALTDWLRAKASFVIEGLKEADKDEFCRCELKLQKWYGDLRGKPFAIEAENSILDISGFSKQYNCAFIWQKDGVKKLNLYLIINYFKGGKLRFKKIKPEAFEANRFYTVINKKSGEIVPMEVNFNFDDPNLIILPLAFGKRQGREFIWNDLLSLETGSLKLANGRVIEKTLYNRRTRQDEPALFVALTFERREVLDSSNIKPMNLIGVDRGENIPAVIALTDPEGCPLSRFKDSLGNPTHILRIGESYKEKQRTIQAKKEVEQRRAGGYSRKYASKAKNLADDMVRNTARDLLYYAVTQDAMLIFENLSRGFGRQGKRTFMAERQYTRMEDWLTAKLAYEGLPSKTYLSKTLAQYTSKTCSNCGFTITSADYDRVLEKLKKTATGWMTTINGKELKVEGQITYYNRYKRQNVVKDLSVELDRLSEESVNNDISSWTKGRSGEALSLLKKRFSHRPVQEKFVCLNCGFETHADEQAALNIARSWLFLRSQEYKKYQTNKTTGNTDKRAFVETWQSFYRKKLKEVWKPAV

SEQ ID NO: 44305 - protein, 979 aa, synthetic construct
  REGION 1..979: note = engineered CasX variant
QEIKRINKIRRRLVKDSNTKKAGKTGPMKTLLVRVMTPDLRERLENLRKKPENIPQPISNTSRANLNKLLTDYTEMKKAILHVYWEEFQKDPVGLMSRVAQPASKKIDQNKLKPEMDEKGNLTTAGFACSQCGQPLFVYKLEQVSEKGKAYTNYFGRCNVAEHEKLILLAQLKPEKDSDEAVTYSLGKFGQRALDFYSIHVTKESTHPVKPLAQIAGNRYASHPVGKALSDACMGTIASFLSKYQDIIIEHQKVVKGNQKRLESLRELAGKENLEYPSVTLPPQPHTKEGVDAYNEVIARVRMWVNLNLWQKLKLSRDDAKPLLRLKGFPSFPLVERQANAEVDWWDMVCNVKKLINEKKEDGKVFWQNLAGYKRQEALRPYLSSEEDRKKGKKFARYQLGDLLLHLEKKHGEDWGKVYGEAWERIDKKVEGLSKHIKLEEERRSEDAQSKAALTDWLRAKASFVIEGLKEADKDEFCRCELKLQKWYGDLRGKPFAIEAENSILDISGFSKQYNCAFIWQKDGVKKLNLYLIINYFKGGKLRFKKIKPEAFEANRFYTVINKKSGEIVPMEVNFNFDDPNLIILPLAFGKRQGREFIWNDLLSLETGSLKLANGRVIEKTLYNRRTRQDEPALFVALTFERREVLDSSNIKPMNLIGVDRGENIPAVIALTDPEGCPLSRFKDSLGNPTHILRIGESYKEKQRTIQAKKEVEQRRAGGYSRKYASKAKNLADDMVRNTARDLLYYAVTQDAMLIFENLSRGFGRQGKRTFMAERQYTRMEDWLTAKLAYEGLPSKTYLSKTLAQYTSKTCSNCGFTITSADYDRVLEKLKKTATGWMTTINGKELKVEGQITYYNRYKRQNVVKDLSVELDRLSEESVNNDISSWTKGRSGEALSLLKKRFSHRPVQEKFVCLNCGFETHADEQAALNIARSWLFLRSQEYKKYQTNKTTGNTDKRAFVETWQSFYRKKLKEVWKPAV

SEQ ID NO: 44306 - protein, 979 aa, synthetic construct
  REGION 1..979: note = engineered CasX variant
QEIKRINKIRRRLVKDSNTKKAGKTGPMKTLLVRVMTPDLRERLENLRKKPENIPQPISNTSRANLNKLLTDYTEMKKAILHVYWEEFQKDPVGLMSRVAQPASKKIDQNKLKPEMDEKGNLTTAGFACSQCGQPLFVYKLEQVSEKGKAYTNYFGRCNVAEHEKLILLAQLKPEKDSDEAVTYSLGKFGQRALDFYSIHVTKESTHPVKPLAQIAGNRYASSPVGKALSDACMGTIASFLSKYQDIIIEHQKVVKGNQKRLESLRELAGKENLEYPSVTLPPQPHTKEGVDAYNEVIARVRMWVNLNLWQKLKLSRDDAKPLLRLKGFPSFPLVERQANAEVDWWDMVCNVKKLINEKKEDGKVFWQNLAGYKRQEALRPYLSSEEDRKKGKKFARYQLGDLLLHLEKKHGEDWGKVYGEAWERIDKKVEGLSKHIKLEEERRSEDAQSKAALTDWLRAKASFVIEGLKEADKDEFCRCELKLQKWYGDLRGKPFAIEAENSILDISGFSKQYNCAFIWQKDGVKKLNLYLIINYFKGGKLRFKKIKPEAFEANRFYTVINKKSGEIVPMEVNFNFDDPNLIILPLAFGKRQGREFIWNDLLSLETGSLKLANGRVIEKTLYNRRTRQDEPALFVALTFERREVLDSSNIKPMNLIGVDRGENIPAVIALTDPEGCPLSRFKDSLGNPTHILRIGESYKEKQRTIQAKKEVEQRRAGGYSRKYASKAKNLADDMVRNTARDLLYYAVTQDAMLIFENLSRGFGRQGKRTFMAERQYTRMEDWLTAKLAYEGLPSKTYLSKTLAQYTSKTCSNCGFTITSADYDRVLEKLKKTATGWMTTINGKELKVEGQITYYNRYKRQNVVKDLSVELDRLSEESVNNDISSWTKGRSGEALSLLKKRFSHRPVQEKFVCLNCGFETHADEQAALNIARSWLFLRSQEYKKYQTNKTTGNTDKRAFVETWQSFYRKKLKEVWKPAV

SEQ ID NO: 44307 - protein, 979 aa, synthetic construct
  REGION 1..979: note = engineered CasX variant
QEIKRINKIRRRLVKDSNTKKAGKTGPMKTLLVRVMTPDLRERLENLRKKPENIPQPISNTSRANLNKLLTDYTEMKKAILHVYWEEFQKDPVGLMSRVAQPASKKIDQNKLKPEMDEKGNLTTAGFACSQCGQPLFVYKLEQVSEKGKAYTNYFGRCNVAEHEKLILLAQLKPEKDSDEAVTYSLGKFGQRALDFYSIHVTKESTHPVKPLAQIAGNRYASTPVGKALSDACMGTIASFLSKYQDIIIEHQKVVKGNQKRLESLRELAGKENLEYPSVTLPPQPHTKEGVDAYNEVIARVRMWVNLNLWQKLKLSRDDAKPLLRLKGFPSFPLVERQANAEVDWWDMVCNVKKLINEKKEDGKVFWQNLAGYKRQEALRPYLSSEEDRKKGKKFARYQLGDLLLHLEKKHGEDWGKVYGEAWERIDKKVEGLSKHIKLEEERRSEDAQSKAALTDWLRAKASFVIEGLKEADKDEFCRCELKLQKWYGDLRGKPFAIEAENSILDISGFSKQYNCAFIWQKDGVKKLNLYLIINYFKGGKLRFKKIKPEAFEANRFYTVINKKSGEIVPMEVNFNFDDPNLIILPLAFGKRQGREFIWNDLLSLETGSLKLANGRVIEKTLYNRRTRQDEPALFVALTFERREVLDSSNIKPMNLIGVDRGENIPAVIALTDPEGCPLSRFKDSLGNPTHILRIGESYKEKQRTIQAKKEVEQRRAGGYSRKYASKAKNLADDMVRNTARDLLYYAVTQDAMLIFENLSRGFGRQGKRTFMAERQYTRMEDWLTAKLAYEGLPSKTYLSKTLAQYTSKTCSNCGFTITSADYDRVLEKLKKTATGWMTTINGKELKVEGQITYYNRYKRQNVVKDLSVELDRLSEESVNNDISSWTKGRSGEALSLLKKRFSHRPVQEKFVCLNCGFETHADEQAALNIARSWLFLRSQEYKKYQTNKTTGNTDKRAFVETWQSFYRKKLKEVWKPAV

SEQ ID NO: 44308 - protein, 979 aa, synthetic construct
  REGION 1..979: note = engineered CasX variant
QEIKRINKIRRRLVKDSNTKKAGKTGPMKTLLVRVMTPDLRERLENLRKKPENIPQPISNTSRANLNKLLTDYTEMKKAILHVYWEEFQKDPVGLMSRVAQPASKKIDQNKLKPEMDEKGNLTTAGFACSQCGQPLFVYKLEQVSEKGKAYTNYFGRCNVAEHEKLILLAQLKPEKDSDEAVTYSLGKFGQRALDFYSIHVTKESTHPVKPLAQIAGNRYASAPVGKALSDACMGTIASFLSKYQDIIIEHQKVVKGNQKRLESLRELAGKENLEYPSVTLPPQPHTKEGVDAYNEVIARVRMWVNLNLWQKLKLSRDDAKPLLRLKGFPSFPLVERQANAEVDWWDMVCNVKKLINEKKEDGKVFWQNLAGYKRQEALRPYLSSEEDRKKGKKFARYQLGDLLLHLEKKHGEDWGKVYGEAWERIDKKVEGLSKHIKLEEERRSEDAQSKAALTDWLRAKASFVIEGLKEADKDEFCRCELKLQKWYGDLRGKPFAIEAENSILDISGFSKQYNCAFIWQKDGVKKLNLYLIINYFKGGKLRFKKIKPEAFEANRFYTVINKKSGEIVPMEVNFNFDDPNLIILPLAFGKRQGREFIWNDLLSLETGSLKLANGRVIEKTLYNRRTRQDEPALFVALTFERREVLDSSNIKPMNLIGVDRGENIPAVIALTDPEGCPLSRFKDSLGNPTHILRIGESYKEKQRTIQAKKEVEQRRAGGYSRKYASKAKNLADDMVRNTARDLLYYAVTQDAMLIFENLSRGFGRQGKRTFMAERQYTRMEDWLTAKLAYEGLPSKTYLSKTLAQYTSKTCSNCGFTITSADYDRVLEKLKKTATGWMTTINGKELKVEGQITYYNRYKRQNVVKDLSVELDRLSEESVNNDISSWTKGRSGEALSLLKKRFSHRPVQEKFVCLNCGFETHADEQAALNIARSWLFLRSQEYKKYQTNKTTGNTDKRAFVETWQSFYRKKLKEVWKPAV

SEQ ID NO: 44309 - protein, 979 aa, synthetic construct
  REGION 1..979: note = engineered CasX variant
QEIKRINKIRRRLVKDSNTKKAGKTGPMKTLLVRVMTPDLRERLENLRKKPENIPQPISNTSRANLNKLLTDYTEMKKAILHVYWEEFQKDPVGLMSRVAQPASKKIDQNKLKPEMDEKGNLTTAGFACSQCGQPLFVYKLEQVSEKGKAYTNYFGRCNVAEHEKLILLAQLKPEKDSDEAVTYSLGKFGQRALDFYSIHVTKESTHPVKPLAQIAGNRYASVPVGKALSDACMGTIASFLSKYQDIIIEHQKVVKGNQKRLESLRELAGKENLEYPSVTLPPQPHTKEGVDAYNEVIARVRMWVNLNLWQKLKLSRDDAKPLLRLKGFPSFPLVERQANAEVDWWDMVCNVKKLINEKKEDGKVFWQNLAGYKRQEALRPYLSSEEDRKKGKKFARYQLGDLLLHLEKKHGEDWGKVYGEAWERIDKKVEGLSKHIKLEEERRSEDAQSKAALTDWLRAKASFVIEGLKEADKDEFCRCELKLQKWYGDLRGKPFAIEAENSILDISGFSKQYNCAFIWQKDGVKKLNLYLIINYFKGGKLRFKKIKPEAFEANRFYTVINKKSGEIVPMEVNFNFDDPNLIILPLAFGKRQGREFIWNDLLSLETGSLKLANGRVIEKTLYNRRTRQDEPALFVALTFERREVLDSSNIKPMNLIGVDRGENIPAVIALTDPEGCPLSRFKDSLGNPTHILRIGESYKEKQRTIQAKKEVEQRRAGGYSRKYASKAKNLADDMVRNTARDLLYYAVTQDAMLIFENLSRGFGRQGKRTFMAERQYTRMEDWLTAKLAYEGLPSKTYLSKTLAQYTSKTCSNCGFTITSADYDRVLEKLKKTATGWMTTINGKELKVEGQITYYNRYKRQNVVKDLSVELDRLSEESVNNDISSWTKGRSGEALSLLKKRFSHRPVQEKFVCLNCGFETHADEQAALNIARSWLFLRSQEYKKYQTNKTTGNTDKRAFVETWQSFYRKKLKEVWKPAV

SEQ ID NO: 44310 - protein, 979 aa, synthetic construct
  REGION 1..979: note = engineered CasX variant
QEIKRINKIRRRLVKDSNTKKAGKTGPMKTLLVRVMTPDLRERLENLRKKPENIPQPISNTSRANLNKLLTDYTEMKKAILHVYWEEFQKDPVGLMSRVAQPASKKIDQNKLKPEMDEKGNLTTAGFACSQCGQPLFVYKLEQVSEKGKAYTNYFGRCNVAEHEKLIKLAQLKPEKDSDEAVTYSLGKFGQRALDFYSIHVTKESTHPVKPLAQIAGNRYASGPVGKALSDACMGTIASFLSKYQDIIIEHQKVVKGNQKRLESLRELAGKENLEYPSVTLPPQPHTKEGVDAYNEVIARVRMWVNLNLWQKLKLSRDDAKPLLRLKGFPSFPLVERQANAEVDWWDMVCNVKKLINEKKEDGKVFWQNLAGYKRQEALRPYLSSEEDRKKGKKFARYQLGDLLLHLEKKHGEDWGKVYGEAWERIDKKVEGLSKHIKLEEERRSEDAQSKAALTDWLRAKASFVIEGLKEADKDEFCRCELKLQKWYGDLRGKPFAIEAENSILDISGFSKQYNCAFIWQKDGVKKLNLYLIINYFKGGKLRFKKIKPEAFEANRFYTVINKKSGEIVPMEVNFNFDDPNLIILPLAFGKRQGREFIWNDLLSLETGSLKLANGRVIEKTLYNRRTRQDEPALFVALTFERREVLDSSNIKPMNLIGVDRGENIPAVIALTDPEGCPLSRFKDSLGNPTHILRIGESYKEKQRTIQAKKEVEQRRAGGYSRKYASKAKNLADDMVRNTARDLLYYAVTQDAMLIFENLSRGFGRQGKRTFMAERQYTRMEDWLTAKLAYEGLPSKTYLSKTLAQYTSKTCSNCGFTITSADYDRVLEKLKKTATGWMTTINGKELKVEGQITYYNRYKRQNVVKDLSVELDRLSEESVNNDISSWTKGRSGEALSLLKKRFSHRPVQEKFVCLNCGFETHADEQAALNIARSWLFLRSQEYKKYQTNKTTGNTDKRAFVETWQSFYRKKLKEVWKPAV

SEQ ID NO: 44311 - protein, 978 aa, synthetic construct
  REGION 1..978: note = engineered CasX variant
QEIKRINKIRRRLVKDSNTKKAGKTGPMKTLLVRVMTPDLRERLENLRKKPENIPQPISNTSRANLNKLLTDYTEMKKAILHVYWEEFQKDPVGLMSRVAQPASKKIDQNKLKPEMDEKGNLTTAGFACSQCGQPLFVYKLEQVSEKGKAYTNYFGRCNVAEHEKLILLAQLKPEKDSDEAVTYSLGKFGQRALDFYSIHVTKESTHPVKPLAQIAGNRYASPVGKALSDACMGTIASFLSKYQDIIIEHQKVVKGNQKRLESLRELAGKENLEYPSVTLPPQPHTKEGVDAYNEVIARVRMWVNLNLWQKLKLSRDDAKPLLRLKGFPSFPLVERQANAEVDWWDMVCNVKKLINEKKEDGKVFWQNLAGYKRQEALRPYLSSEEDRKKGKKFARYQLGDLLLHLEKKHGEDWGKVYGEAWERIDKKVEGLSKHIKLEEERRSEDAQSKAALTDWLRAKASFVIEGLKEADKDEFCRCELKLQKWYGDLRGKPFAIEAENSILDISGFSKQYNCAFIWQKDGVKKLNLYLIINYFKGGKLRFKKIKPEAFEANRFYTVINKKSGEIVPMEVNFNFDDPNLIILPLAFGKRQGREFIWNDLLSLETGSLKLANGRVIEKTLYNRRTRQDEPALFVALTFERREVLDSSNIKPMNLIGVDRGENIPAVIALTDPEGCPLSRFKDSLGNPTHILRIGESYKEKQRTIQAKKEVEQRRAGGYSRKYASKAKNLADDMVRNTARDLLYYAVTQDAMLIFENLSRGFGRQGKRTFMAERQYTRMEDWLTAKLAYEGLPSKTYLSKTLAQYTSKTCSNCGFTITSADYDRVLEKLKKTATGWMTTINGKELKVEGQITYYNRYKRQNVVKDLSVELDRLSEESVNNDISSWTKGRSGEALSLLKKRFSHRPVQEKFVCLNCGFETHADEQAALNIARSWLFLRSQEYKKYQTNKTTGNTDKRAFVETWQSFYRKKLKEVWKPAV

SEQ ID NO: 44312 - protein, 979 aa, synthetic construct
  REGION 1..979: note = engineered CasX variant
QEIKRINKIRRRLVKDSNTKKAGKTGPMKTLLVRVMTPDLRERLENLRKKPENIPQPISNTSRANLNKLLTDYTEMKKAILHVYWEEFQKDPVGLMSRVAQPASKKIDQNKLKPEMDEKGNLTTAGFACSQCGQPLFVYKLEQVSEKGKAYTNYFGRCNVAEHEKLILLAQLKPEKDSDEAVTYSLGKFGQRALDFYSIHVTKESTHPVKPLAQIAGNRYASYPVGKALSDACMGTIASFLSKYQDIIIEHQKVVKGNQKRLESLRELAGKENLEYPSVTLPPQPHTKEGVDAYNEVIARVRMWVNLNLWQKLKLSRDDAKPLLRLKGFPSFPLVERQANAEVDWWDMVCNVKKLINEKKEDGKVFWQNLAGYKRQEALRPYLSSEEDRKKGKKFARYQLGDLLLHLEKKHGEDWGKVYDEAWERIDKKVEGLSKHIKLEEERRSEDAQSKAALTDWLRAKASFVIEGKKEADKDEFCRCELKLQKWYGDLRGKPFAIEAENSILDISGFSKQYNCAFIWQKDGVKKLNLYLIINYFKGGKLRFKKIKPEAFEANRFYTVINKKSGEIVPMEVNFNFDDPNLIILPLAFGKRQGREFIWNDLLSLETGSLKLANGRVIEKTLYNRRTRQDEPALFVALTFERREVLDSSNIKPMNLIGVDRGENIPAVIALTDPEGCPLSRFKDSLGNPTHILRIGESYKEKQRTIQAKKEVEQRRAGGYSRKYASKAKNLADDMVRNTARDLLYYAVTQDAMLIFENLSRGFGRQGKRTFMAERQYTRMEDWLTAKLAYEGLPSKTYLSKTLAQYTSKTCSNCGFTITSADYDRVLEKLKKTATGWMTTINGKELKVEGQITYYNRYKRQNVVKDLSVELDRLSEESVNNDISSWTKGRSGEALSLLKKRFSHRPVQEKFVCLNCGFETHADEQAALNIARSWLFLRSQEYKKYQTNKTTGNTDKRAFVETWQSFYRKKLKEVWKPAV

SEQ ID NO: 44313 - protein, 979 aa, synthetic construct
  REGION 1..979: note = engineered CasX variant
QEIKRINKIRRRLVKDSNTKKAGKTGPMKTLLVRVMTPDLRERLENLRKKPENIPQPISNTSRANLNKLLTDYTEMKKAILHVYWEEFQKDPVGLMSRVAQPASKKIDQNKLKPEMDEKGNLTTAGFACSQCGQPLFVYKLEQVSEKGKAYTNYFGRCNVAEHEKLILLAQLKPEKDSDEAVTYSLGKFGQRALDFYSIHVTKESTHPVKPLAQIAGNRYASHPVGKALSDACMGTIASFLSKYQDIIIEHQKVVKGNQKRLESLRELAGKENLEYPSVTLPPQPHTKEGVDAYNEVIARVRMWVNLNLWQKLKLSRDDAKPLLRLKGFPSFPLVERQANAEVDWWDMVCNVKKLINEKKEDGKVFWQNLAGYKRQEALRPYLSSEEDRKKGKKFARYQLGDLLLHLEKKHGEDWGKVYDEAWERIDKKVEGLSKHIKLEEERRSEDAQSKAALTDWLRAKASFVIEGKKEADKDEFCRCELKLQKWYGDLRGKPFAIEAENSILDISGFSKQYNCAFIWQKDGVKKLNLYLIINYFKGGKLRFKKIKPEAFEANRFYTVINKKSGEIVPMEVNFNFDDPNLIILPLAFGKRQGREFIWNDLLSLETGSLKLANGRVIEKTLYNRRTRQDEPALFVALTFERREVLDSSNIKPMNLIGVDRGENIPAVIALTDPEGCPLSRFKDSLGNPTHILRIGESYKEKQRTIQAKKEVEQRRAGGYSRKYASKAKNLADDMVRNTARDLLYYAVTQDAMLIFENLSRGFGRQGKRTFMAERQYTRMEDWLTAKLAYEGLPSKTYLSKTLAQYTSKTCSNCGFTITSADYDRVLEKLKKTATGWMTTINGKELKVEGQITYYNRYKRQNVVKDLSVELDRLSEESVNNDISSWTKGRSGEALSLLKKRFSHRPVQEKFVCLNCGFETHADEQAALNIARSWLFLRSQEYKKYQTNKTTGNTDKRAFVETWQSFYRKKLKEVWKPAV

SEQ ID NO: 44314 - protein, 979 aa, synthetic construct
  REGION 1..979: note = engineered CasX variant
QEIKRINKIRRRLVKDSNTKKAGKTGPMKTLLVRVMTPDLRERLENLRKKPENIPQPISNTSRANLNKLLTDYTEMKKAILHVYWEEFQKDPVGLMSRVAQPASKKIDQNKLKPEMDEKGNLTTAGFACSQCGQPLFVYKLEQVSEKGKAYTNYFGRCNVAEHEKLILLAQLKPEKDSDEAVTYSLGKFGQRALDFYSIHVTKESTHPVKPLAQIAGNRYASSPVGKALSDACMGTIASFLSKYQDIIIEHQKVVKGNQKRLESLRELAGKENLEYPSVTLPPQPHTKEGVDAYNEVIARVRMWVNLNLWQKLKLSRDDAKPLLRLKGFPSFPLVERQANAEVDWWDMVCNVKKLINEKKEDGKVFWQNLAGYKRQEALRPYLSSEEDRKKGKKFARYQLGDLLLHLEKKHGEDWGKVYDEAWERIDKKVEGLSKHIKLEEERRSEDAQSKAALTDWLRAKASFVIEGKKEADKDEFCRCELKLQKWYGDLRGKPFAIEAENSILDISGFSKQYNCAFIWQKDGVKKLNLYLIINYFKGGKLRFKKIKPEAFEANRFYTVINKKSGEIVPMEVNFNFDDPNLIILPLAFGKRQGREFIWNDLLSLETGSLKLANGRVIEKTLYNRRTRQDEPALFVALTFERREVLDSSNIKPMNLIGVDRGENIPAVIALTDPEGCPLSRFKDSLGNPTHILRIGESYKEKQRTIQAKKEVEQRRAGGYSRKYASKAKNLADDMVRNTARDLLYYAVTQDAMLIFENLSRGFGRQGKRTFMAERQYTRMEDWLTAKLAYEGLPSKTYLSKTLAQYTSKTCSNCGFTITSADYDRVLEKLKKTATGWMTTINGKELKVEGQITYYNRYKRQNVVKDLSVELDRLSEESVNNDISSWTKGRSGEALSLLKKRFSHRPVQEKFVCLNCGFETHADEQAALNIARSWLFLRSQEYKKYQTNKTTGNTDKRAFVETWQSFYRKKLKEVWKPAV

SEQ ID NO: 44315 - protein, 979 aa, synthetic construct
  REGION 1..979: note = engineered CasX variant
QEIKRINKIRRRLVKDSNTKKAGKTGPMKTLLVRVMTPDLRERLENLRKKPENIPQPISNTSRANLNKLLTDYTEMKKAILHVYWEEFQKDPVGLMSRVAQPASKKIDQNKLKPEMDEKGNLTTAGFACSQCGQPLFVYKLEQVSEKGKAYTNYFGRCNVAEHEKLILLAQLKPEKDSDEAVTYSLGKFGQRALDFYSIHVTKESTHPVKPLAQIAGNRYASTPVGKALSDACMGTIASFLSKYQDIIIEHQKVVKGNQKRLESLRELAGKENLEYPSVTLPPQPHTKEGVDAYNEVIARVRMWVNLNLWQKLKLSRDDAKPLLRLKGFPSFPLVERQANAEVDWWDMVCNVKKLINEKKEDGKVFWQNLAGYKRQEALRPYLSSEEDRKKGKKFARYQLGDLLLHLEKKHGEDWGKVYDEAWERIDKKVEGLSKHIKLEEERRSEDAQSKAALTDWLRAKASFVIEGKKEADKDEFCRCELKLQKWYGDLRGKPFAIEAENSILDISGFSKQYNCAFIWQKDGVKKLNLYLIINYFKGGKLRFKKIKPEAFEANRFYTVINKKSGEIVPMEVNFNFDDPNLIILPLAFGKRQGREFIWNDLLSLETGSLKLANGRVIEKTLYNRRTRQDEPALFVALTFERREVLDSSNIKPMNLIGVDRGENIPAVIALTDPEGCPLSRFKDSLGNPTHILRIGESYKEKQRTIQAKKEVEQRRAGGYSRKYASKAKNLADDMVRNTARDLLYYAVTQDAMLIFENLSRGFGRQGKRTFMAERQYTRMEDWLTAKLAYEGLPSKTYLSKTLAQYTSKTCSNCGFTITSADYDRVLEKLKKTATGWMTTINGKELKVEGQITYYNRYKRQNVVKDLSVELDRLSEESVNNDISSWTKGRSGEALSLLKKRFSHRPVQEKFVCLNCGFETHADEQAALNIARSWLFLRSQEYKKYQTNKTTGNTDKRAFVETWQSFYRKKLKEVWKPAV

SEQ ID NO: 44316 - protein, 979 aa, synthetic construct
  REGION 1..979: note = engineered CasX variant
QEIKRINKIRRRLVKDSNTKKAGKTGPMKTLLVRVMTPDLRERLENLRKKPENIPQPISNTSRANLNKLLTDYTEMKKAILHVYWEEFQKDPVGLMSRVAQPASKKIDQNKLKPEMDEKGNLTTAGFACSQCGQPLFVYKLEQVSEKGKAYTNYFGRCNVAEHEKLILLAQLKPEKDSDEAVTYSLGKFGQRALDFYSIHVTKESTHPVKPLAQIAGNRYASAPVGKALSDACMGTIASFLSKYQDIIIEHQKVVKGNQKRLESLRELAGKENLEYPSVTLPPQPHTKEGVDAYNEVIARVRMWVNLNLWQKLKLSRDDAKPLLRLKGFPSFPLVERQANAEVDWWDMVCNVKKLINEKKEDGKVFWQNLAGYKRQEALRPYLSSEEDRKKGKKFARYQLGDLLLHLEKKHGEDWGKVYDEAWERIDKKVEGLSKHIKLEEERRSEDAQSKAALTDWLRAKASFVIEGKKEADKDEFCRCELKLQKWYGDLRGKPFAIEAENSILDISGFSKQYNCAFIWQKDGVKKLNLYLIINYFKGGKLRFKKIKPEAFEANRFYTVINKKSGEIVPMEVNFNFDDPNLIILPLAFGKRQGREFIWNDLLSLETGSLKLANGRVIEKTLYNRRTRQDEPALFVALTFERREVLDSSNIKPMNLIGVDRGENIPAVIALTDPEGCPLSRFKDSLGNPTHILRIGESYKEKQRTIQAKKEVEQRRAGGYSRKYASKAKNLADDMVRNTARDLLYYAVTQDAMLIFENLSRGFGRQGKRTFMAERQYTRMEDWLTAKLAYEGLPSKTYLSKTLAQYTSKTCSNCGFTITSADYDRVLEKLKKTATGWMTTINGKELKVEGQITYYNRYKRQNVVKDLSVELDRLSEESVNNDISSWTKGRSGEALSLLKKRFSHRPVQEKFVCLNCGFETHADEQAALNIARSWLFLRSQEYKKYQTNKTTGNTDKRAFVETWQSFYRKKLKEVWKPAV

SEQ ID NO: 44317 - protein, 979 aa, synthetic construct
  REGION 1..979: note = engineered CasX variant
QEIKRINKIRRRLVKDSNTKKAGKTGPMKTLLVRVMTPDLRERLENLRKKPENIPQPISNTSRANLNKLLTDYTEMKKAILHVYWEEFQKDPVGLMSRVAQPASKKIDQNKLKPEMDEKGNLTTAGFACSQCGQPLFVYKLEQVSEKGKAYTNYFGRCNVAEHEKLILLAQLKPEKDSDEAVTYSLGKFGQRALDFYSIHVTKESTHPVKPLAQIAGNRYASVPVGKALSDACMGTIASFLSKYQDIIIEHQKVVKGNQKRLESLRELAGKENLEYPSVTLPPQPHTKEGVDAYNEVIARVRMWVNLNLWQKLKLSRDDAKPLLRLKGFPSFPLVERQANAEVDWWDMVCNVKKLINEKKEDGKVFWQNLAGYKRQEALRPYLSSEEDRKKGKKFARYQLGDLLLHLEKKHGEDWGKVYDEAWERIDKKVEGLSKHIKLEEERRSEDAQSKAALTDWLRAKASFVIEGKKEADKDEFCRCELKLQKWYGDLRGKPFAIEAENSILDISGFSKQYNCAFIWQKDGVKKLNLYLIINYFKGGKLRFKKIKPEAFEANRFYTVINKKSGEIVPMEVNFNFDDPNLIILPLAFGKRQGREFIWNDLLSLETGSLKLANGRVIEKTLYNRRTRQDEPALFVALTFERREVLDSSNIKPMNLIGVDRGENIPAVIALTDPEGCPLSRFKDSLGNPTHILRIGESYKEKQRTIQAKKEVEQRRAGGYSRKYASKAKNLADDMVRNTARDLLYYAVTQDAMLIFENLSRGFGRQGKRTFMAERQYTRMEDWLTAKLAYEGLPSKTYLSKTLAQYTSKTCSNCGFTITSADYDRVLEKLKKTATGWMTTINGKELKVEGQITYYNRYKRQNVVKDLSVELDRLSEESVNNDISSWTKGRSGEALSLLKKRFSHRPVQEKFVCLNCGFETHADEQAALNIARSWLFLRSQEYKKYQTNKTTGNTDKRAFVETWQSFYRKKLKEVWKPAV

SEQ ID NO: 44318 - protein, 979 aa, synthetic construct
  REGION 1..979: note = engineered CasX variant
QEIKRINKIRRRLVKDSNTKKAGKTGPMKTLLVRVMTPDLRERLENLRKKPENIPQPISNTSRANLNKLLTDYTEMKKAILHVYWEEFQKDPVGLMSRVAQPASKKIDQNKLKPEMDEKGNLTTAGFACSQCGQPLFVYKLEQVSEKGKAYTNYFGRCNVAEHEKLIKLAQLKPEKDSDEAVTYSLGKFGQRALDFYSIHVTKESTHPVKPLAQIAGNRYASGPVGKALSDACMGTIASFLSKYQDIIIEHQKVVKGNQKRLESLRELAGKENLEYPSVTLPPQPHTKEGVDAYNEVIARVRMWVNLNLWQKLKLSRDDAKPLLRLKGFPSFPLVERQANAEVDWWDMVCNVKKLINEKKEDGKVFWQNLAGYKRQEALRPYLSSEEDRKKGKKFARYQLGDLLLHLEKKHGEDWGKVYDEAWERIDKKVEGLSKHIKLEEERRSEDAQSKAALTDWLRAKASFVIEGKKEADKDEFCRCELKLQKWYGDLRGKPFAIEAENSILDISGFSKQYNCAFIWQKDGVKKLNLYLIINYFKGGKLRFKKIKPEAFEANRFYTVINKKSGEIVPMEVNFNFDDPNLIILPLAFGKRQGREFIWNDLLSLETGSLKLANGRVIEKTLYNRRTRQDEPALFVALTFERREVLDSSNIKPMNLIGVDRGENIPAVIALTDPEGCPLSRFKDSLGNPTHILRIGESYKEKQRTIQAKKEVEQRRAGGYSRKYASKAKNLADDMVRNTARDLLYYAVTQDAMLIFENLSRGFGRQGKRTFMAERQYTRMEDWLTAKLAYEGLPSKTYLSKTLAQYTSKTCSNCGFTITSADYDRVLEKLKKTATGWMTTINGKELKVEGQITYYNRYKRQNVVKDLSVELDRLSEESVNNDISSWTKGRSGEALSLLKKRFSHRPVQEKFVCLNCGFETHADEQAALNIARSWLFLRSQEYKKYQTNKTTGNTDKRAFVETWQSFYRKKLKEVWKPAV

SEQ ID NO: 44319 - protein, 978 aa, synthetic construct
  REGION 1..978: note = engineered CasX variant
QEIKRINKIRRRLVKDSNTKKAGKTGPMKTLLVRVMTPDLRERLENLRKKPENIPQPISNTSRANLNKLLTDYTEMKKAILHVYWEEFQKDPVGLMSRVAQPASKKIDQNKLKPEMDEKGNLTTAGFACSQCGQPLFVYKLEQVSEKGKAYTNYFGRCNVAEHEKLILLAQLKPEKDSDEAVTYSLGKFGQRALDFYSIHVTKESTHPVKPLAQIAGNRYASPVGKALSDACMGTIASFLSKYQDIIIEHQKVVKGNQKRLESLRELAGKENLEYPSVTLPPQPHTKEGVDAYNEVIARVRMWVNLNLWQKLKLSRDDAKPLLRLKGFPSFPLVERQANAEVDWWDMVCNVKKLINEKKEDGKVFWQNLAGYKRQEALRPYLSSEEDRKKGKKFARYQLGDLLLHLEKKHGEDWGKVYDEAWERIDKKVEGLSKHIKLEEERRSEDAQSKAALTDWLRAKASFVIEGKKEADKDEFCRCELKLQKWYGDLRGKPFAIEAENSILDISGFSKQYNCAFIWQKDGVKKLNLYLIINYFKGGKLRFKKIKPEAFEANRFYTVINKKSGEIVPMEVNFNFDDPNLIILPLAFGKRQGREFIWNDLLSLETGSLKLANGRVIEKTLYNRRTRQDEPALFVALTFERREVLDSSNIKPMNLIGVDRGENIPAVIALTDPEGCPLSRFKDSLGNPTHILRIGESYKEKQRTIQAKKEVEQRRAGGYSRKYASKAKNLADDMVRNTARDLLYYAVTQDAMLIFENLSRGFGRQGKRTFMAERQYTRMEDWLTAKLAYEGLPSKTYLSKTLAQYTSKTCSNCGFTITSADYDRVLEKLKKTATGWMTTINGKELKVEGQITYYNRYKRQNVVKDLSVELDRLSEESVNNDISSWTKGRSGEALSLLKKRFSHRPVQEKFVCLNCGFETHADEQAALNIARSWLFLRSQEYKKYQTNKTTGNTDKRAFVETWQSFYRKKLKEVWKPAV

SEQ ID NO: 44320 - protein, 979 aa, synthetic construct
  REGION 1..979: note = engineered CasX variant
QEIKRINKIRRRLVKDSNTKKAGKTGPMKTLLVRVMTPDLRERLENLRKKPENIPQPISNTSRANLNKLLTDYTEMKKAILHVYWEEFQKDPVGLMSRVAQPASKKIDQNKLKPEMDEKGNLTTAGFACSQCGQPLFVYKLEQVSEKGKAYTNYFGRCNVAEHEKLILLAQLKPEKDSDEAVTYSLGKFGQRALDFYSIHVTKESTHPVKPLAQIAGNRYASYPVGKALSDACMGTIASFLSKYQDIIIEHQKVVKGNQKRLESLRELAGKENLEYPSVTLPPQPHTKEGVDAYNEVIARVRMWVNLNLWQKLKLSRDDAKPLLRLKGFPSFPLVERQANAEVDWWDMVCNVKKLINEKKEDGKVFWQNLAGYKRQEALRPYLSSEEDRKKGKKFARYQLGDLLLHLEKKHGEDWGKVYDEAWERIDKKVEGLSKHIKLEEERRSEDAQSKAALTDWLRAKASFVIEGSKEADKDEFCRCELKLQKWYGDLRGKPFAIEAENSILDISGFSKQYNCAFIWQKDGVKKLNLYLIINYFKGGKLRFKKIKPEAFEANRFYTVINKKSGEIVPMEVNFNFDDPNLIILPLAFGKRQGREFIWNDLLSLETGSLKLANGRVIEKTLYNRRTRQDEPALFVALTFERREVLDSSNIKPMNLIGVDRGENIPAVIALTDPEGCPLSRFKDSLGNPTHILRIGESYKEKQRTIQAKKEVEQRRAGGYSRKYASKAKNLADDMVRNTARDLLYYAVTQDAMLIFENLSRGFGRQGKRTFMAERQYTRMEDWLTAKLAYEGLPSKTYLSKTLAQYTSKTCSNCGFTITSADYDRVLEKLKKTATGWMTTINGKELKVEGQITYYNRYKRQNVVKDLSVELDRLSEESVNNDISSWTKGRSGEALSLLKKRFSHRPVQEKFVCLNCGFETHADEQAALNIARSWLFLRSQEYKKYQTNKTTGNTDKRAFVETWQSFYRKKLKEVWKPAV

SEQ ID NO: 44321 - protein, 979 aa, synthetic construct
  REGION 1..979: note = engineered CasX variant
QEIKRINKIRRRLVKDSNTKKAGKTGPMKTLLVRVMTPDLRERLENLRKKPENIPQPISNTSRANLNKLLTDYTEMKKAILHVYWEEFQKDPVGLMSRVAQPASKKIDQNKLKPEMDEKGNLTTAGFACSQCGQPLFVYKLEQVSEKGKAYTNYFGRCNVAEHEKLILLAQLKPEKDSDEAVTYSLGKFGQRALDFYSIHVTKESTHPVKPLAQIAGNRYASHPVGKALSDACMGTIASFLSKYQDIIIEHQKVVKGNQKRLESLRELAGKENLEYPSVTLPPQPHTKEGVDAYNEVIARVRMWVNLNLWQKLKLSRDDAKPLLRLKGFPSFPLVERQANAEVDWWDMVCNVKKLINEKKEDGKVFWQNLAGYKRQEALRPYLSSEEDRKKGKKFARYQLGDLLLHLEKKHGEDWGKVYDEAWERIDKKVEGLSKHIKLEEERRSEDAQSKAALTDWLRAKASFVIEGSKEADKDEFCRCELKLQKWYGDLRGKPFAIEAENSILDISGFSKQYNCAFIWQKDGVKKLNLYLIINYFKGGKLRFKKIKPEAFEANRFYTVINKKSGEIVPMEVNFNFDDPNLIILPLAFGKRQGREFIWNDLLSLETGSLKLANGRVIEKTLYNRRTRQDEPALFVALTFERREVLDSSNIKPMNLIGVDRGENIPAVIALTDPEGCPLSRFKDSLGNPTHILRIGESYKEKQRTIQAKKEVEQRRAGGYSRKYASKAKNLADDMVRNTARDLLYYAVTQDAMLIFENLSRGFGRQGKRTFMAERQYTRMEDWLTAKLAYEGLPSKTYLSKTLAQYTSKTCSNCGFTITSADYDRVLEKLKKTATGWMTTINGKELKVEGQITYYNRYKRQNVVKDLSVELDRLSEESVNNDISSWTKGRSGEALSLLKKRFSHRPVQEKFVCLNCGFETHADEQAALNIARSWLFLRSQEYKKYQTNKTTGNTDKRAFVETWQSFYRKKLKEVWKPAV

SEQ ID NO: 44322 - protein, 979 aa, synthetic construct
  REGION 1..979: note = engineered CasX variant
QEIKRINKIRRRLVKDSNTKKAGKTGPMKTLLVRVMTPDLRERLENLRKKPENIPQPISNTSRANLNKLLTDYTEMKKAILHVYWEEFQKDPVGLMSRVAQPASKKIDQNKLKPEMDEKGNLTTAGFACSQCGQPLFVYKLEQVSEKGKAYTNYFGRCNVAEHEKLILLAQLKPEKDSDEAVTYSLGKFGQRALDFYSIHVTKESTHPVKPLAQIAGNRYASSPVGKALSDACMGTIASFLSKYQDIIIEHQKVVKGNQKRLESLRELAGKENLEYPSVTLPPQPHTKEGVDAYNEVIARVRMWVNLNLWQKLKLSRDDAKPLLRLKGFPSFPLVERQANAEVDWWDMVCNVKKLINEKKEDGKVFWQNLAGYKRQEALRPYLSSEEDRKKGKKFARYQLGDLLLHLEKKHGEDWGKVYDEAWERIDKKVEGLSKHIKLEEERRSEDAQSKAALTDWLRAKASFVIEGSKEADKDEFCRCELKLQKWYGDLRGKPFAIEAENSILDISGFSKQYNCAFIWQKDGVKKLNLYLIINYFKGGKLRFKKIKPEAFEANRFYTVINKKSGEIVPMEVNFNFDDPNLIILPLAFGKRQGREFIWNDLLSLETGSLKLANGRVIEKTLYNRRTRQDEPALFVALTFERREVLDSSNIKPMNLIGVDRGENIPAVIALTDPEGCPLSRFKDSLGNPTHILRIGESYKEKQRTIQAKKEVEQRRAGGYSRKYASKAKNLADDMVRNTARDLLYYAVTQDAMLIFENLSRGFGRQGKRTFMAERQYTRMEDWLTAKLAYEGLPSKTYLSKTLAQYTSKTCSNCGFTITSADYDRVLEKLKKTATGWMTTINGKELKVEGQITYYNRYKRQNVVKDLSVELDRLSEESVNNDISSWTKGRSGEALSLLKKRFSHRPVQEKFVCLNCGFETHADEQAALNIARSWLFLRSQEYKKYQTNKTTGNTDKRAFVETWQSFYRKKLKEVWKPAV

SEQ ID NO: 44323 - protein, 979 aa, synthetic construct
  REGION 1..979: note = engineered CasX variant
QEIKRINKIRRRLVKDSNTKKAGKTGPMKTLLVRVMTPDLRERLENLRKKPENIPQPISNTSRANLNKLLTDYTEMKKAILHVYWEEFQKDPVGLMSRVAQPASKKIDQNKLKPEMDEKGNLTTAGFACSQCGQPLFVYKLEQVSEKGKAYTNYFGRCNVAEHEKLILLAQLKPEKDSDEAVTYSLGKFGQRALDFYSIHVTKESTHPVKPLAQIAGNRYASTPVGKALSDACMGTIASFLSKYQDIIIEHQKVVKGNQKRLESLRELAGKENLEYPSVTLPPQPHTKEGVDAYNEVIARVRMWVNLNLWQKLKLSRDDAKPLLRLKGFPSFPLVERQANAEVDWWDMVCNVKKLINEKKEDGKVFWQNLAGYKRQEALRPYLSSEEDRKKGKKFARYQLGDLLLHLEKKHGEDWGKVYDEAWERIDKKVEGLSKHIKLEEERRSEDAQSKAALTDWLRAKASFVIEGSKEADKDEFCRCELKLQKWYGDLRGKPFAIEAENSILDISGFSKQYNCAFIWQKDGVKKLNLYLIINYFKGGKLRFKKIKPEAFEANRFYTVINKKSGEIVPMEVNFNFDDPNLIILPLAFGKRQGREFIWNDLLSLETGSLKLANGRVIEKTLYNRRTRQDEPALFVALTFERREVLDSSNIKPMNLIGVDRGENIPAVIALTDPEGCPLSRFKDSLGNPTHILRIGESYKEKQRTIQAKKEVEQRRAGGYSRKYASKAKNLADDMVRNTARDLLYYAVTQDAMLIFENLSRGFGRQGKRTFMAERQYTRMEDWLTAKLAYEGLPSKTYLSKTLAQYTSKTCSNCGFTITSADYDRVLEKLKKTATGWMTTINGKELKVEGQITYYNRYKRQNVVKDLSVELDRLSEESVNNDISSWTKGRSGEALSLLKKRFSHRPVQEKFVCLNCGFETHADEQAALNIARSWLFLRSQEYKKYQTNKTTGNTDKRAFVETWQSFYRKKLKEVWKPAV

SEQ ID NO: 44324 - protein, 979 aa, synthetic construct
  REGION 1..979: note = engineered CasX variant
QEIKRINKIRRRLVKDSNTKKAGKTGPMKTLLVRVMTPDLRERLENLRKKPENIPQPISNTSRANLNKLLTDYTEMKKAILHVYWEEFQKDPVGLMSRVAQPASKKIDQNKLKPEMDEKGNLTTAGFACSQCGQPLFVYKLEQVSEKGKAYTNYFGRCNVAEHEKLILLAQLKPEKDSDEAVTYSLGKFGQRALDFYSIHVTKESTHPVKPLAQIAGNRYASAPVGKALSDACMGTIASFLSKYQDIIIEHQKVVKGNQKRLESLRELAGKENLEYPSVTLPPQPHTKEGVDAYNEVIARVRMWVNLNLWQKLKLSRDDAKPLLRLKGFPSFPLVERQANAEVDWWDMVCNVKKLINEKKEDGKVFWQNLAGYKRQEALRPYLSSEEDRKKGKKFARYQLGDLLLHLEKKHGEDWGKVYDEAWERIDKKVEGLSKHIKLEEERRSEDAQSKAALTDWLRAKASFVIEGSKEADKDEFCRCELKLQKWYGDLRGKPFAIEAENSILDISGFSKQYNCAFIWQKDGVKKLNLYLIINYFKGGKLRFKKIKPEAFEANRFYTVINKKSGEIVPMEVNFNFDDPNLIILPLAFGKRQGREFIWNDLLSLETGSLKLANGRVIEKTLYNRRTRQDEPALFVALTFERREVLDSSNIKPMNLIGVDRGENIPAVIALTDPEGCPLSRFKDSLGNPTHILRIGESYKEKQRTIQAKKEVEQRRAGGYSRKYASKAKNLADDMVRNTARDLLYYAVTQDAMLIFENLSRGFGRQGKRTFMAERQYTRMEDWLTAKLAYEGLPSKTYLSKTLAQYTSKTCSNCGFTITSADYDRVLEKLKKTATGWMTTINGKELKVEGQITYYNRYKRQNVVKDLSVELDRLSEESVNNDISSWTKGRSGEALSLLKKRFSHRPVQEKFVCLNCGFETHADEQAALNIARSWLFLRSQEYKKYQTNKTTGNTDKRAFVETWQSFYRKKLKEVWKPAV

SEQ ID NO: 44325 - protein, 979 aa, synthetic construct
  REGION 1..979: note = engineered CasX variant
QEIKRINKIRRRLVKDSNTKKAGKTGPMKTLLVRVMTPDLRERLENLRKKPENIPQPISNTSRANLNKLLTDYTEMKKAILHVYWEEFQKDPVGLMSRVAQPASKKIDQNKLKPEMDEKGNLTTAGFACSQCGQPLFVYKLEQVSEKGKAYTNYFGRCNVAEHEKLILLAQLKPEKDSDEAVTYSLGKFGQRALDFYSIHVTKESTHPVKPLAQIAGNRYASVPVGKALSDACMGTIASFLSKYQDIIIEHQKVVKGNQKRLESLRELAGKENLEYPSVTLPPQPHTKEGVDAYNEVIARVRMWVNLNLWQKLKLSRDDAKPLLRLKGFPSFPLVERQANAEVDWWDMVCNVKKLINEKKEDGKVFWQNLAGYKRQEALRPYLSSEEDRKKGKKFARYQLGDLLLHLEKKHGEDWGKVYDEAWERIDKKVEGLSKHIKLEEERRSEDAQSKAALTDWLRAKASFVIEGSKEADKDEFCRCELKLQKWYGDLRGKPFAIEAENSILDISGFSKQYNCAFIWQKDGVKKLNLYLIINYFKGGKLRFKKIKPEAFEANRFYTVINKKSGEIVPMEVNFNFDDPNLIILPLAFGKRQGREFIWNDLLSLETGSLKLANGRVIEKTLYNRRTRQDEPALFVALTFERREVLDSSNIKPMNLIGVDRGENIPAVIALTDPEGCPLSRFKDSLGNPTHILRIGESYKEKQRTIQAKKEVEQRRAGGYSRKYASKAKNLADDMVRNTARDLLYYAVTQDAMLIFENLSRGFGRQGKRTFMAERQYTRMEDWLTAKLAYEGLPSKTYLSKTLAQYTSKTCSNCGFTITSADYDRVLEKLKKTATGWMTTINGKELKVEGQITYYNRYKRQNVVKDLSVELDRLSEESVNNDISSWTKGRSGEALSLLKKRFSHRPVQEKFVCLNCGFETHADEQAALNIARSWLFLRSQEYKKYQTNKTTGNTDKRAFVETWQSFYRKKLKEVWKPAV

SEQ ID NO: 44326 - protein, 979 aa, synthetic construct
  REGION 1..979: note = engineered CasX variant
QEIKRINKIRRRLVKDSNTKKAGKTGPMKTLLVRVMTPDLRERLENLRKKPENIPQPISNTSRANLNKLLTDYTEMKKAILHVYWEEFQKDPVGLMSRVAQPASKKIDQNKLKPEMDEKGNLTTAGFACSQCGQPLFVYKLEQVSEKGKAYTNYFGRCNVAEHEKLIKLAQLKPEKDSDEAVTYSLGKFGQRALDFYSIHVTKESTHPVKPLAQIAGNRYASGPVGKALSDACMGTIASFLSKYQDIIIEHQKVVKGNQKRLESLRELAGKENLEYPSVTLPPQPHTKEGVDAYNEVIARVRMWVNLNLWQKLKLSRDDAKPLLRLKGFPSFPLVERQANAEVDWWDMVCNVKKLINEKKEDGKVFWQNLAGYKRQEALRPYLSSEEDRKKGKKFARYQLGDLLLHLEKKHGEDWGKVYDEAWERIDKKVEGLSKHIKLEEERRSEDAQSKAALTDWLRAKASFVIEGSKEADKDEFCRCELKLQKWYGDLRGKPFAIEAENSILDISGFSKQYNCAFIWQKDGVKKLNLYLIINYFKGGKLRFKKIKPEAFEANRFYTVINKKSGEIVPMEVNFNFDDPNLIILPLAFGKRQGREFIWNDLLSLETGSLKLANGRVIEKTLYNRRTRQDEPALFVALTFERREVLDSSNIKPMNLIGVDRGENIPAVIALTDPEGCPLSRFKDSLGNPTHILRIGESYKEKQRTIQAKKEVEQRRAGGYSRKYASKAKNLADDMVRNTARDLLYYAVTQDAMLIFENLSRGFGRQGKRTFMAERQYTRMEDWLTAKLAYEGLPSKTYLSKTLAQYTSKTCSNCGFTITSADYDRVLEKLKKTATGWMTTINGKELKVEGQITYYNRYKRQNVVKDLSVELDRLSEESVNNDISSWTKGRSGEALSLLKKRFSHRPVQEKFVCLNCGFETHADEQAALNIARSWLFLRSQEYKKYQTNKTTGNTDKRAFVETWQSFYRKKLKEVWKPAV

SEQ ID NO: 44327 - protein, 978 aa, synthetic construct
  REGION 1..978: note = engineered CasX variant
QEIKRINKIRRRLVKDSNTKKAGKTGPMKTLLVRVMTPDLRERLENLRKKPENIPQPISNTSRANLNKLLTDYTEMKKAILHVYWEEFQKDPVGLMSRVAQPASKKIDQNKLKPEMDEKGNLTTAGFACSQCGQPLFVYKLEQVSEKGKAYTNYFGRCNVAEHEKLILLAQLKPEKDSDEAVTYSLGKFGQRALDFYSIHVTKESTHPVKPLAQIAGNRYASPVGKALSDACMGTIASFLSKYQDIIIEHQKVVKGNQKRLESLRELAGKENLEYPSVTLPPQPHTKEGVDAYNEVIARVRMWVNLNLWQKLKLSRDDAKPLLRLKGFPSFPLVERQANAEVDWWDMVCNVKKLINEKKEDGKVFWQNLAGYKRQEALRPYLSSEEDRKKGKKFARYQLGDLLLHLEKKHGEDWGKVYDEAWERIDKKVEGLSKHIKLEEERRSEDAQSKAALTDWLRAKASFVIEGSKEADKDEFCRCELKLQKWYGDLRGKPFAIEAENSILDISGFSKQYNCAFIWQKDGVKKLNLYLIINYFKGGKLRFKKIKPEAFEANRFYTVINKKSGEIVPMEVNFNFDDPNLIILPLAFGKRQGREFIWNDLLSLETGSLKLANGRVIEKTLYNRRTRQDEPALFVALTFERREVLDSSNIKPMNLIGVDRGENIPAVIALTDPEGCPLSRFKDSLGNPTHILRIGESYKEKQRTIQAKKEVEQRRAGGYSRKYASKAKNLADDMVRNTARDLLYYAVTQDAMLIFENLSRGFGRQGKRTFMAERQYTRMEDWLTAKLAYEGLPSKTYLSKTLAQYTSKTCSNCGFTITSADYDRVLEKLKKTATGWMTTINGKELKVEGQITYYNRYKRQNVVKDLSVELDRLSEESVNNDISSWTKGRSGEALSLLKKRFSHRPVQEKFVCLNCGFETHADEQAALNIARSWLFLRSQEYKKYQTNKTTGNTDKRAFVETWQSFYRKKLKEVWKPAV

SEQ ID NO: 44328 - protein, 980 aa, synthetic construct
  REGION 1..980: note = engineered CasX variant
QEIKRINKIRRRLVKDSNTKKAGKTGPMKTLLVRVMTPDLRERLENLRKKPENIPQPISNTSRANLNKLLTDYTEMKKAILHVYWEEFQKDPVGLMSRVAQPASKKIDQNKLKPEMDEKGNLTTAGFACSQCGQPLFVYKLEQVSEKGKAYTNYFGRCNVAEHEKLILLAQLKPEKDSDEAVTYSLGKFGQRALDFYSIHVTKESTHPVKPLAQIAGNRYASYPVGKALSDACMGTIASFLSKYQDIIIEHQKVVKGNQKRLESLRELAGKENLEYPSVTLPPQPHTKEGVDAYNEVIARVRMWVNLNLWQKLKLSRDDAKPLLRLKGFPSFPLVERQANAEVDWWDMVCNVKKLINEKKEDGKVFWQNLAGYKRQEALRPYLSSEEDRKKGKKFARYQLGDLLLHLEKKHGEDWGKVYDEAWERIDKKVEGLSKHIKLEEERRSEDAQSKAALTDWLRAKASFVIEGLKEADDKDEFCRCELKLQKWYGDLRGKPFAIEAENSILDISGFSKQYNCAFIWQKDGVKKLNLYLIINYFKGGKLRFKKIKPEAFEANRFYTVINKKSGEIVPMEVNFNFDDPNLIILPLAFGKRQGREFIWNDLLSLETGSLKLANGRVIEKTLYNRRTRQDEPALFVALTFERREVLDSSNIKPMNLIGVDRGENIPAVIALTDPEGCPLSRFKDSLGNPTHILRIGESYKEKQRTIQAKKEVEQRRAGGYSRKYASKAKNLADDMVRNTARDLLYYAVTQDAMLIFENLSRGFGRQGKRTFMAERQYTRMEDWLTAKLAYEGLPSKTYLSKTLAQYTSKTCSNCGFTITSADYDRVLEKLKKTATGWMTTINGKELKVEGQITYYNRYKRQNVVKDLSVELDRLSEESVNNDISSWTKGRSGEALSLLKKRFSHRPVQEKFVCLNCGFETHADEQAALNIARSWLFLRSQEYKKYQTNKTTGNTDKRAFVETWQSFYRKKLKEVWKPAV

SEQ ID NO: 44329 - protein, 980 aa, synthetic construct
  REGION 1..980: note = engineered CasX variant
QEIKRINKIRRRLVKDSNTKKAGKTGPMKTLLVRVMTPDLRERLENLRKKPENIPQPISNTSRANLNKLLTDYTEMKKAILHVYWEEFQKDPVGLMSRVAQPASKKIDQNKLKPEMDEKGNLTTAGFACSQCGQPLFVYKLEQVSEKGKAYTNYFGRCNVAEHEKLILLAQLKPEKDSDEAVTYSLGKFGQRALDFYSIHVTKESTHPVKPLAQIAGNRYASHPVGKALSDACMGTIASFLSKYQDIIIEHQKVVKGNQKRLESLRELAGKENLEYPSVTLPPQPHTKEGVDAYNEVIARVRMWVNLNLWQKLKLSRDDAKPLLRLKGFPSFPLVERQANAEVDWWDMVCNVKKLINEKKEDGKVFWQNLAGYKRQEALRPYLSSEEDRKKGKKFARYQLGDLLLHLEKKHGEDWGKVYDEAWERIDKKVEGLSKHIKLEEERRSEDAQSKAALTDWLRAKASFVIEGLKEADDKDEFCRCELKLQKWYGDLRGKPFAIEAENSILDISGFSKQYNCAFIWQKDGVKKLNLYLIINYFKGGKLRFKKIKPEAFEANRFYTVINKKSGEIVPMEVNFNFDDPNLIILPLAFGKRQGREFIWNDLLSLETGSLKLANGRVIEKTLYNRRTRQDEPALFVALTFERREVLDSSNIKPMNLIGVDRGENIPAVIALTDPEGCPLSRFKDSLGNPTHILRIGESYKEKQRTIQAKKEVEQRRAGGYSRKYASKAKNLADDMVRNTARDLLYYAVTQDAMLIFENLSRGFGRQGKRTFMAERQYTRMEDWLTAKLAYEGLPSKTYLSKTLAQYTSKTCSNCGFTITSADYDRVLEKLKKTATGWMTTINGKELKVEGQITYYNRYKRQNVVKDLSVELDRLSEESVNNDISSWTKGRSGEALSLLKKRFSHRPVQEKFVCLNCGFETHADEQAALNIARSWLFLRSQEYKKYQTNKTTGNTDKRAFVETWQSFYRKKLKEVWKPAV

SEQ ID NO: 44330 - protein, 980 aa, synthetic construct
  REGION 1..980: note = engineered CasX variant
QEIKRINKIRRRLVKDSNTKKAGKTGPMKTLLVRVMTPDLRERLENLRKKPENIPQPISNTSRANLNKLLTDYTEMKKAILHVYWEEFQKDPVGLMSRVAQPASKKIDQNKLKPEMDEKGNLTTAGFACSQCGQPLFVYKLEQVSEKGKAYTNYFGRCNVAEHEKLILLAQLKPEKDSDEAVTYSLGKFGQRALDFYSIHVTKESTHPVKPLAQIAGNRYASSPVGKALSDACMGTIASFLSKYQDIIIEHQKVVKGNQKRLESLRELAGKENLEYPSVTLPPQPHTKEGVDAYNEVIARVRMWVNLNLWQKLKLSRDDAKPLLRLKGFPSFPLVERQANAEVDWWDMVCNVKKLINEKKEDGKVFWQNLAGYKRQEALRPYLSSEEDRKKGKKFARYQLGDLLLHLEKKHGEDWGKVYDEAWERIDKKVEGLSKHIKLEEERRSEDAQSKAALTDWLRAKASFVIEGLKEADDKDEFCRCELKLQKWYGDLRGKPFAIEAENSILDISGFSKQYNCAFIWQKDGVKKLNLYLIINYFKGGKLRFKKIKPEAFEANRFYTVINKKSGEIVPMEVNFNFDDPNLIILPLAFGKRQGREFIWNDLLSLETGSLKLANGRVIEKTLYNRRTRQDEPALFVALTFERREVLDSSNIKPMNLIGVDRGENIPAVIALTDPEGCPLSRFKDSLGNPTHILRIGESYKEKQRTIQAKKEVEQRRAGGYSRKYASKAKNLADDMVRNTARDLLYYAVTQDAMLIFENLSRGFGRQGKRTFMAERQYTRMEDWLTAKLAYEGLPSKTYLSKTLAQYTSKTCSNCGFTITSADYDRVLEKLKKTATGWMTTINGKELKVEGQITYYNRYKRQNVVKDLSVELDRLSEESVNNDISSWTKGRSGEALSLLKKRFSHRPVQEKFVCLNCGFETHADEQAALNIARSWLFLRSQEYKKYQTNKTTGNTDKRAFVETWQSFYRKKLKEVWKPAV

SEQ ID NO: 44331 - protein, 980 aa, synthetic construct
  REGION 1..980: note = engineered CasX variant
QEIKRINKIRRRLVKDSNTKKAGKTGPMKTLLVRVMTPDLRERLENLRKKPENIPQPISNTSRANLNKLLTDYTEMKKAILHVYWEEFQKDPVGLMSRVAQPASKKIDQNKLKPEMDEKGNLTTAGFACSQCGQPLFVYKLEQVSEKGKAYTNYFGRCNVAEHEKLILLAQLKPEKDSDEAVTYSLGKFGQRALDFYSIHVTKESTHPVKPLAQIAGNRYASTPVGKALSDACMGTIASFLSKYQDIIIEHQKVVKGNQKRLESLRELAGKENLEYPSVTLPPQPHTKEGVDAYNEVIARVRMWVNLNLWQKLKLSRDDAKPLLRLKGFPSFPLVERQANAEVDWWDMVCNVKKLINEKKEDGKVFWQNLAGYKRQEALRPYLSSEEDRKKGKKFARYQLGDLLLHLEKKHGEDWGKVYDEAWERIDKKVEGLSKHIKLEEERRSEDAQSKAALTDWLRAKASFVIEGLKEADDKDEFCRCELKLQKWYGDLRGKPFAIEAENSILDISGFSKQYNCAFIWQKDGVKKLNLYLIINYFKGGKLRFKKIKPEAFEANRFYTVINKKSGEIVPMEVNFNFDDPNLIILPLAFGKRQGREFIWNDLLSLETGSLKLANGRVIEKTLYNRRTRQDEPALFVALTFERREVLDSSNIKPMNLIGVDRGENIPAVIALTDPEGCPLSRFKDSLGNPTHILRIGESYKEKQRTIQAKKEVEQRRAGGYSRKYASKAKNLADDMVRNTARDLLYYAVTQDAMLIFENLSRGFGRQGKRTFMAERQYTRMEDWLTAKLAYEGLPSKTYLSKTLAQYTSKTCSNCGFTITSADYDRVLEKLKKTATGWMTTINGKELKVEGQITYYNRYKRQNVVKDLSVELDRLSEESVNNDISSWTKGRSGEALSLLKKRFSHRPVQEKFVCLNCGFETHADEQAALNIARSWLFLRSQEYKKYQTNKTTGNTDKRAFVETWQSFYRKKLKEVWKPAV

SEQ ID NO: 44332 - protein, 980 aa, synthetic construct
  REGION 1..980: note = engineered CasX variant
QEIKRINKIRRRLVKDSNTKKAGKTGPMKTLLVRVMTPDLRERLENLRKKPENIPQPISNTSRANLNKLLTDYTEMKKAILHVYWEEFQKDPVGLMSRVAQPASKKIDQNKLKPEMDEKGNLTTAGFACSQCGQPLFVYKLEQVSEKGKAYTNYFGRCNVAEHEKLILLAQLKPEKDSDEAVTYSLGKFGQRALDFYSIHVTKESTHPVKPLAQIAGNRYASAPVGKALSDACMGTIASFLSKYQDIIIEHQKVVKGNQKRLESLRELAGKENLEYPSVTLPPQPHTKEGVDAYNEVIARVRMWVNLNLWQKLKLSRDDAKPLLRLKGFPSFPLVERQANAEVDWWDMVCNVKKLINEKKEDGKVFWQNLAGYKRQEALRPYLSSEEDRKKGKKFARYQLGDLLLHLEKKHGEDWGKVYDEAWERIDKKVEGLSKHIKLEEERRSEDAQSKAALTDWLRAKASFVIEGLKEADDKDEFCRCELKLQKWYGDLRGKPFAIEAENSILDISGFSKQYNCAFIWQKDGVKKLNLYLIINYFKGGKLRFKKIKPEAFEANRFYTVINKKSGEIVPMEVNFNFDDPNLIILPLAFGKRQGREFIWNDLLSLETGSLKLANGRVIEKTLYNRRTRQDEPALFVALTFERREVLDSSNIKPMNLIGVDRGENIPAVIALTDPEGCPLSRFKDSLGNPTHILRIGESYKEKQRTIQAKKEVEQRRAGGYSRKYASKAKNLADDMVRNTARDLLYYAVTQDAMLIFENLSRGFGRQGKRTFMAERQYTRMEDWLTAKLAYEGLPSKTYLSKTLAQYTSKTCSNCGFTITSADYDRVLEKLKKTATGWMTTINGKELKVEGQITYYNRYKRQNVVKDLSVELDRLSEESVNNDISSWTKGRSGEALSLLKKRFSHRPVQEKFVCLNCGFETHADEQAALNIARSWLFLRSQEYKKYQTNKTTGNTDKRAFVETWQSFYRKKLKEVWKPAV

SEQ ID NO: 44333 - protein, 980 aa, synthetic construct
  REGION 1..980: note = engineered CasX variant
QEIKRINKIRRRLVKDSNTKKAGKTGPMKTLLVRVMTPDLRERLENLRKKPENIPQPISNTSRANLNKLLTDYTEMKKAILHVYWEEFQKDPVGLMSRVAQPASKKIDQNKLKPEMDEKGNLTTAGFACSQCGQPLFVYKLEQVSEKGKAYTNYFGRCNVAEHEKLILLAQLKPEKDSDEAVTYSLGKFGQRALDFYSIHVTKESTHPVKPLAQIAGNRYASVPVGKALSDACMGTIASFLSKYQDIIIEHQKVVKGNQKRLESLRELAGKENLEYPSVTLPPQPHTKEGVDAYNEVIARVRMWVNLNLWQKLKLSRDDAKPLLRLKGFPSFPLVERQANAEVDWWDMVCNVKKLINEKKEDGKVFWQNLAGYKRQEALRPYLSSEEDRKKGKKFARYQLGDLLLHLEKKHGEDWGKVYDEAWERIDKKVEGLSKHIKLEEERRSEDAQSKAALTDWLRAKASFVIEGLKEADDKDEFCRCELKLQKWYGDLRGKPFAIEAENSILDISGFSKQYNCAFIWQKDGVKKLNLYLIINYFKGGKLRFKKIKPEAFEANRFYTVINKKSGEIVPMEVNFNFDDPNLIILPLAFGKRQGREFIWNDLLSLETGSLKLANGRVIEKTLYNRRTRQDEPALFVALTFERREVLDSSNIKPMNLIGVDRGENIPAVIALTDPEGCPLSRFKDSLGNPTHILRIGESYKEKQRTIQAKKEVEQRRAGGYSRKYASKAKNLADDMVRNTARDLLYYAVTQDAMLIFENLSRGFGRQGKRTFMAERQYTRMEDWLTAKLAYEGLPSKTYLSKTLAQYTSKTCSNCGFTITSADYDRVLEKLKKTATGWMTTINGKELKVEGQITYYNRYKRQNVVKDLSVELDRLSEESVNNDISSWTKGRSGEALSLLKKRFSHRPVQEKFVCLNCGFETHADEQAALNIARSWLFLRSQEYKKYQTNKTTGNTDKRAFVETWQSFYRKKLKEVWKPAV

SEQ ID NO: 44334 - protein, 980 aa, synthetic construct
  REGION 1..980: note = engineered CasX variant
QEIKRINKIRRRLVKDSNTKKAGKTGPMKTLLVRVMTPDLRERLENLRKKPENIPQPISNTSRANLNKLLTDYTEMKKAILHVYWEEFQKDPVGLMSRVAQPASKKIDQNKLKPEMDEKGNLTTAGFACSQCGQPLFVYKLEQVSEKGKAYTNYFGRCNVAEHEKLIKLAQLKPEKDSDEAVTYSLGKFGQRALDFYSIHVTKESTHPVKPLAQIAGNRYASGPVGKALSDACMGTIASFLSKYQDIIIEHQKVVKGNQKRLESLRELAGKENLEYPSVTLPPQPHTKEGVDAYNEVIARVRMWVNLNLWQKLKLSRDDAKPLLRLKGFPSFPLVERQANAEVDWWDMVCNVKKLINEKKEDGKVFWQNLAGYKRQEALRPYLSSEEDRKKGKKFARYQLGDLLLHLEKKHGEDWGKVYDEAWERIDKKVEGLSKHIKLEEERRSEDAQSKAALTDWLRAKASFVIEGLKEADDKDEFCRCELKLQKWYGDLRGKPFAIEAENSILDISGFSKQYNCAFIWQKDGVKKLNLYLIINYFKGGKLRFKKIKPEAFEANRFYTVINKKSGEIVPMEVNFNFDDPNLIILPLAFGKRQGREFIWNDLLSLETGSLKLANGRVIEKTLYNRRTRQDEPALFVALTFERREVLDSSNIKPMNLIGVDRGENIPAVIALTDPEGCPLSRFKDSLGNPTHILRIGESYKEKQRTIQAKKEVEQRRAGGYSRKYASKAKNLADDMVRNTARDLLYYAVTQDAMLIFENLSRGFGRQGKRTFMAERQYTRMEDWLTAKLAYEGLPSKTYLSKTLAQYTSKTCSNCGFTITSADYDRVLEKLKKTATGWMTTINGKELKVEGQITYYNRYKRQNVVKDLSVELDRLSEESVNNDISSWTKGRSGEALSLLKKRFSHRPVQEKFVCLNCGFETHADEQAALNIARSWLFLRSQEYKKYQTNKTTGNTDKRAFVETWQSFYRKKLKEVWKPAV

SEQ ID NO: 44335 - protein, 979 aa, synthetic construct
  REGION 1..979: note = engineered CasX variant
QEIKRINKIRRRLVKDSNTKKAGKTGPMKTLLVRVMTPDLRERLENLRKKPENIPQPISNTSRANLNKLLTDYTEMKKAILHVYWEEFQKDPVGLMSRVAQPASKKIDQNKLKPEMDEKGNLTTAGFACSQCGQPLFVYKLEQVSEKGKAYTNYFGRCNVAEHEKLILLAQLKPEKDSDEAVTYSLGKFGQRALDFYSIHVTKESTHPVKPLAQIAGNRYASPVGKALSDACMGTIASFLSKYQDIIIEHQKVVKGNQKRLESLRELAGKENLEYPSVTLPPQPHTKEGVDAYNEVIARVRMWVNLNLWQKLKLSRDDAKPLLRLKGFPSFPLVERQANAEVDWWDMVCNVKKLINEKKEDGKVFWQNLAGYKRQEALRPYLSSEEDRKKGKKFARYQLGDLLLHLEKKHGEDWGKVYDEAWERIDKKVEGLSKHIKLEEERRSEDAQSKAALTDWLRAKASFVIEGLKEADDKDEFCRCELKLQKWYGDLRGKPFAIEAENSILDISGFSKQYNCAFIWQKDGVKKLNLYLIINYFKGGKLRFKKIKPEAFEANRFYTVINKKSGEIVPMEVNFNFDDPNLIILPLAFGKRQGREFIWNDLLSLETGSLKLANGRVIEKTLYNRRTRQDEPALFVALTFERREVLDSSNIKPMNLIGVDRGENIPAVIALTDPEGCPLSRFKDSLGNPTHILRIGESYKEKQRTIQAKKEVEQRRAGGYSRKYASKAKNLADDMVRNTARDLLYYAVTQDAMLIFENLSRGFGRQGKRTFMAERQYTRMEDWLTAKLAYEGLPSKTYLSKTLAQYTSKTCSNCGFTITSADYDRVLEKLKKTATGWMTTINGKELKVEGQITYYNRYKRQNVVKDLSVELDRLSEESVNNDISSWTKGRSGEALSLLKKRFSHRPVQEKFVCLNCGFETHADEQAALNIARSWLFLRSQEYKKYQTNKTTGNTDKRAFVETWQSFYRKKLKEVWKPAV

SEQ ID NO: 44336 - protein, 980 aa, synthetic construct
  REGION 1..980: note = engineered CasX variant
QEIKRINKIRRRLVKDSNTKKAGKTGPMKTLLVRVMTPDLRERLENLRKKPENIPQPISNTSRANLNKLLTDYTEMKKAILHVYWEEFQKDPVGLMSRVAQPASKKIDQNKLKPEMDEKGNLTTAGFACSQCGQPLFVYKLEQVSEKGKAYTNYFGRCNVAEHEKLILLAQLKPEKDSDEAVTYSLGKFGQRALDFYSIHVTKESTHPVKPLAQIAGNRYASYPVGKALSDACMGTIASFLSKYQDIIIEHQKVVKGNQKRLESLRELAGKENLEYPSVTLPPQPHTKEGVDAYNEVIARVRMWVNLNLWQKLKLSRDDAKPLLRLKGFPSFPLVERQANAEVDWWDMVCNVKKLINEKKEDGKVFWQNLAGYKRQEALRPYLSSEEDRKKGKKFARYQLGDLLLHLEKKHGEDWGKVYDEAWERIDKKVEGLSKHIKLEEERRSEDAQSKAALTDWLRAKASFVIEGLKEADKDEFCRCELKLQKWYGDLRGKPFAIEAENSILDISGFSKQYNCAFIWQKDGVKKLNLYLIINYFKGGKLRFKKIKPEAFEANRFYTVINKKSGEIVPMEVNFNFDDPNLIILPLAFGKRQGREFIWNDLLSLETGSLKLANGRVIEKTLYNRRTRQDEPALFVALTFERREVLDSSNIKPMNLIGVDRGENIPAVIALTDPEGCPLSRFKDSLGNPTHILRIGESYKEKQRTIQAKKEVEQRRAGGYSRKYASKAKNLADDMVRNTARDLLYYAVTQDAMLIFENLSRGFGRQGKRTFMAERQYTRMEDWLTAKLAYEGLPSKTYLSKTLAQYTSKTCSNCGFTITSADYDRVLEKLKKTATGWMTTINGKELKVEGQITYYNRYKRQNVVKDLSVELDRLSEESVNNDISSWTKGRSGNEALSLLKKRFSHRPVQEKFVCLNCGFETHADEQAALNIARSWLFLRSQEYKKYQTNKTTGNTDKRAFVETWQSFYRKKLKEVWKPAV

SEQ ID NO: 44337 - protein, 980 aa, synthetic construct
  REGION 1..980: note = engineered CasX variant
QEIKRINKIRRRLVKDSNTKKAGKTGPMKTLLVRVMTPDLRERLENLRKKPENIPQPISNTSRANLNKLLTDYTEMKKAILHVYWEEFQKDPVGLMSRVAQPASKKIDQNKLKPEMDEKGNLTTAGFACSQCGQPLFVYKLEQVSEKGKAYTNYFGRCNVAEHEKLILLAQLKPEKDSDEAVTYSLGKFGQRALDFYSIHVTKESTHPVKPLAQIAGNRYASHPVGKALSDACMGTIASFLSKYQDIIIEHQKVVKGNQKRLESLRELAGKENLEYPSVTLPPQPHTKEGVDAYNEVIARVRMWVNLNLWQKLKLSRDDAKPLLRLKGFPSFPLVERQANAEVDWWDMVCNVKKLINEKKEDGKVFWQNLAGYKRQEALRPYLSSEEDRKKGKKFARYQLGDLLLHLEKKHGEDWGKVYDEAWERIDKKVEGLSKHIKLEEERRSEDAQSKAALTDWLRAKASFVIEGLKEADKDEFCRCELKLQKWYGDLRGKPFAIEAENSILDISGFSKQYNCAFIWQKDGVKKLNLYLIINYFKGGKLRFKKIKPEAFEANRFYTVINKKSGEIVPMEVNFNFDDPNLIILPLAFGKRQGREFIWNDLLSLETGSLKLANGRVIEKTLYNRRTRQDEPALFVALTFERREVLDSSNIKPMNLIGVDRGENIPAVIALTDPEGCPLSRFKDSLGNPTHILRIGESYKEKQRTIQAKKEVEQRRAGGYSRKYASKAKNLADDMVRNTARDLLYYAVTQDAMLIFENLSRGFGRQGKRTFMAERQYTRMEDWLTAKLAYEGLPSKTYLSKTLAQYTSKTCSNCGFTITSADYDRVLEKLKKTATGWMTTINGKELKVEGQITYYNRYKRQNVVKDLSVELDRLSEESVNNDISSWTKGRSGNEALSLLKKRFSHRPVQEKFVCLNCGFETHADEQAALNIARSWLFLRSQEYKKYQTNKTTGNTDKRAFVETWQSFYRKKLKEVWKPAV

SEQ ID NO: 44338 - protein, 980 aa, synthetic construct
  REGION 1..980: note = engineered CasX variant
QEIKRINKIRRRLVKDSNTKKAGKTGPMKTLLVRVMTPDLRERLENLRKKPENIPQPISNTSRANLNKLLTDYTEMKKAILHVYWEEFQKDPVGLMSRVAQPASKKIDQNKLKPEMDEKGNLTTAGFACSQCGQPLFVYKLEQVSEKGKAYTNYFGRCNVAEHEKLILLAQLKPEKDSDEAVTYSLGKFGQRALDFYSIHVTKESTHPVKPLAQIAGNRYASSPVGKALSDACMGTIASFLSKYQDIIIEHQKVVKGNQKRLESLRELAGKENLEYPSVTLPPQPHTKEGVDAYNEVIARVRMWVNLNLWQKLKLSRDDAKPLLRLKGFPSFPLVERQANAEVDWWDMVCNVKKLINEKKEDGKVFWQNLAGYKRQEALRPYLSSEEDRKKGKKFARYQLGDLLLHLEKKHGEDWGKVYDEAWERIDKKVEGLSKHIKLEEERRSEDAQSKAALTDWLRAKASFVIEGLKEADKDEFCRCELKLQKWYGDLRGKPFAIEAENSILDISGFSKQYNCAFIWQKDGVKKLNLYLIINYFKGGKLRFKKIKPEAFEANRFYTVINKKSGEIVPMEVNFNFDDPNLIILPLAFGKRQGREFIWNDLLSLETGSLKLANGRVIEKTLYNRRTRQDEPALFVALTFERREVLDSSNIKPMNLIGVDRGENIPAVIALTDPEGCPLSRFKDSLGNPTHILRIGESYKEKQRTIQAKKEVEQRRAGGYSRKYASKAKNLADDMVRNTARDLLYYAVTQDAMLIFENLSRGFGRQGKRTFMAERQYTRMEDWLTAKLAYEGLPSKTYLSKTLAQYTSKTCSNCGFTITSADYDRVLEKLKKTATGWMTTINGKELKVEGQITYYNRYKRQNVVKDLSVELDRLSEESVNNDISSWTKGRSGNEALSLLKKRFSHRPVQEKFVCLNCGFETHADEQAALNIARSWLFLRSQEYKKYQTNKTTGNTDKRAFVETWQSFYRKKLKEVWKPAV

SEQ ID NO: 44339 - protein, 980 aa, synthetic construct
  REGION 1..980: note = engineered CasX variant
QEIKRINKIRRRLVKDSNTKKAGKTGPMKTLLVRVMTPDLRERLENLRKKPENIPQPISNTSRANLNKLLTDYTEMKKAILHVYWEEFQKDPVGLMSRVAQPASKKIDQNKLKPEMDEKGNLTTAGFACSQCGQPLFVYKLEQVSEKGKAYTNYFGRCNVAEHEKLILLAQLKPEKDSDEAVTYSLGKFGQRALDFYSIHVTKESTHPVKPLAQIAGNRYASTPVGKALSDACMGTIASFLSKYQDIIIEHQKVVKGNQKRLESLRELAGKENLEYPSVTLPPQPHTKEGVDAYNEVIARVRMWVNLNLWQKLKLSRDDAKPLLRLKGFPSFPLVERQANAEVDWWDMVCNVKKLINEKKEDGKVFWQNLAGYKRQEALRPYLSSEEDRKKGKKFARYQLGDLLLHLEKKHGEDWGKVYDEAWERIDKKVEGLSKHIKLEEERRSEDAQSKAALTDWLRAKASFVIEGLKEADKDEFCRCELKLQKWYGDLRGKPFAIEAENSILDISGFSKQYNCAFIWQKDGVKKLNLYLIINYFKGGKLRFKKIKPEAFEANRFYTVINKKSGEIVPMEVNFNFDDPNLIILPLAFGKRQGREFIWNDLLSLETGSLKLANGRVIEKTLYNRRTRQDEPALFVALTFERREVLDSSNIKPMNLIGVDRGENIPAVIALTDPEGCPLSRFKDSLGNPTHILRIGESYKEKQRTIQAKKEVEQRRAGGYSRKYASKAKNLADDMVRNTARDLLYYAVTQDAMLIFENLSRGFGRQGKRTFMAERQYTRMEDWLTAKLAYEGLPSKTYLSKTLAQYTSKTCSNCGFTITSADYDRVLEKLKKTATGWMTTINGKELKVEGQITYYNRYKRQNVVKDLSVELDRLSEESVNNDISSWTKGRSGNEALSLLKKRFSHRPVQEKFVCLNCGFETHADEQAALNIARSWLFLRSQEYKKYQTNKTTGNTDKRAFVETWQSFYRKKLKEVWKPAV

SEQ ID NO: 44340 - protein, 980 aa, synthetic construct
  REGION 1..980: note = engineered CasX variant
QEIKRINKIRRRLVKDSNTKKAGKTGPMKTLLVRVMTPDLRERLENLRKKPENIPQPISNTSRANLNKLLTDYTEMKKAILHVYWEEFQKDPVGLMSRVAQPASKKIDQNKLKPEMDEKGNLTTAGFACSQCGQPLFVYKLEQVSEKGKAYTNYFGRCNVAEHEKLILLAQLKPEKDSDEAVTYSLGKFGQRALDFYSIHVTKESTHPVKPLAQIAGNRYASAPVGKALSDACMGTIASFLSKYQDIIIEHQKVVKGNQKRLESLRELAGKENLEYPSVTLPPQPHTKEGVDAYNEVIARVRMWVNLNLWQKLKLSRDDAKPLLRLKGFPSFPLVERQANAEVDWWDMVCNVKKLINEKKEDGKVFWQNLAGYKRQEALRPYLSSEEDRKKGKKFARYQLGDLLLHLEKKHGEDWGKVYDEAWERIDKKVEGLSKHIKLEEERRSEDAQSKAALTDWLRAKASFVIEGLKEADKDEFCRCELKLQKWYGDLRGKPFAIEAENSILDISGFSKQYNCAFIWQKDGVKKLNLYLIINYFKGGKLRFKKIKPEAFEANRFYTVINKKSGEIVPMEVNFNFDDPNLIILPLAFGKRQGREFIWNDLLSLETGSLKLANGRVIEKTLYNRRTRQDEPALFVALTFERREVLDSSNIKPMNLIGVDRGENIPAVIALTDPEGCPLSRFKDSLGNPTHILRIGESYKEKQRTIQAKKEVEQRRAGGYSRKYASKAKNLADDMVRNTARDLLYYAVTQDAMLIFENLSRGFGRQGKRTFMAERQYTRMEDWLTAKLAYEGLPSKTYLSKTLAQYTSKTCSNCGFTITSADYDRVLEKLKKTATGWMTTINGKELKVEGQITYYNRYKRQNVVKDLSVELDRLSEESVNNDISSWTKGRSGNEALSLLKKRFSHRPVQEKFVCLNCGFETHADEQAALNIARSWLFLRSQEYKKYQTNKTTGNTDKRAFVETWQSFYRKKLKEVWKPAV

SEQ ID NO: 44341 - protein, 980 aa, synthetic construct
  REGION 1..980: note = engineered CasX variant
QEIKRINKIRRRLVKDSNTKKAGKTGPMKTLLVRVMTPDLRERLENLRKKPENIPQPISNTSRANLNKLLTDYTEMKKAILHVYWEEFQKDPVGLMSRVAQPASKKIDQNKLKPEMDEKGNLTTAGFACSQCGQPLFVYKLEQVSEKGKAYTNYFGRCNVAEHEKLILLAQLKPEKDSDEAVTYSLGKFGQRALDFYSIHVTKESTHPVKPLAQIAGNRYASVPVGKALSDACMGTIASFLSKYQDIIIEHQKVVKGNQKRLESLRELAGKENLEYPSVTLPPQPHTKEGVDAYNEVIARVRMWVNLNLWQKLKLSRDDAKPLLRLKGFPSFPLVERQANAEVDWWDMVCNVKKLINEKKEDGKVFWQNLAGYKRQEALRPYLSSEEDRKKGKKFARYQLGDLLLHLEKKHGEDWGKVYDEAWERIDKKVEGLSKHIKLEEERRSEDAQSKAALTDWLRAKASFVIEGLKEADKDEFCRCELKLQKWYGDLRGKPFAIEAENSILDISGFSKQYNCAFIWQKDGVKKLNLYLIINYFKGGKLRFKKIKPEAFEANRFYTVINKKSGEIVPMEVNFNFDDPNLIILPLAFGKRQGREFIWNDLLSLETGSLKLANGRVIEKTLYNRRTRQDEPALFVALTFERREVLDSSNIKPMNLIGVDRGENIPAVIALTDPEGCPLSRFKDSLGNPTHILRIGESYKEKQRTIQAKKEVEQRRAGGYSRKYASKAKNLADDMVRNTARDLLYYAVTQDAMLIFENLSRGFGRQGKRTFMAERQYTRMEDWLTAKLAYEGLPSKTYLSKTLAQYTSKTCSNCGFTITSADYDRVLEKLKKTATGWMTTINGKELKVEGQITYYNRYKRQNVVKDLSVELDRLSEESVNNDISSWTKGRSGNEALSLLKKRFSHRPVQEKFVCLNCGFETHADEQAALNIARSWLFLRSQEYKKYQTNKTTGNTDKRAFVETWQSFYRKKLKEVWKPAV

SEQ ID NO: 44342 - protein, 980 aa, synthetic construct
  REGION 1..980: note = engineered CasX variant
QEIKRINKIRRRLVKDSNTKKAGKTGPMKTLLVRVMTPDLRERLENLRKKPENIPQPISNTSRANLNKLLTDYTEMKKAILHVYWEEFQKDPVGLMSRVAQPASKKIDQNKLKPEMDEKGNLTTAGFACSQCGQPLFVYKLEQVSEKGKAYTNYFGRCNVAEHEKLIKLAQLKPEKDSDEAVTYSLGKFGQRALDFYSIHVTKESTHPVKPLAQIAGNRYASGPVGKALSDACMGTIASFLSKYQDIIIEHQKVVKGNQKRLESLRELAGKENLEYPSVTLPPQPHTKEGVDAYNEVIARVRMWVNLNLWQKLKLSRDDAKPLLRLKGFPSFPLVERQANAEVDWWDMVCNVKKLINEKKEDGKVFWQNLAGYKRQEALRPYLSSEEDRKKGKKFARYQLGDLLLHLEKKHGEDWGKVYDEAWERIDKKVEGLSKHIKLEEERRSEDAQSKAALTDWLRAKASFVIEGLKEADKDEFCRCELKLQKWYGDLRGKPFAIEAENSILDISGFSKQYNCAFIWQKDGVKKLNLYLIINYFKGGKLRFKKIKPEAFEANRFYTVINKKSGEIVPMEVNFNFDDPNLIILPLAFGKRQGREFIWNDLLSLETGSLKLANGRVIEKTLYNRRTRQDEPALFVALTFERREVLDSSNIKPMNLIGVDRGENIPAVIALTDPEGCPLSRFKDSLGNPTHILRIGESYKEKQRTIQAKKEVEQRRAGGYSRKYASKAKNLADDMVRNTARDLLYYAVTQDAMLIFENLSRGFGRQGKRTFMAERQYTRMEDWLTAKLAYEGLPSKTYLSKTLAQYTSKTCSNCGFTITSADYDRVLEKLKKTATGWMTTINGKELKVEGQITYYNRYKRQNVVKDLSVELDRLSEESVNNDISSWTKGRSGNEALSLLKKRFSHRPVQEKFVCLNCGFETHADEQAALNIARSWLFLRSQEYKKYQTNKTTGNTDKRAFVETWQSFYRKKLKEVWKPAV

SEQ ID NO: 44343 - protein, 979 aa, synthetic construct
  REGION 1..979: note = engineered CasX variant
QEIKRINKIRRRLVKDSNTKKAGKTGPMKTLLVRVMTPDLRERLENLRKKPENIPQPISNTSRANLNKLLTDYTEMKKAILHVYWEEFQKDPVGLMSRVAQPASKKIDQNKLKPEMDEKGNLTTAGFACSQCGQPLFVYKLEQVSEKGKAYTNYFGRCNVAEHEKLILLAQLKPEKDSDEAVTYSLGKFGQRALDFYSIHVTKESTHPVKPLAQIAGNRYASPVGKALSDACMGTIASFLSKYQDIIIEHQKVVKGNQKRLESLRELAGKENLEYPSVTLPPQPHTKEGVDAYNEVIARVRMWVNLNLWQKLKLSRDDAKPLLRLKGFPSFPLVERQANAEVDWWDMVCNVKKLINEKKEDGKVFWQNLAGYKRQEALRPYLSSEEDRKKGKKFARYQLGDLLLHLEKKHGEDWGKVYDEAWERIDKKVEGLSKHIKLEEERRSEDAQSKAALTDWLRAKASFVIEGLKEADKDEFCRCELKLQKWYGDLRGKPFAIEAENSILDISGFSKQYNCAFIWQKDGVKKLNLYLIINYFKGGKLRFKKIKPEAFEANRFYTVINKKSGEIVPMEVNFNFDDPNLIILPLAFGKRQGREFIWNDLLSLETGSLKLANGRVIEKTLYNRRTRQDEPALFVALTFERREVLDSSNIKPMNLIGVDRGENIPAVIALTDPEGCPLSRFKDSLGNPTHILRIGESYKEKQRTIQAKKEVEQRRAGGYSRKYASKAKNLADDMVRNTARDLLYYAVTQDAMLIFENLSRGFGRQGKRTFMAERQYTRMEDWLTAKLAYEGLPSKTYLSKTLAQYTSKTCSNCGFTITSADYDRVLEKLKKTATGWMTTINGKELKVEGQITYYNRYKRQNVVKDLSVELDRLSEESVNNDISSWTKGRSGNEALSLLKKRFSHRPVQEKFVCLNCGFETHADEQAALNIARSWLFLRSQEYKKYQTNKTTGNTDKRAFVETWQSFYRKKLKEVWKPAV

SEQ ID NO: 44344 - protein, 979 aa, synthetic construct
  REGION 1..979: note = engineered CasX variant
QEIKRINKIRRRLVKDSNTKKAGKTGPMKTLLVRVMTPDLRERLENLRKKPENIPQPISNTSRANLNKLLTDYTEMKKAILHVYWEEFQKDPVGLMSRVAQPASKKIDQNKLKPEMDEKGNLTTAGFACSQCGQPLFVYKLEQVSEKGKAYTNYFGRCNVAEHEKLILLAQLKPEKDSDEAVTYSLGKFGQRALDFYSIHVTKESTHPVKPLAQIAGNRYASYPVGKALSDACMGTIASFLSKYQDIIIEHQKVVKGNQKRLESLRELAGKENLEYPSVTLPPQPHTKEGVDAYNEVIARVRMWVNLNLWQKLKLSRDDAKPLLRLKGFPSFPLVERQANAEVDWWDMVCNVKKLINEKKEDGKVFWQNLAGYKRQEALRPYLSSEEDRQKGKKFARYQLGDLLLHLEKKHGEDWGKVYDEAWERIDKKVEGLSKHIKLEEERRSEDAQSKAALTDWLRAKASFVIEGLKEADKDEFCRCELKLQKWYGDLRGKPFAIEAENSILDISGFSKQYNCAFIWQKDGVKKLNLYLIINYFKGGKLRFKKIKPEAFEANRFYTVINKKSGEIVPMEVNFNFDDPNLIILPLAFGKRQGREFIWNDLLSLETGSLKLANGRVIEKTLYNRRTRQDEPALFVALTFERREVLDSSNIKPMNLIGVDRGENIPAVIALTDPEGCPLSRFKDSLGNPTHILRIGESYKEKQRTIQAKKEVEQRRAGGYSRKYASKAKNLADDMVRNTARDLLYYAVTQDAMLIFENLSRGFGRQGKRTFMAERQYTRMEDWLTAKLAYEGLPSKTYLSKTLAQYTSKTCSNCGFTITSADYDRVLEKLKKTATGWMTTINGKELKVEGQITYYNRYKRQNVVKDLSVELDRLSEESVNNDISSWTKGRSGEALSLLKKRFSHRPVQEKFVCLNCGFETHADEQAALNIARSWLFLRSQEYKKYQTNKTTGNTDKRAFVETWQSFYRKKLKEVWKPAV

SEQ ID NO: 44345 - protein, 979 aa, synthetic construct
  REGION 1..979: note = engineered CasX variant
QEIKRINKIRRRLVKDSNTKKAGKTGPMKTLLVRVMTPDLRERLENLRKKPENIPQPISNTSRANLNKLLTDYTEMKKAILHVYWEEFQKDPVGLMSRVAQPASKKIDQNKLKPEMDEKGNLTTAGFACSQCGQPLFVYKLEQVSEKGKAYTNYFGRCNVAEHEKLILLAQLKPEKDSDEAVTYSLGKFGQRALDFYSIHVTKESTHPVKPLAQIAGNRYASHPVGKALSDACMGTIASFLSKYQDIIIEHQKVVKGNQKRLESLRELAGKENLEYPSVTLPPQPHTKEGVDAYNEVIARVRMWVNLNLWQKLKLSRDDAKPLLRLKGFPSFPLVERQANAEVDWWDMVCNVKKLINEKKEDGKVFWQNLAGYKRQEALRPYLSSEEDRQKGKKFARYQLGDLLLHLEKKHGEDWGKVYDEAWERIDKKVEGLSKHIKLEEERRSEDAQSKAALTDWLRAKASFVIEGLKEADKDEFCRCELKLQKWYGDLRGKPFAIEAENSILDISGFSKQYNCAFIWQKDGVKKLNLYLIINYFKGGKLRFKKIKPEAFEANRFYTVINKKSGEIVPMEVNFNFDDPNLIILPLAFGKRQGREFIWNDLLSLETGSLKLANGRVIEKTLYNRRTRQDEPALFVALTFERREVLDSSNIKPMNLIGVDRGENIPAVIALTDPEGCPLSRFKDSLGNPTHILRIGESYKEKQRTIQAKKEVEQRRAGGYSRKYASKAKNLADDMVRNTARDLLYYAVTQDAMLIFENLSRGFGRQGKRTFMAERQYTRMEDWLTAKLAYEGLPSKTYLSKTLAQYTSKTCSNCGFTITSADYDRVLEKLKKTATGWMTTINGKELKVEGQITYYNRYKRQNVVKDLSVELDRLSEESVNNDISSWTKGRSGEALSLLKKRFSHRPVQEKFVCLNCGFETHADEQAALNIARSWLFLRSQEYKKYQTNKTTGNTDKRAFVETWQSFYRKKLKEVWKPAV

SEQ ID NO: 44346 - protein, 979 aa, synthetic construct
  REGION 1..979: note = engineered CasX variant
QEIKRINKIRRRLVKDSNTKKAGKTGPMKTLLVRVMTPDLRERLENLRKKPENIPQPISNTSRANLNKLLTDYTEMKKAILHVYWEEFQKDPVGLMSRVAQPASKKIDQNKLKPEMDEKGNLTTAGFACSQCGQPLFVYKLEQVSEKGKAYTNYFGRCNVAEHEKLILLAQLKPEKDSDEAVTYSLGKFGQRALDFYSIHVTKESTHPVKPLAQIAGNRYASSPVGKALSDACMGTIASFLSKYQDIIIEHQKVVKGNQKRLESLRELAGKENLEYPSVTLPPQPHTKEGVDAYNEVIARVRMWVNLNLWQKLKLSRDDAKPLLRLKGFPSFPLVERQANAEVDWWDMVCNVKKLINEKKEDGKVFWQNLAGYKRQEALRPYLSSEEDRQKGKKFARYQLGDLLLHLEKKHGEDWGKVYDEAWERIDKKVEGLSKHIKLEEERRSEDAQSKAALTDWLRAKASFVIEGLKEADKDEFCRCELKLQKWYGDLRGKPFAIEAENSILDISGFSKQYNCAFIWQKDGVKKLNLYLIINYFKGGKLRFKKIKPEAFEANRFYTVINKKSGEIVPMEVNFNFDDPNLIILPLAFGKRQGREFIWNDLLSLETGSLKLANGRVIEKTLYNRRTRQDEPALFVALTFERREVLDSSNIKPMNLIGVDRGENIPAVIALTDPEGCPLSRFKDSLGNPTHILRIGESYKEKQRTIQAKKEVEQRRAGGYSRKYASKAKNLADDMVRNTARDLLYYAVTQDAMLIFENLSRGFGRQGKRTFMAERQYTRMEDWLTAKLAYEGLPSKTYLSKTLAQYTSKTCSNCGFTITSADYDRVLEKLKKTATGWMTTINGKELKVEGQITYYNRYKRQNVVKDLSVELDRLSEESVNNDISSWTKGRSGEALSLLKKRFSHRPVQEKFVCLNCGFETHADEQAALNIARSWLFLRSQEYKKYQTNKTTGNTDKRAFVETWQSFYRKKLKEVWKPAV

SEQ ID NO: 44347 - protein, 979 aa, synthetic construct
  REGION 1..979: note = engineered CasX variant
QEIKRINKIRRRLVKDSNTKKAGKTGPMKTLLVRVMTPDLRERLENLRKKPENIPQPISNTSRANLNKLLTDYTEMKKAILHVYWEEFQKDPVGLMSRVAQPASKKIDQNKLKPEMDEKGNLTTAGFACSQCGQPLFVYKLEQVSEKGKAYTNYFGRCNVAEHEKLILLAQLKPEKDSDEAVTYSLGKFGQRALDFYSIHVTKESTHPVKPLAQIAGNRYASTPVGKALSDACMGTIASFLSKYQDIIIEHQKVVKGNQKRLESLRELAGKENLEYPSVTLPPQPHTKEGVDAYNEVIARVRMWVNLNLWQKLKLSRDDAKPLLRLKGFPSFPLVERQANAEVDWWDMVCNVKKLINEKKEDGKVFWQNLAGYKRQEALRPYLSSEEDRQKGKKFARYQLGDLLLHLEKKHGEDWGKVYDEAWERIDKKVEGLSKHIKLEEERRSEDAQSKAALTDWLRAKASFVIEGLKEADKDEFCRCELKLQKWYGDLRGKPFAIEAENSILDISGFSKQYNCAFIWQKDGVKKLNLYLIINYFKGGKLRFKKIKPEAFEANRFYTVINKKSGEIVPMEVNFNFDDPNLIILPLAFGKRQGREFIWNDLLSLETGSLKLANGRVIEKTLYNRRTRQDEPALFVALTFERREVLDSSNIKPMNLIGVDRGENIPAVIALTDPEGCPLSRFKDSLGNPTHILRIGESYKEKQRTIQAKKEVEQRRAGGYSRKYASKAKNLADDMVRNTARDLLYYAVTQDAMLIFENLSRGFGRQGKRTFMAERQYTRMEDWLTAKLAYEGLPSKTYLSKTLAQYTSKTCSNCGFTITSADYDRVLEKLKKTATGWMTTINGKELKVEGQITYYNRYKRQNVVKDLSVELDRLSEESVNNDISSWTKGRSGEALSLLKKRFSHRPVQEKFVCLNCGFETHADEQAALNIARSWLFLRSQEYKKYQTNKTTGNTDKRAFVETWQSFYRKKLKEVWKPAV

SEQ ID NO: 44348 - protein, 979 aa, synthetic construct
  REGION 1..979: note = engineered CasX variant
QEIKRINKIRRRLVKDSNTKKAGKTGPMKTLLVRVMTPDLRERLENLRKKPENIPQPISNTSRANLNKLLTDYTEMKKAILHVYWEEFQKDPVGLMSRVAQPASKKIDQNKLKPEMDEKGNLTTAGFACSQCGQPLFVYKLEQVSEKGKAYTNYFGRCNVAEHEKLILLAQLKPEKDSDEAVTYSLGKFGQRALDFYSIHVTKESTHPVKPLAQIAGNRYASAPVGKALSDACMGTIASFLSKYQDIIIEHQKVVKGNQKRLESLRELAGKENLEYPSVTLPPQPHTKEGVDAYNEVIARVRMWVNLNLWQKLKLSRDDAKPLLRLKGFPSFPLVERQANAEVDWWDMVCNVKKLINEKKEDGKVFWQNLAGYKRQEALRPYLSSEEDRQKGKKFARYQLGDLLLHLEKKHGEDWGKVYDEAWERIDKKVEGLSKHIKLEEERRSEDAQSKAALTDWLRAKASFVIEGLKEADKDEFCRCELKLQKWYGDLRGKPFAIEAENSILDISGFSKQYNCAFIWQKDGVKKLNLYLIINYFKGGKLRFKKIKPEAFEANRFYTVINKKSGEIVPMEVNFNFDDPNLIILPLAFGKRQGREFIWNDLLSLETGSLKLANGRVIEKTLYNRRTRQDEPALFVALTFERREVLDSSNIKPMNLIGVDRGENIPAVIALTDPEGCPLSRFKDSLGNPTHILRIGESYKEKQRTIQAKKEVEQRRAGGYSRKYASKAKNLADDMVRNTARDLLYYAVTQDAMLIFENLSRGFGRQGKRTFMAERQYTRMEDWLTAKLAYEGLPSKTYLSKTLAQYTSKTCSNCGFTITSADYDRVLEKLKKTATGWMTTINGKELKVEGQITYYNRYKRQNVVKDLSVELDRLSEESVNNDISSWTKGRSGEALSLLKKRFSHRPVQEKFVCLNCGFETHADEQAALNIARSWLFLRSQEYKKYQTNKTTGNTDKRAFVETWQSFYRKKLKEVWKPAV

SEQ ID NO: 44349 - protein, 979 aa, synthetic construct
  REGION 1..979: note = engineered CasX variant
QEIKRINKIRRRLVKDSNTKKAGKTGPMKTLLVRVMTPDLRERLENLRKKPENIPQPISNTSRANLNKLLTDYTEMKKAILHVYWEEFQKDPVGLMSRVAQPASKKIDQNKLKPEMDEKGNLTTAGFACSQCGQPLFVYKLEQVSEKGKAYTNYFGRCNVAEHEKLILLAQLKPEKDSDEAVTYSLGKFGQRALDFYSIHVTKESTHPVKPLAQIAGNRYASVPVGKALSDACMGTIASFLSKYQDIIIEHQKVVKGNQKRLESLRELAGKENLEYPSVTLPPQPHTKEGVDAYNEVIARVRMWVNLNLWQKLKLSRDDAKPLLRLKGFPSFPLVERQANAEVDWWDMVCNVKKLINEKKEDGKVFWQNLAGYKRQEALRPYLSSEEDRQKGKKFARYQLGDLLLHLEKKHGEDWGKVYDEAWERIDKKVEGLSKHIKLEEERRSEDAQSKAALTDWLRAKASFVIEGLKEADKDEFCRCELKLQKWYGDLRGKPFAIEAENSILDISGFSKQYNCAFIWQKDGVKKLNLYLIINYFKGGKLRFKKIKPEAFEANRFYTVINKKSGEIVPMEVNFNFDDPNLIILPLAFGKRQGREFIWNDLLSLETGSLKLANGRVIEKTLYNRRTRQDEPALFVALTFERREVLDSSNIKPMNLIGVDRGENIPAVIALTDPEGCPLSRFKDSLGNPTHILRIGESYKEKQRTIQAKKEVEQRRAGGYSRKYASKAKNLADDMVRNTARDLLYYAVTQDAMLIFENLSRGFGRQGKRTFMAERQYTRMEDWLTAKLAYEGLPSKTYLSKTLAQYTSKTCSNCGFTITSADYDRVLEKLKKTATGWMTTINGKELKVEGQITYYNRYKRQNVVKDLSVELDRLSEESVNNDISSWTKGRSGEALSLLKKRFSHRPVQEKFVCLNCGFETHADEQAALNIARSWLFLRSQEYKKYQTNKTTGNTDKRAFVETWQSFYRKKLKEVWKPAV

SEQ ID NO: 44350 - protein, 979 aa, synthetic construct
  REGION 1..979: note = engineered CasX variant
QEIKRINKIRRRLVKDSNTKKAGKTGPMKTLLVRVMTPDLRERLENLRKKPENIPQPISNTSRANLNKLLTDYTEMKKAILHVYWEEFQKDPVGLMSRVAQPASKKIDQNKLKPEMDEKGNLTTAGFACSQCGQPLFVYKLEQVSEKGKAYTNYFGRCNVAEHEKLIKLAQLKPEKDSDEAVTYSLGKFGQRALDFYSIHVTKESTHPVKPLAQIAGNRYASGPVGKALSDACMGTIASFLSKYQDIIIEHQKVVKGNQKRLESLRELAGKENLEYPSVTLPPQPHTKEGVDAYNEVIARVRMWVNLNLWQKLKLSRDDAKPLLRLKGFPSFPLVERQANAEVDWWDMVCNVKKLINEKKEDGKVFWQNLAGYKRQEALRPYLSSEEDRQKGKKFARYQLGDLLLHLEKKHGEDWGKVYDEAWERIDKKVEGLSKHIKLEEERRSEDAQSKAALTDWLRAKASFVIEGLKEADKDEFCRCELKLQKWYGDLRGKPFAIEAENSILDISGFSKQYNCAFIWQKDGVKKLNLYLIINYFKGGKLRFKKIKPEAFEANRFYTVINKKSGEIVPMEVNFNFDDPNLIILPLAFGKRQGREFIWNDLLSLETGSLKLANGRVIEKTLYNRRTRQDEPALFVALTFERREVLDSSNIKPMNLIGVDRGENIPAVIALTDPEGCPLSRFKDSLGNPTHILRIGESYKEKQRTIQAKKEVEQRRAGGYSRKYASKAKNLADDMVRNTARDLLYYAVTQDAMLIFENLSRGFGRQGKRTFMAERQYTRMEDWLTAKLAYEGLPSKTYLSKTLAQYTSKTCSNCGFTITSADYDRVLEKLKKTATGWMTTINGKELKVEGQITYYNRYKRQNVVKDLSVELDRLSEESVNNDISSWTKGRSGEALSLLKKRFSHRPVQEKFVCLNCGFETHADEQAALNIARSWLFLRSQEYKKYQTNKTTGNTDKRAFVETWQSFYRKKLKEVWKPAV

SEQ ID NO: 44351 - protein, 978 aa, synthetic construct
  REGION 1..978: note = engineered CasX variant
QEIKRINKIRRRLVKDSNTKKAGKTGPMKTLLVRVMTPDLRERLENLRKKPENIPQPISNTSRANLNKLLTDYTEMKKAILHVYWEEFQKDPVGLMSRVAQPASKKIDQNKLKPEMDEKGNLTTAGFACSQCGQPLFVYKLEQVSEKGKAYTNYFGRCNVAEHEKLILLAQLKPEKDSDEAVTYSLGKFGQRALDFYSIHVTKESTHPVKPLAQIAGNRYASPVGKALSDACMGTIASFLSKYQDIIIEHQKVVKGNQKRLESLRELAGKENLEYPSVTLPPQPHTKEGVDAYNEVIARVRMWVNLNLWQKLKLSRDDAKPLLRLKGFPSFPLVERQANAEVDWWDMVCNVKKLINEKKEDGKVFWQNLAGYKRQEALRPYLSSEEDRQKGKKFARYQLGDLLLHLEKKHGEDWGKVYDEAWERIDKKVEGLSKHIKLEEERRSEDAQSKAALTDWLRAKASFVIEGLKEADKDEFCRCELKLQKWYGDLRGKPFAIEAENSILDISGFSKQYNCAFIWQKDGVKKLNLYLIINYFKGGKLRFKKIKPEAFEANRFYTVINKKSGEIVPMEVNFNFDDPNLIILPLAFGKRQGREFIWNDLLSLETGSLKLANGRVIEKTLYNRRTRQDEPALFVALTFERREVLDSSNIKPMNLIGVDRGENIPAVIALTDPEGCPLSRFKDSLGNPTHILRIGESYKEKQRTIQAKKEVEQRRAGGYSRKYASKAKNLADDMVRNTARDLLYYAVTQDAMLIFENLSRGFGRQGKRTFMAERQYTRMEDWLTAKLAYEGLPSKTYLSKTLAQYTSKTCSNCGFTITSADYDRVLEKLKKTATGWMTTINGKELKVEGQITYYNRYKRQNVVKDLSVELDRLSEESVNNDISSWTKGRSGEALSLLKKRFSHRPVQEKFVCLNCGFETHADEQAALNIARSWLFLRSQEYKKYQTNKTTGNTDKRAFVETWQSFYRKKLKEVWKPAV

SEQ ID NO: 44352 - protein, 979 aa, synthetic construct
  REGION 1..979: note = engineered CasX variant
QEIKRINKIRRRLVKDSNTKKAGKTGPMKTLLVRVMTPDLRERLENLRKKPENIPQPISNTSRANLNKLLTDYTEMKKAILHVYWEEFQKDPVGLMSRVAQPASKKIDQNKLKPEMDEKGNLTTAGFACSQCGQPLFVYKLEQVSEKGKAYTNYFGRCNVAEHEKLILLAQLKPEKDSDEAVTYSLGKFGQRALDFYSIHVTKESTHPVKPLAQIAGNRYASYPVGKALSDACMGTIASFLSKYQDIIIEHQKVVKGNQKRLESLRELAGKENLEYPSVTLPPQPHTKEGVDAYNEVIARVRMWVNLNLWQKLKLSRDDAKPLLRLKGFPSFPLVERQANAEVDWWDMVCNVKKLINEKKEDGKVFWQNLAGYKRQEALRPYLSSEEDRKKGKKFARYQLGDLLLHLEKKHGEDWGKVYDEAWERIDKKVEGLSKHIKLEEERRSEDAQSKAALTDWLRAKASFVIEGLKEADKDEFCRCELKLQKWYGDLRGKPFAIEAENSILDISGFSKQYNCAFIWQKDGVKKLNLYLIINYFKGGKLRFKKIKPEAFEANRFYTVINKKSGEIVPMEVNFNFDDPNLIILPLAFGKRQGREFIWNDLLSLETGSLKLANGRVIEKTLYNRRTRQDEPALFVALTFERREVLDSSNIKPMNLIGVDRGENIPAVIALTDPEGCPLSRFKDSLGNPTHILRIGESYKEKQRTIQAKKEVEQRRAGGYSRKYASKAKNLADDMVRNTARDLLYYAVTQDAMLIFENLSRGFGRQGKRTFMAERQYTRMEDWLTAKLAYEGLPSQTYLSKTLAQYTSKTCSNCGFTITSADYDRVLEKLKKTATGWMTTINGKELKVEGQITYYNRYKRQNVVKDLSVELDRLSEESVNNDISSWTKGRSGEALSLLKKRFSHRPVQEKFVCLNCGFETHADEQAALNIARSWLFLRSQEYKKYQTNKTTGNTDKRAFVETWQSFYRKKLKEVWKPAV

SEQ ID NO: 44353 - protein, 979 aa, synthetic construct
  REGION 1..979: note = engineered CasX variant
QEIKRINKIRRRLVKDSNTKKAGKTGPMKTLLVRVMTPDLRERLENLRKKPENIPQPISNTSRANLNKLLTDYTEMKKAILHVYWEEFQKDPVGLMSRVAQPASKKIDQNKLKPEMDEKGNLTTAGFACSQCGQPLFVYKLEQVSEKGKAYTNYFGRCNVAEHEKLILLAQLKPEKDSDEAVTYSLGKFGQRALDFYSIHVTKESTHPVKPLAQIAGNRYASHPVGKALSDACMGTIASFLSKYQDIIIEHQKVVKGNQKRLESLRELAGKENLEYPSVTLPPQPHTKEGVDAYNEVIARVRMWVNLNLWQKLKLSRDDAKPLLRLKGFPSFPLVERQANAEVDWWDMVCNVKKLINEKKEDGKVFWQNLAGYKRQEALRPYLSSEEDRKKGKKFARYQLGDLLLHLEKKHGEDWGKVYDEAWERIDKKVEGLSKHIKLEEERRSEDAQSKAALTDWLRAKASFVIEGLKEADKDEFCRCELKLQKWYGDLRGKPFAIEAENSILDISGFSKQYNCAFIWQKDGVKKLNLYLIINYFKGGKLRFKKIKPEAFEANRFYTVINKKSGEIVPMEVNFNFDDPNLIILPLAFGKRQGREFIWNDLLSLETGSLKLANGRVIEKTLYNRRTRQDEPALFVALTFERREVLDSSNIKPMNLIGVDRGENIPAVIALTDPEGCPLSRFKDSLGNPTHILRIGESYKEKQRTIQAKKEVEQRRAGGYSRKYASKAKNLADDMVRNTARDLLYYAVTQDAMLIFENLSRGFGRQGKRTFMAERQYTRMEDWLTAKLAYEGLPSQTYLSKTLAQYTSKTCSNCGFTITSADYDRVLEKLKKTATGWMTTINGKELKVEGQITYYNRYKRQNVVKDLSVELDRLSEESVNNDISSWTKGRSGEALSLLKKRFSHRPVQEKFVCLNCGFETHADEQAALNIARSWLFLRSQEYKKYQTNKTTGNTDKRAFVETWQSFYRKKLKEVWKPAV

SEQ ID NO: 44354 - protein, 979 aa, synthetic construct
  REGION 1..979: note = engineered CasX variant
QEIKRINKIRRRLVKDSNTKKAGKTGPMKTLLVRVMTPDLRERLENLRKKPENIPQPISNTSRANLNKLLTDYTEMKKAILHVYWEEFQKDPVGLMSRVAQPASKKIDQNKLKPEMDEKGNLTTAGFACSQCGQPLFVYKLEQVSEKGKAYTNYFGRCNVAEHEKLILLAQLKPEKDSDEAVTYSLGKFGQRALDFYSIHVTKESTHPVKPLAQIAGNRYASSPVGKALSDACMGTIASFLSKYQDIIIEHQKVVKGNQKRLESLRELAGKENLEYPSVTLPPQPHTKEGVDAYNEVIARVRMWVNLNLWQKLKLSRDDAKPLLRLKGFPSFPLVERQANAEVDWWDMVCNVKKLINEKKEDGKVFWQNLAGYKRQEALRPYLSSEEDRKKGKKFARYQLGDLLLHLEKKHGEDWGKVYDEAWERIDKKVEGLSKHIKLEEERRSEDAQSKAALTDWLRAKASFVIEGLKEADKDEFCRCELKLQKWYGDLRGKPFAIEAENSILDISGFSKQYNCAFIWQKDGVKKLNLYLIINYFKGGKLRFKKIKPEAFEANRFYTVINKKSGEIVPMEVNFNFDDPNLIILPLAFGKRQGREFIWNDLLSLETGSLKLANGRVIEKTLYNRRTRQDEPALFVALTFERREVLDSSNIKPMNLIGVDRGENIPAVIALTDPEGCPLSRFKDSLGNPTHILRIGESYKEKQRTIQAKKEVEQRRAGGYSRKYASKAKNLADDMVRNTARDLLYYAVTQDAMLIFENLSRGFGRQGKRTFMAERQYTRMEDWLTAKLAYEGLPSQTYLSKTLAQYTSKTCSNCGFTITSADYDRVLEKLKKTATGWMTTINGKELKVEGQITYYNRYKRQNVVKDLSVELDRLSEESVNNDISSWTKGRSGEALSLLKKRFSHRPVQEKFVCLNCGFETHADEQAALNIARSWLFLRSQEYKKYQTNKTTGNTDKRAFVETWQSFYRKKLKEVWKPAV

SEQ ID NO: 44355 - protein, 979 aa, synthetic construct
  REGION 1..979: note = engineered CasX variant
QEIKRINKIRRRLVKDSNTKKAGKTGPMKTLLVRVMTPDLRERLENLRKKPENIPQPISNTSRANLNKLLTDYTEMKKAILHVYWEEFQKDPVGLMSRVAQPASKKIDQNKLKPEMDEKGNLTTAGFACSQCGQPLFVYKLEQVSEKGKAYTNYFGRCNVAEHEKLILLAQLKPEKDSDEAVTYSLGKFGQRALDFYSIHVTKESTHPVKPLAQIAGNRYASTPVGKALSDACMGTIASFLSKYQDIIIEHQKVVKGNQKRLESLRELAGKENLEYPSVTLPPQPHTKEGVDAYNEVIARVRMWVNLNLWQKLKLSRDDAKPLLRLKGFPSFPLVERQANAEVDWWDMVCNVKKLINEKKEDGKVFWQNLAGYKRQEALRPYLSSEEDRKKGKKFARYQLGDLLLHLEKKHGEDWGKVYDEAWERIDKKVEGLSKHIKLEEERRSEDAQSKAALTDWLRAKASFVIEGLKEADKDEFCRCELKLQKWYGDLRGKPFAIEAENSILDISGFSKQYNCAFIWQKDGVKKLNLYLIINYFKGGKLRFKKIKPEAFEANRFYTVINKKSGEIVPMEVNFNFDDPNLIILPLAFGKRQGREFIWNDLLSLETGSLKLANGRVIEKTLYNRRTRQDEPALFVALTFERREVLDSSNIKPMNLIGVDRGENIPAVIALTDPEGCPLSRFKDSLGNPTHILRIGESYKEKQRTIQAKKEVEQRRAGGYSRKYASKAKNLADDMVRNTARDLLYYAVTQDAMLIFENLSRGFGRQGKRTFMAERQYTRMEDWLTAKLAYEGLPSQTYLSKTLAQYTSKTCSNCGFTITSADYDRVLEKLKKTATGWMTTINGKELKVEGQITYYNRYKRQNVVKDLSVELDRLSEESVNNDISSWTKGRSGEALSLLKKRFSHRPVQEKFVCLNCGFETHADEQAALNIARSWLFLRSQEYKKYQTNKTTGNTDKRAFVETWQSFYRKKLKEVWKPAV

SEQ ID NO: 44356 - protein, 979 aa, synthetic construct
  REGION 1..979: note = engineered CasX variant
QEIKRINKIRRRLVKDSNTKKAGKTGPMKTLLVRVMTPDLRERLENLRKKPENIPQPISNTSRANLNKLLTDYTEMKKAILHVYWEEFQKDPVGLMSRVAQPASKKIDQNKLKPEMDEKGNLTTAGFACSQCGQPLFVYKLEQVSEKGKAYTNYFGRCNVAEHEKLILLAQLKPEKDSDEAVTYSLGKFGQRALDFYSIHVTKESTHPVKPLAQIAGNRYASAPVGKALSDACMGTIASFLSKYQDIIIEHQKVVKGNQKRLESLRELAGKENLEYPSVTLPPQPHTKEGVDAYNEVIARVRMWVNLNLWQKLKLSRDDAKPLLRLKGFPSFPLVERQANAEVDWWDMVCNVKKLINEKKEDGKVFWQNLAGYKRQEALRPYLSSEEDRKKGKKFARYQLGDLLLHLEKKHGEDWGKVYDEAWERIDKKVEGLSKHIKLEEERRSEDAQSKAALTDWLRAKASFVIEGLKEADKDEFCRCELKLQKWYGDLRGKPFAIEAENSILDISGFSKQYNCAFIWQKDGVKKLNLYLIINYFKGGKLRFKKIKPEAFEANRFYTVINKKSGEIVPMEVNFNFDDPNLIILPLAFGKRQGREFIWNDLLSLETGSLKLANGRVIEKTLYNRRTRQDEPALFVALTFERREVLDSSNIKPMNLIGVDRGENIPAVIALTDPEGCPLSRFKDSLGNPTHILRIGESYKEKQRTIQAKKEVEQRRAGGYSRKYASKAKNLADDMVRNTARDLLYYAVTQDAMLIFENLSRGFGRQGKRTFMAERQYTRMEDWLTAKLAYEGLPSQTYLSKTLAQYTSKTCSNCGFTITSADYDRVLEKLKKTATGWMTTINGKELKVEGQITYYNRYKRQNVVKDLSVELDRLSEESVNNDISSWTKGRSGEALSLLKKRFSHRPVQEKFVCLNCGFETHADEQAALNIARSWLFLRSQEYKKYQTNKTTGNTDKRAFVETWQSFYRKKLKEVWKPAV

SEQ ID NO: 44357 - protein, 979 aa, synthetic construct
  REGION 1..979: note = engineered CasX variant
QEIKRINKIRRRLVKDSNTKKAGKTGPMKTLLVRVMTPDLRERLENLRKKPENIPQPISNTSRANLNKLLTDYTEMKKAILHVYWEEFQKDPVGLMSRVAQPASKKIDQNKLKPEMDEKGNLTTAGFACSQCGQPLFVYKLEQVSEKGKAYTNYFGRCNVAEHEKLILLAQLKPEKDSDEAVTYSLGKFGQRALDFYSIHVTKESTHPVKPLAQIAGNRYASVPVGKALSDACMGTIASFLSKYQDIIIEHQKVVKGNQKRLESLRELAGKENLEYPSVTLPPQPHTKEGVDAYNEVIARVRMWVNLNLWQKLKLSRDDAKPLLRLKGFPSFPLVERQANAEVDWWDMVCNVKKLINEKKEDGKVFWQNLAGYKRQEALRPYLSSEEDRKKGKKFARYQLGDLLLHLEKKHGEDWGKVYDEAWERIDKKVEGLSKHIKLEEERRSEDAQSKAALTDWLRAKASFVIEGLKEADKDEFCRCELKLQKWYGDLRGKPFAIEAENSILDISGFSKQYNCAFIWQKDGVKKLNLYLIINYFKGGKLRFKKIKPEAFEANRFYTVINKKSGEIVPMEVNFNFDDPNLIILPLAFGKRQGREFIWNDLLSLETGSLKLANGRVIEKTLYNRRTRQDEPALFVALTFERREVLDSSNIKPMNLIGVDRGENIPAVIALTDPEGCPLSRFKDSLGNPTHILRIGESYKEKQRTIQAKKEVEQRRAGGYSRKYASKAKNLADDMVRNTARDLLYYAVTQDAMLIFENLSRGFGRQGKRTFMAERQYTRMEDWLTAKLAYEGLPSQTYLSKTLAQYTSKTCSNCGFTITSADYDRVLEKLKKTATGWMTTINGKELKVEGQITYYNRYKRQNVVKDLSVELDRLSEESVNNDISSWTKGRSGEALSLLKKRFSHRPVQEKFVCLNCGFETHADEQAALNIARSWLFLRSQEYKKYQTNKTTGNTDKRAFVETWQSFYRKKLKEVWKPAV

SEQ ID NO: 44358 - protein, 979 aa, synthetic construct
  REGION 1..979: note = engineered CasX variant
QEIKRINKIRRRLVKDSNTKKAGKTGPMKTLLVRVMTPDLRERLENLRKKPENIPQPISNTSRANLNKLLTDYTEMKKAILHVYWEEFQKDPVGLMSRVAQPASKKIDQNKLKPEMDEKGNLTTAGFACSQCGQPLFVYKLEQVSEKGKAYTNYFGRCNVAEHEKLIKLAQLKPEKDSDEAVTYSLGKFGQRALDFYSIHVTKESTHPVKPLAQIAGNRYASGPVGKALSDACMGTIASFLSKYQDIIIEHQKVVKGNQKRLESLRELAGKENLEYPSVTLPPQPHTKEGVDAYNEVIARVRMWVNLNLWQKLKLSRDDAKPLLRLKGFPSFPLVERQANAEVDWWDMVCNVKKLINEKKEDGKVFWQNLAGYKRQEALRPYLSSEEDRKKGKKFARYQLGDLLLHLEKKHGEDWGKVYDEAWERIDKKVEGLSKHIKLEEERRSEDAQSKAALTDWLRAKASFVIEGLKEADKDEFCRCELKLQKWYGDLRGKPFAIEAENSILDISGFSKQYNCAFIWQKDGVKKLNLYLIINYFKGGKLRFKKIKPEAFEANRFYTVINKKSGEIVPMEVNFNFDDPNLIILPLAFGKRQGREFIWNDLLSLETGSLKLANGRVIEKTLYNRRTRQDEPALFVALTFERREVLDSSNIKPMNLIGVDRGENIPAVIALTDPEGCPLSRFKDSLGNPTHILRIGESYKEKQRTIQAKKEVEQRRAGGYSRKYASKAKNLADDMVRNTARDLLYYAVTQDAMLIFENLSRGFGRQGKRTFMAERQYTRMEDWLTAKLAYEGLPSQTYLSKTLAQYTSKTCSNCGFTITSADYDRVLEKLKKTATGWMTTINGKELKVEGQITYYNRYKRQNVVKDLSVELDRLSEESVNNDISSWTKGRSGEALSLLKKRFSHRPVQEKFVCLNCGFETHADEQAALNIARSWLFLRSQEYKKYQTNKTTGNTDKRAFVETWQSFYRKKLKEVWKPAV

SEQ ID NO: 44359 - protein, 978 aa, synthetic construct
  REGION 1..978: note = engineered CasX variant
QEIKRINKIRRRLVKDSNTKKAGKTGPMKTLLVRVMTPDLRERLENLRKKPENIPQPISNTSRANLNKLLTDYTEMKKAILHVYWEEFQKDPVGLMSRVAQPASKKIDQNKLKPEMDEKGNLTTAGFACSQCGQPLFVYKLEQVSEKGKAYTNYFGRCNVAEHEKLILLAQLKPEKDSDEAVTYSLGKFGQRALDFYSIHVTKESTHPVKPLAQIAGNRYASPVGKALSDACMGTIASFLSKYQDIIIEHQKVVKGNQKRLESLRELAGKENLEYPSVTLPPQPHTKEGVDAYNEVIARVRMWVNLNLWQKLKLSRDDAKPLLRLKGFPSFPLVERQANAEVDWWDMVCNVKKLINEKKEDGKVFWQNLAGYKRQEALRPYLSSEEDRKKGKKFARYQLGDLLLHLEKKHGEDWGKVYDEAWERIDKKVEGLSKHIKLEEERRSEDAQSKAALTDWLRAKASFVIEGLKEADKDEFCRCELKLQKWYGDLRGKPFAIEAENSILDISGFSKQYNCAFIWQKDGVKKLNLYLIINYFKGGKLRFKKIKPEAFEANRFYTVINKKSGEIVPMEVNFNFDDPNLIILPLAFGKRQGREFIWNDLLSLETGSLKLANGRVIEKTLYNRRTRQDEPALFVALTFERREVLDSSNIKPMNLIGVDRGENIPAVIALTDPEGCPLSRFKDSLGNPTHILRIGESYKEKQRTIQAKKEVEQRRAGGYSRKYASKAKNLADDMVRNTARDLLYYAVTQDAMLIFENLSRGFGRQGKRTFMAERQYTRMEDWLTAKLAYEGLPSQTYLSKTLAQYTSKTCSNCGFTITSADYDRVLEKLKKTATGWMTTINGKELKVEGQITYYNRYKRQNVVKDLSVELDRLSEESVNNDISSWTKGRSGEALSLLKKRFSHRPVQEKFVCLNCGFETHADEQAALNIARSWLFLRSQEYKKYQTNKTTGNTDKRAFVETWQSFYRKKLKEVWKPAV

SEQ ID NO: 44360 - protein, 979 aa, synthetic construct
  REGION 1..979: note = engineered CasX variant
QEIKRINKIRRRLVKDSNTKKAGKTGPMKTLLVRVMTPDLRERLENLRKKPENIPQPISNTSRANLNKLLTDYTEMKKAILHVYWEEFQKDPVGLMSRVAQPASKKIDQNKLKPEMDEKGNLTTAGFACSQCGQPLFVYKLEQVSEKGKAYTNYFGRCNVAEHEKLILLAQLKPEKDSDEAVTYSLGKFGQRALDFYSIHVTKESTHPVKPLAQIAGNRYASYPVGKALSDACMGTIASFLSKYQDIIIEHQKVVKGNQKRLESLRELAGKENLEYPSVTLPPQPHTKEGVDAYNEVIARVRMWVNLNLWQKLKLSRDDAKPLLRLKGFPSFPLVERQANAEVDWWDMVCNVKKLINEKKEDGKVFWQNLAGYKRQEALRPYLSSEEDRKKGKKFARYQLGDLLLHLEKKHGEDWGKVYDEAWERIDKKVEGLSKHIKLEEERRSEDAQSKAALTDWLRAKASFVIEGLKEADKDEFCRCELKLQKWYGDLRGKPFAIEAENSILDISGFSKQYNCAFIWQKDGVKKLNLYLIINYFKGGKLRFKKIKPEAFEANRFYTVINKKSGEIVPMEVNFNFDDPNLIILPLAFGKRQGREFIWNDLLSLETGSLKLANGRVIEKTLYNRRTRQDEPALFVALTFERREVLDSSNIKPMNLIGVDRGENIPAVIALTDPEGCPLSRFKDSLGNPTHILRIGESYKEKQRTIQAKKEVEQRRAGGYSRKYASKAKNLADDMVRNTARDLLYYAVTQDAMLIFENLSRGFGRQGKRTFMAERQYTRMEDWLTAKLAYNGLPSKTYLSKTLAQYTSKTCSNCGFTITSADYDRVLEKLKKTATGWMTTINGKELKVEGQITYYNRYKRQNVVKDLSVELDRLSEESVNNDISSWTKGRSGEALSLLKKRFSHRPVQEKFVCLNCGFETHADEQAALNIARSWLFLRSQEYKKYQTNKTTGNTDKRAFVETWQSFYRKKLKEVWKPAV

SEQ ID NO: 44361 - protein, 979 aa, synthetic construct
  REGION 1..979: note = engineered CasX variant
QEIKRINKIRRRLVKDSNTKKAGKTGPMKTLLVRVMTPDLRERLENLRKKPENIPQPISNTSRANLNKLLTDYTEMKKAILHVYWEEFQKDPVGLMSRVAQPASKKIDQNKLKPEMDEKGNLTTAGFACSQCGQPLFVYKLEQVSEKGKAYTNYFGRCNVAEHEKLILLAQLKPEKDSDEAVTYSLGKFGQRALDFYSIHVTKESTHPVKPLAQIAGNRYASHPVGKALSDACMGTIASFLSKYQDIIIEHQKVVKGNQKRLESLRELAGKENLEYPSVTLPPQPHTKEGVDAYNEVIARVRMWVNLNLWQKLKLSRDDAKPLLRLKGFPSFPLVERQANAEVDWWDMVCNVKKLINEKKEDGKVFWQNLAGYKRQEALRPYLSSEEDRKKGKKFARYQLGDLLLHLEKKHGEDWGKVYDEAWERIDKKVEGLSKHIKLEEERRSEDAQSKAALTDWLRAKASFVIEGLKEADKDEFCRCELKLQKWYGDLRGKPFAIEAENSILDISGFSKQYNCAFIWQKDGVKKLNLYLIINYFKGGKLRFKKIKPEAFEANRFYTVINKKSGEIVPMEVNFNFDDPNLIILPLAFGKRQGREFIWNDLLSLETGSLKLANGRVIEKTLYNRRTRQDEPALFVALTFERREVLDSSNIKPMNLIGVDRGENIPAVIALTDPEGCPLSRFKDSLGNPTHILRIGESYKEKQRTIQAKKEVEQRRAGGYSRKYASKAKNLADDMVRNTARDLLYYAVTQDAMLIFENLSRGFGRQGKRTFMAERQYTRMEDWLTAKLAYNGLPSKTYLSKTLAQYTSKTCSNCGFTITSADYDRVLEKLKKTATGWMTTINGKELKVEGQITYYNRYKRQNVVKDLSVELDRLSEESVNNDISSWTKGRSGEALSLLKKRFSHRPVQEKFVCLNCGFETHADEQAALNIARSWLFLRSQEYKKYQTNKTTGNTDKRAFVETWQSFYRKKLKEVWKPAV

SEQ ID NO: 44362 - protein, 979 aa, synthetic construct
  REGION 1..979: note = engineered CasX variant
QEIKRINKIRRRLVKDSNTKKAGKTGPMKTLLVRVMTPDLRERLENLRKKPENIPQPISNTSRANLNKLLTDYTEMKKAILHVYWEEFQKDPVGLMSRVAQPASKKIDQNKLKPEMDEKGNLTTAGFACSQCGQPLFVYKLEQVSEKGKAYTNYFGRCNVAEHEKLILLAQLKPEKDSDEAVTYSLGKFGQRALDFYSIHVTKESTHPVKPLAQIAGNRYASSPVGKALSDACMGTIASFLSKYQDIIIEHQKVVKGNQKRLESLRELAGKENLEYPSVTLPPQPHTKEGVDAYNEVIARVRMWVNLNLWQKLKLSRDDAKPLLRLKGFPSFPLVERQANAEVDWWDMVCNVKKLINEKKEDGKVFWQNLAGYKRQEALRPYLSSEEDRKKGKKFARYQLGDLLLHLEKKHGEDWGKVYDEAWERIDKKVEGLSKHIKLEEERRSEDAQSKAALTDWLRAKASFVIEGLKEADKDEFCRCELKLQKWYGDLRGKPFAIEAENSILDISGFSKQYNCAFIWQKDGVKKLNLYLIINYFKGGKLRFKKIKPEAFEANRFYTVINKKSGEIVPMEVNFNFDDPNLIILPLAFGKRQGREFIWNDLLSLETGSLKLANGRVIEKTLYNRRTRQDEPALFVALTFERREVLDSSNIKPMNLIGVDRGENIPAVIALTDPEGCPLSRFKDSLGNPTHILRIGESYKEKQRTIQAKKEVEQRRAGGYSRKYASKAKNLADDMVRNTARDLLYYAVTQDAMLIFENLSRGFGRQGKRTFMAERQYTRMEDWLTAKLAYNGLPSKTYLSKTLAQYTSKTCSNCGFTITSADYDRVLEKLKKTATGWMTTINGKELKVEGQITYYNRYKRQNVVKDLSVELDRLSEESVNNDISSWTKGRSGEALSLLKKRFSHRPVQEKFVCLNCGFETHADEQAALNIARSWLFLRSQEYKKYQTNKTTGNTDKRAFVETWQSFYRKKLKEVWKPAV

SEQ ID NO: 44363 - protein, 979 aa, synthetic construct
  REGION 1..979: note = engineered CasX variant
QEIKRINKIRRRLVKDSNTKKAGKTGPMKTLLVRVMTPDLRERLENLRKKPENIPQPISNTSRANLNKLLTDYTEMKKAILHVYWEEFQKDPVGLMSRVAQPASKKIDQNKLKPEMDEKGNLTTAGFACSQCGQPLFVYKLEQVSEKGKAYTNYFGRCNVAEHEKLILLAQLKPEKDSDEAVTYSLGKFGQRALDFYSIHVTKESTHPVKPLAQIAGNRYASTPVGKALSDACMGTIASFLSKYQDIIIEHQKVVKGNQKRLESLRELAGKENLEYPSVTLPPQPHTKEGVDAYNEVIARVRMWVNLNLWQKLKLSRDDAKPLLRLKGFPSFPLVERQANAEVDWWDMVCNVKKLINEKKEDGKVFWQNLAGYKRQEALRPYLSSEEDRKKGKKFARYQLGDLLLHLEKKHGEDWGKVYDEAWERIDKKVEGLSKHIKLEEERRSEDAQSKAALTDWLRAKASFVIEGLKEADKDEFCRCELKLQKWYGDLRGKPFAIEAENSILDISGFSKQYNCAFIWQKDGVKKLNLYLIINYFKGGKLRFKKIKPEAFEANRFYTVINKKSGEIVPMEVNFNFDDPNLIILPLAFGKRQGREFIWNDLLSLETGSLKLANGRVIEKTLYNRRTRQDEPALFVALTFERREVLDSSNIKPMNLIGVDRGENIPAVIALTDPEGCPLSRFKDSLGNPTHILRIGESYKEKQRTIQAKKEVEQRRAGGYSRKYASKAKNLADDMVRNTARDLLYYAVTQDAMLIFENLSRGFGRQGKRTFMAERQYTRMEDWLTAKLAYNGLPSKTYLSKTLAQYTSKTCSNCGFTITSADYDRVLEKLKKTATGWMTTINGKELKVEGQITYYNRYKRQNVVKDLSVELDRLSEESVNNDISSWTKGRSGEALSLLKKRFSHRPVQEKFVCLNCGFETHADEQAALNIARSWLFLRSQEYKKYQTNKTTGNTDKRAFVETWQSFYRKKLKEVWKPAV

SEQ ID NO: 44364 - protein, 979 aa, synthetic construct
  REGION 1..979: note = engineered CasX variant
QEIKRINKIRRRLVKDSNTKKAGKTGPMKTLLVRVMTPDLRERLENLRKKPENIPQPISNTSRANLNKLLTDYTEMKKAILHVYWEEFQKDPVGLMSRVAQPASKKIDQNKLKPEMDEKGNLTTAGFACSQCGQPLFVYKLEQVSEKGKAYTNYFGRCNVAEHEKLILLAQLKPEKDSDEAVTYSLGKFGQRALDFYSIHVTKESTHPVKPLAQIAGNRYASAPVGKALSDACMGTIASFLSKYQDIIIEHQKVVKGNQKRLESLRELAGKENLEYPSVTLPPQPHTKEGVDAYNEVIARVRMWVNLNLWQKLKLSRDDAKPLLRLKGFPSFPLVERQANAEVDWWDMVCNVKKLINEKKEDGKVFWQNLAGYKRQEALRPYLSSEEDRKKGKKFARYQLGDLLLHLEKKHGEDWGKVYDEAWERIDKKVEGLSKHIKLEEERRSEDAQSKAALTDWLRAKASFVIEGLKEADKDEFCRCELKLQKWYGDLRGKPFAIEAENSILDISGFSKQYNCAFIWQKDGVKKLNLYLIINYFKGGKLRFKKIKPEAFEANRFYTVINKKSGEIVPMEVNFNFDDPNLIILPLAFGKRQGREFIWNDLLSLETGSLKLANGRVIEKTLYNRRTRQDEPALFVALTFERREVLDSSNIKPMNLIGVDRGENIPAVIALTDPEGCPLSRFKDSLGNPTHILRIGESYKEKQRTIQAKKEVEQRRAGGYSRKYASKAKNLADDMVRNTARDLLYYAVTQDAMLIFENLSRGFGRQGKRTFMAERQYTRMEDWLTAKLAYNGLPSKTYLSKTLAQYTSKTCSNCGFTITSADYDRVLEKLKKTATGWMTTINGKELKVEGQITYYNRYKRQNVVKDLSVELDRLSEESVNNDISSWTKGRSGEALSLLKKRFSHRPVQEKFVCLNCGFETHADEQAALNIARSWLFLRSQEYKKYQTNKTTGNTDKRAFVETWQSFYRKKLKEVWKPAV

SEQ ID NO: 44365 - protein, 979 aa, synthetic construct
  REGION 1..979: note = engineered CasX variant
QEIKRINKIRRRLVKDSNTKKAGKTGPMKTLLVRVMTPDLRERLENLRKKPENIPQPISNTSRANLNKLLTDYTEMKKAILHVYWEEFQKDPVGLMSRVAQPASKKIDQNKLKPEMDEKGNLTTAGFACSQCGQPLFVYKLEQVSEKGKAYTNYFGRCNVAEHEKLILLAQLKPEKDSDEAVTYSLGKFGQRALDFYSIHVTKESTHPVKPLAQIAGNRYASVPVGKALSDACMGTIASFLSKYQDIIIEHQKVVKGNQKRLESLRELAGKENLEYPSVTLPPQPHTKEGVDAYNEVIARVRMWVNLNLWQKLKLSRDDAKPLLRLKGFPSFPLVERQANAEVDWWDMVCNVKKLINEKKEDGKVFWQNLAGYKRQEALRPYLSSEEDRKKGKKFARYQLGDLLLHLEKKHGEDWGKVYDEAWERIDKKVEGLSKHIKLEEERRSEDAQSKAALTDWLRAKASFVIEGLKEADKDEFCRCELKLQKWYGDLRGKPFAIEAENSILDISGFSKQYNCAFIWQKDGVKKLNLYLIINYFKGGKLRFKKIKPEAFEANRFYTVINKKSGEIVPMEVNFNFDDPNLIILPLAFGKRQGREFIWNDLLSLETGSLKLANGRVIEKTLYNRRTRQDEPALFVALTFERREVLDSSNIKPMNLIGVDRGENIPAVIALTDPEGCPLSRFKDSLGNPTHILRIGESYKEKQRTIQAKKEVEQRRAGGYSRKYASKAKNLADDMVRNTARDLLYYAVTQDAMLIFENLSRGFGRQGKRTFMAERQYTRMEDWLTAKLAYNGLPSKTYLSKTLAQYTSKTCSNCGFTITSADYDRVLEKLKKTATGWMTTINGKELKVEGQITYYNRYKRQNVVKDLSVELDRLSEESVNNDISSWTKGRSGEALSLLKKRFSHRPVQEKFVCLNCGFETHADEQAALNIARSWLFLRSQEYKKYQTNKTTGNTDKRAFVETWQSFYRKKLKEVWKPAV

SEQ ID NO: 44366 - protein, 979 aa, synthetic construct
  REGION 1..979: note = engineered CasX variant
QEIKRINKIRRRLVKDSNTKKAGKTGPMKTLLVRVMTPDLRERLENLRKKPENIPQPISNTSRANLNKLLTDYTEMKKAILHVYWEEFQKDPVGLMSRVAQPASKKIDQNKLKPEMDEKGNLTTAGFACSQCGQPLFVYKLEQVSEKGKAYTNYFGRCNVAEHEKLIKLAQLKPEKDSDEAVTYSLGKFGQRALDFYSIHVTKESTHPVKPLAQIAGNRYASGPVGKALSDACMGTIASFLSKYQDIIIEHQKVVKGNQKRLESLRELAGKENLEYPSVTLPPQPHTKEGVDAYNEVIARVRMWVNLNLWQKLKLSRDDAKPLLRLKGFPSFPLVERQANAEVDWWDMVCNVKKLINEKKEDGKVFWQNLAGYKRQEALRPYLSSEEDRKKGKKFARYQLGDLLLHLEKKHGEDWGKVYDEAWERIDKKVEGLSKHIKLEEERRSEDAQSKAALTDWLRAKASFVIEGLKEADKDEFCRCELKLQKWYGDLRGKPFAIEAENSILDISGFSKQYNCAFIWQKDGVKKLNLYLIINYFKGGKLRFKKIKPEAFEANRFYTVINKKSGEIVPMEVNFNFDDPNLIILPLAFGKRQGREFIWNDLLSLETGSLKLANGRVIEKTLYNRRTRQDEPALFVALTFERREVLDSSNIKPMNLIGVDRGENIPAVIALTDPEGCPLSRFKDSLGNPTHILRIGESYKEKQRTIQAKKEVEQRRAGGYSRKYASKAKNLADDMVRNTARDLLYYAVTQDAMLIFENLSRGFGRQGKRTFMAERQYTRMEDWLTAKLAYNGLPSKTYLSKTLAQYTSKTCSNCGFTITSADYDRVLEKLKKTATGWMTTINGKELKVEGQITYYNRYKRQNVVKDLSVELDRLSEESVNNDISSWTKGRSGEALSLLKKRFSHRPVQEKFVCLNCGFETHADEQAALNIARSWLFLRSQEYKKYQTNKTTGNTDKRAFVETWQSFYRKKLKEVWKPAV

SEQ ID NO: 44367 - protein, 978 aa, synthetic construct
  REGION 1..978: note = engineered CasX variant
QEIKRINKIRRRLVKDSNTKKAGKTGPMKTLLVRVMTPDLRERLENLRKKPENIPQPISNTSRANLNKLLTDYTEMKKAILHVYWEEFQKDPVGLMSRVAQPASKKIDQNKLKPEMDEKGNLTTAGFACSQCGQPLFVYKLEQVSEKGKAYTNYFGRCNVAEHEKLILLAQLKPEKDSDEAVTYSLGKFGQRALDFYSIHVTKESTHPVKPLAQIAGNRYASPVGKALSDACMGTIASFLSKYQDIIIEHQKVVKGNQKRLESLRELAGKENLEYPSVTLPPQPHTKEGVDAYNEVIARVRMWVNLNLWQKLKLSRDDAKPLLRLKGFPSFPLVERQANAEVDWWDMVCNVKKLINEKKEDGKVFWQNLAGYKRQEALRPYLSSEEDRKKGKKFARYQLGDLLLHLEKKHGEDWGKVYDEAWERIDKKVEGLSKHIKLEEERRSEDAQSKAALTDWLRAKASFVIEGLKEADKDEFCRCELKLQKWYGDLRGKPFAIEAENSILDISGFSKQYNCAFIWQKDGVKKLNLYLIINYFKGGKLRFKKIKPEAFEANRFYTVINKKSGEIVPMEVNFNFDDPNLIILPLAFGKRQGREFIWNDLLSLETGSLKLANGRVIEKTLYNRRTRQDEPALFVALTFERREVLDSSNIKPMNLIGVDRGENIPAVIALTDPEGCPLSRFKDSLGNPTHILRIGESYKEKQRTIQAKKEVEQRRAGGYSRKYASKAKNLADDMVRNTARDLLYYAVTQDAMLIFENLSRGFGRQGKRTFMAERQYTRMEDWLTAKLAYNGLPSKTYLSKTLAQYTSKTCSNCGFTITSADYDRVLEKLKKTATGWMTTINGKELKVEGQITYYNRYKRQNVVKDLSVELDRLSEESVNNDISSWTKGRSGEALSLLKKRFSHRPVQEKFVCLNCGFETHADEQAALNIARSWLFLRSQEYKKYQTNKTTGNTDKRAFVETWQSFYRKKLKEVWKPAV

SEQ ID NO: 44368 - protein, 979 aa, synthetic construct
  REGION 1..979: note = engineered CasX variant
QEIKRINKIRRRLVKDSNTKKAGKTGPMKTLLVRVMTPDLRERLENLRKKPENIPQPISNTSRANLNKLLTDYTEMKKAILHVYWEEFQKDPVGLMSRVAQPASKKIDQNKLKPEMDEKGNLTTAGFACSQCGQPLFVYKLEQVSEKGKAYTNYFGRCNVAEHEKLIQLAQLKPEKDSDEAVTYSLGKFGQRALDFYSIHVTKESTHPVKPLAQIAGNRYASYPVGKALSDACMGTIASFLSKYQDIIIEHQKVVKGNQKRLESLRELAGKENLEYPSVTLPPQPHTKEGVDAYNEVIARVRMWVNLNLWQKLKLSRDDAKPLLRLKGFPSFPLVERQANAEVDWWDMVCNVKKLINEKKEDGKVFWQNLAGYKRQEALRPYLSSEEDRKKGKKFARYQLGDLLLHLEKKHGEDWGKVYDEAWERIDKKVEGLSKHIKLEEERRSEDAQSKAALTDWLRAKASFVIEGLKEADKDEFCRCELKLQKWYGDLRGKPFAIEAENSILDISGFSKQYNCAFIWQKDGVKKLNLYLIINYFKGGKLRFKKIKPEAFEANRFYTVINKKSGEIVPMEVNFNFDDPNLIILPLAFGKRQGREFIWNDLLSLETGSLKLANGRVIEKTLYNRRTRQDEPALFVALTFERREVLDSSNIKPMNLIGVDRGENIPAVIALTDPEGCPLSRFKDSLGNPTHILRIGESYKEKQRTIQAKKEVEQRRAGGYSRKYASKAKNLADDMVRNTARDLLYYAVTQDAMLIFENLSRGFGRQGKRTFMAERQYTRMEDWLTAKLAYEGLPSKTYLSKTLAQYTSKTCSNCGFTITSADYDRVLEKLKKTATGWMTTINGKELKVEGQITYYNRYKRQNVVKDLSVELDRLSEESVNNDISSWTKGRSGEALSLLKKRFSHRPVQEKFVCLNCGFETHADEQAALNIARSWLFLRSQEYKKYQTNKTTGNTDKRAFVETWQSFYRKKLKEVWKPAV

SEQ ID NO: 44369 - protein, 979 aa, synthetic construct
  REGION 1..979: note = engineered CasX variant
QEIKRINKIRRRLVKDSNTKKAGKTGPMKTLLVRVMTPDLRERLENLRKKPENIPQPISNTSRANLNKLLTDYTEMKKAILHVYWEEFQKDPVGLMSRVAQPASKKIDQNKLKPEMDEKGNLTTAGFACSQCGQPLFVYKLEQVSEKGKAYTNYFGRCNVAEHEKLIQLAQLKPEKDSDEAVTYSLGKFGQRALDFYSIHVTKESTHPVKPLAQIAGNRYASHPVGKALSDACMGTIASFLSKYQDIIIEHQKVVKGNQKRLESLRELAGKENLEYPSVTLPPQPHTKEGVDAYNEVIARVRMWVNLNLWQKLKLSRDDAKPLLRLKGFPSFPLVERQANAEVDWWDMVCNVKKLINEKKEDGKVFWQNLAGYKRQEALRPYLSSEEDRKKGKKFARYQLGDLLLHLEKKHGEDWGKVYDEAWERIDKKVEGLSKHIKLEEERRSEDAQSKAALTDWLRAKASFVIEGLKEADKDEFCRCELKLQKWYGDLRGKPFAIEAENSILDISGFSKQYNCAFIWQKDGVKKLNLYLIINYFKGGKLRFKKIKPEAFEANRFYTVINKKSGEIVPMEVNFNFDDPNLIILPLAFGKRQGREFIWNDLLSLETGSLKLANGRVIEKTLYNRRTRQDEPALFVALTFERREVLDSSNIKPMNLIGVDRGENIPAVIALTDPEGCPLSRFKDSLGNPTHILRIGESYKEKQRTIQAKKEVEQRRAGGYSRKYASKAKNLADDMVRNTARDLLYYAVTQDAMLIFENLSRGFGRQGKRTFMAERQYTRMEDWLTAKLAYEGLPSKTYLSKTLAQYTSKTCSNCGFTITSADYDRVLEKLKKTATGWMTTINGKELKVEGQITYYNRYKRQNVVKDLSVELDRLSEESVNNDISSWTKGRSGEALSLLKKRFSHRPVQEKFVCLNCGFETHADEQAALNIARSWLFLRSQEYKKYQTNKTTGNTDKRAFVETWQSFYRKKLKEVWKPAV

SEQ ID NO: 44370 - protein, 979 aa, synthetic construct
  REGION 1..979: note = engineered CasX variant
QEIKRINKIRRRLVKDSNTKKAGKTGPMKTLLVRVMTPDLRERLENLRKKPENIPQPISNTSRANLNKLLTDYTEMKKAILHVYWEEFQKDPVGLMSRVAQPASKKIDQNKLKPEMDEKGNLTTAGFACSQCGQPLFVYKLEQVSEKGKAYTNYFGRCNVAEHEKLIQLAQLKPEKDSDEAVTYSLGKFGQRALDFYSIHVTKESTHPVKPLAQIAGNRYASSPVGKALSDACMGTIASFLSKYQDIIIEHQKVVKGNQKRLESLRELAGKENLEYPSVTLPPQPHTKEGVDAYNEVIARVRMWVNLNLWQKLKLSRDDAKPLLRLKGFPSFPLVERQANAEVDWWDMVCNVKKLINEKKEDGKVFWQNLAGYKRQEALRPYLSSEEDRKKGKKFARYQLGDLLLHLEKKHGEDWGKVYDEAWERIDKKVEGLSKHIKLEEERRSEDAQSKAALTDWLRAKASFVIEGLKEADKDEFCRCELKLQKWYGDLRGKPFAIEAENSILDISGFSKQYNCAFIWQKDGVKKLNLYLIINYFKGGKLRFKKIKPEAFEANRFYTVINKKSGEIVPMEVNFNFDDPNLIILPLAFGKRQGREFIWNDLLSLETGSLKLANGRVIEKTLYNRRTRQDEPALFVALTFERREVLDSSNIKPMNLIGVDRGENIPAVIALTDPEGCPLSRFKDSLGNPTHILRIGESYKEKQRTIQAKKEVEQRRAGGYSRKYASKAKNLADDMVRNTARDLLYYAVTQDAMLIFENLSRGFGRQGKRTFMAERQYTRMEDWLTAKLAYEGLPSKTYLSKTLAQYTSKTCSNCGFTITSADYDRVLEKLKKTATGWMTTINGKELKVEGQITYYNRYKRQNVVKDLSVELDRLSEESVNNDISSWTKGRSGEALSLLKKRFSHRPVQEKFVCLNCGFETHADEQAALNIARSWLFLRSQEYKKYQTNKTTGNTDKRAFVETWQSFYRKKLKEVWKPAV

SEQ ID NO: 44371 - protein, 979 aa, synthetic construct
  REGION 1..979: note = engineered CasX variant
QEIKRINKIRRRLVKDSNTKKAGKTGPMKTLLVRVMTPDLRERLENLRKKPENIPQPISNTSRANLNKLLTDYTEMKKAILHVYWEEFQKDPVGLMSRVAQPASKKIDQNKLKPEMDEKGNLTTAGFACSQCGQPLFVYKLEQVSEKGKAYTNYFGRCNVAEHEKLIQLAQLKPEKDSDEAVTYSLGKFGQRALDFYSIHVTKESTHPVKPLAQIAGNRYASTPVGKALSDACMGTIASFLSKYQDIIIEHQKVVKGNQKRLESLRELAGKENLEYPSVTLPPQPHTKEGVDAYNEVIARVRMWVNLNLWQKLKLSRDDAKPLLRLKGFPSFPLVERQANAEVDWWDMVCNVKKLINEKKEDGKVFWQNLAGYKRQEALRPYLSSEEDRKKGKKFARYQLGDLLLHLEKKHGEDWGKVYDEAWERIDKKVEGLSKHIKLEEERRSEDAQSKAALTDWLRAKASFVIEGLKEADKDEFCRCELKLQKWYGDLRGKPFAIEAENSILDISGFSKQYNCAFIWQKDGVKKLNLYLIINYFKGGKLRFKKIKPEAFEANRFYTVINKKSGEIVPMEVNFNFDDPNLIILPLAFGKRQGREFIWNDLLSLETGSLKLANGRVIEKTLYNRRTRQDEPALFVALTFERREVLDSSNIKPMNLIGVDRGENIPAVIALTDPEGCPLSRFKDSLGNPTHILRIGESYKEKQRTIQAKKEVEQRRAGGYSRKYASKAKNLADDMVRNTARDLLYYAVTQDAMLIFENLSRGFGRQGKRTFMAERQYTRMEDWLTAKLAYEGLPSKTYLSKTLAQYTSKTCSNCGFTITSADYDRVLEKLKKTATGWMTTINGKELKVEGQITYYNRYKRQNVVKDLSVELDRLSEESVNNDISSWTKGRSGEALSLLKKRFSHRPVQEKFVCLNCGFETHADEQAALNIARSWLFLRSQEYKKYQTNKTTGNTDKRAFVETWQSFYRKKLKEVWKPAV

SEQ ID NO: 44372 - protein, 979 aa, synthetic construct
  REGION 1..979: note = engineered CasX variant
QEIKRINKIRRRLVKDSNTKKAGKTGPMKTLLVRVMTPDLRERLENLRKKPENIPQPISNTSRANLNKLLTDYTEMKKAILHVYWEEFQKDPVGLMSRVAQPASKKIDQNKLKPEMDEKGNLTTAGFACSQCGQPLFVYKLEQVSEKGKAYTNYFGRCNVAEHEKLIQLAQLKPEKDSDEAVTYSLGKFGQRALDFYSIHVTKESTHPVKPLAQIAGNRYASAPVGKALSDACMGTIASFLSKYQDIIIEHQKVVKGNQKRLESLRELAGKENLEYPSVTLPPQPHTKEGVDAYNEVIARVRMWVNLNLWQKLKLSRDDAKPLLRLKGFPSFPLVERQANAEVDWWDMVCNVKKLINEKKEDGKVFWQNLAGYKRQEALRPYLSSEEDRKKGKKFARYQLGDLLLHLEKKHGEDWGKVYDEAWERIDKKVEGLSKHIKLEEERRSEDAQSKAALTDWLRAKASFVIEGLKEADKDEFCRCELKLQKWYGDLRGKPFAIEAENSILDISGFSKQYNCAFIWQKDGVKKLNLYLIINYFKGGKLRFKKIKPEAFEANRFYTVINKKSGEIVPMEVNFNFDDPNLIILPLAFGKRQGREFIWNDLLSLETGSLKLANGRVIEKTLYNRRTRQDEPALFVALTFERREVLDSSNIKPMNLIGVDRGENIPAVIALTDPEGCPLSRFKDSLGNPTHILRIGESYKEKQRTIQAKKEVEQRRAGGYSRKYASKAKNLADDMVRNTARDLLYYAVTQDAMLIFENLSRGFGRQGKRTFMAERQYTRMEDWLTAKLAYEGLPSKTYLSKTLAQYTSKTCSNCGFTITSADYDRVLEKLKKTATGWMTTINGKELKVEGQITYYNRYKRQNVVKDLSVELDRLSEESVNNDISSWTKGRSGEALSLLKKRFSHRPVQEKFVCLNCGFETHADEQAALNIARSWLFLRSQEYKKYQTNKTTGNTDKRAFVETWQSFYRKKLKEVWKPAV

SEQ ID NO: 44373 - protein, 979 aa, synthetic construct
  REGION 1..979: note = engineered CasX variant
QEIKRINKIRRRLVKDSNTKKAGKTGPMKTLLVRVMTPDLRERLENLRKKPENIPQPISNTSRANLNKLLTDYTEMKKAILHVYWEEFQKDPVGLMSRVAQPASKKIDQNKLKPEMDEKGNLTTAGFACSQCGQPLFVYKLEQVSEKGKAYTNYFGRCNVAEHEKLIQLAQLKPEKDSDEAVTYSLGKFGQRALDFYSIHVTKESTHPVKPLAQIAGNRYASVPVGKALSDACMGTIASFLSKYQDIIIEHQKVVKGNQKRLESLRELAGKENLEYPSVTLPPQPHTKEGVDAYNEVIARVRMWVNLNLWQKLKLSRDDAKPLLRLKGFPSFPLVERQANAEVDWWDMVCNVKKLINEKKEDGKVFWQNLAGYKRQEALRPYLSSEEDRKKGKKFARYQLGDLLLHLEKKHGEDWGKVYDEAWERIDKKVEGLSKHIKLEEERRSEDAQSKAALTDWLRAKASFVIEGLKEADKDEFCRCELKLQKWYGDLRGKPFAIEAENSILDISGFSKQYNCAFIWQKDGVKKLNLYLIINYFKGGKLRFKKIKPEAFEANRFYTVINKKSGEIVPMEVNFNFDDPNLIILPLAFGKRQGREFIWNDLLSLETGSLKLANGRVIEKTLYNRRTRQDEPALFVALTFERREVLDSSNIKPMNLIGVDRGENIPAVIALTDPEGCPLSRFKDSLGNPTHILRIGESYKEKQRTIQAKKEVEQRRAGGYSRKYASKAKNLADDMVRNTARDLLYYAVTQDAMLIFENLSRGFGRQGKRTFMAERQYTRMEDWLTAKLAYEGLPSKTYLSKTLAQYTSKTCSNCGFTITSADYDRVLEKLKKTATGWMTTINGKELKVEGQITYYNRYKRQNVVKDLSVELDRLSEESVNNDISSWTKGRSGEALSLLKKRFSHRPVQEKFVCLNCGFETHADEQAALNIARSWLFLRSQEYKKYQTNKTTGNTDKRAFVETWQSFYRKKLKEVWKPAV

SEQ ID NO: 44374 - protein, 980 aa, synthetic construct
  REGION 1..980: note = engineered CasX variant
QEIKRINKIRRRLVKDSNTKKAGKTGPMKTLLVRVMTPDLRERLENLRKKPENIPQPISNTSRANLNKLLTDYTEMKKAILHVYWEEFQKDPVGLMSRVAQPASKKIDQNKLKPEMDEKGNLTTAGFACSQCGQPLFVYKLEQVSEKGKAYTNYFGRCNVAEHEKLIQKLAQLKPEKDSDEAVTYSLGKFGQRALDFYSIHVTKESTHPVKPLAQIAGNRYASGPVGKALSDACMGTIASFLSKYQDIIIEHQKVVKGNQKRLESLRELAGKENLEYPSVTLPPQPHTKEGVDAYNEVIARVRMWVNLNLWQKLKLSRDDAKPLLRLKGFPSFPLVERQANAEVDWWDMVCNVKKLINEKKEDGKVFWQNLAGYKRQEALRPYLSSEEDRKKGKKFARYQLGDLLLHLEKKHGEDWGKVYDEAWERIDKKVEGLSKHIKLEEERRSEDAQSKAALTDWLRAKASFVIEGLKEADKDEFCRCELKLQKWYGDLRGKPFAIEAENSILDISGFSKQYNCAFIWQKDGVKKLNLYLIINYFKGGKLRFKKIKPEAFEANRFYTVINKKSGEIVPMEVNFNFDDPNLIILPLAFGKRQGREFIWNDLLSLETGSLKLANGRVIEKTLYNRRTRQDEPALFVALTFERREVLDSSNIKPMNLIGVDRGENIPAVIALTDPEGCPLSRFKDSLGNPTHILRIGESYKEKQRTIQAKKEVEQRRAGGYSRKYASKAKNLADDMVRNTARDLLYYAVTQDAMLIFENLSRGFGRQGKRTFMAERQYTRMEDWLTAKLAYEGLPSKTYLSKTLAQYTSKTCSNCGFTITSADYDRVLEKLKKTATGWMTTINGKELKVEGQITYYNRYKRQNVVKDLSVELDRLSEESVNNDISSWTKGRSGEALSLLKKRFSHRPVQEKFVCLNCGFETHADEQAALNIARSWLFLRSQEYKKYQTNKTTGNTDKRAFVETWQSFYRKKLKEVWKPAV

SEQ ID NO: 44375 - protein, 978 aa, synthetic construct
  REGION 1..978: note = engineered CasX variant
QEIKRINKIRRRLVKDSNTKKAGKTGPMKTLLVRVMTPDLRERLENLRKKPENIPQPISNTSRANLNKLLTDYTEMKKAILHVYWEEFQKDPVGLMSRVAQPASKKIDQNKLKPEMDEKGNLTTAGFACSQCGQPLFVYKLEQVSEKGKAYTNYFGRCNVAEHEKLIQLAQLKPEKDSDEAVTYSLGKFGQRALDFYSIHVTKESTHPVKPLAQIAGNRYASPVGKALSDACMGTIASFLSKYQDIIIEHQKVVKGNQKRLESLRELAGKENLEYPSVTLPPQPHTKEGVDAYNEVIARVRMWVNLNLWQKLKLSRDDAKPLLRLKGFPSFPLVERQANAEVDWWDMVCNVKKLINEKKEDGKVFWQNLAGYKRQEALRPYLSSEEDRKKGKKFARYQLGDLLLHLEKKHGEDWGKVYDEAWERIDKKVEGLSKHIKLEEERRSEDAQSKAALTDWLRAKASFVIEGLKEADKDEFCRCELKLQKWYGDLRGKPFAIEAENSILDISGFSKQYNCAFIWQKDGVKKLNLYLIINYFKGGKLRFKKIKPEAFEANRFYTVINKKSGEIVPMEVNFNFDDPNLIILPLAFGKRQGREFIWNDLLSLETGSLKLANGRVIEKTLYNRRTRQDEPALFVALTFERREVLDSSNIKPMNLIGVDRGENIPAVIALTDPEGCPLSRFKDSLGNPTHILRIGESYKEKQRTIQAKKEVEQRRAGGYSRKYASKAKNLADDMVRNTARDLLYYAVTQDAMLIFENLSRGFGRQGKRTFMAERQYTRMEDWLTAKLAYEGLPSKTYLSKTLAQYTSKTCSNCGFTITSADYDRVLEKLKKTATGWMTTINGKELKVEGQITYYNRYKRQNVVKDLSVELDRLSEESVNNDISSWTKGRSGEALSLLKKRFSHRPVQEKFVCLNCGFETHADEQAALNIARSWLFLRSQEYKKYQTNKTTGNTDKRAFVETWQSFYRKKLKEVWKPAV

SEQ ID NO: 44376 - protein, 979 aa, synthetic construct
  REGION 1..979: note = engineered CasX variant
QEIKRINKIRRRLVKDSNTKKAGKTGPMKTLLVRVMTPDLRERLENLRKKPENIPQPISNTSRANLNKLLTDYTEMKKAILHVYWEEFQKDPVGLMSRVAQPASKKIDQNKLKPEMDEKGNLTTAGFACSQCGQPLFVYKLEQVSEKGKAYTNYFGRCNVAEHEKLILLAQLKPEKDSDEAVTYSLGKFGQRALDFYSIHVTKESTHPVKPLAQIAGNRYASYPVGKALSDACMGTIASFLSKYQDIIIEHQKVVKGNQKRLESLRELAGKENLEYPSVTLPPQPHTKEGVDAYNEVIARVRMWVNLNLWQKLKLSRDDAKPLLRLKGFPSFPLVERQANAEVDWWDMVCNVKKLINEKKEDGKVFWQNLAIYKRQEALRPYLSSEEDRKKGKKFARYQLGDLLLHLEKKHGEDWGKVYDEAWERIDKKVEGLSKHIKLEEERRSEDAQSKAALTDWLRAKASFVIEGLKEADKDEFCRCELKLQKWYGDLRGKPFAIEAENSILDISGFSKQYNCAFIWQKDGVKKLNLYLIINYFKGGKLRFKKIKPEAFEANRFYTVINKKSGEIVPMEVNFNFDDPNLIILPLAFGKRQGREFIWNDLLSLETGSLKLANGRVIEKTLYNRRTRQDEPALFVALTFERREVLDSSNIKPMNLIGVDRGENIPAVIALTDPEGCPLSRFKDSLGNPTHILRIGESYKEKQRTIQAKKEVEQRRAGGYSRKYASKAKNLADDMVRNTARDLLYYAVTQDAMLIFENLSRGFGRQGKRTFMAERQYTRMEDWLTAKLAYEGLPSKTYLSKTLAQYTSKTCSNCGFTITSADYDRVLEKLKKTATGWMTTINGKELKVEGQITYYNRYKRQNVVKDLSVELDRLSEESVNNDISSWTKGRSGEALSLLKKRFSHRPVQEKFVCLNCGFETHADEQAALNIARSWLFLRSQEYKKYQTNKTTGNTDKRAFVETWQSFYRKKLKEVWKPAV

SEQ ID NO: 44377 - protein, 979 aa, synthetic construct
  REGION 1..979: note = engineered CasX variant
QEIKRINKIRRRLVKDSNTKKAGKTGPMKTLLVRVMTPDLRERLENLRKKPENIPQPISNTSRANLNKLLTDYTEMKKAILHVYWEEFQKDPVGLMSRVAQPASKKIDQNKLKPEMDEKGNLTTAGFACSQCGQPLFVYKLEQVSEKGKAYTNYFGRCNVAEHEKLILLAQLKPEKDSDEAVTYSLGKFGQRALDFYSIHVTKESTHPVKPLAQIAGNRYASHPVGKALSDACMGTIASFLSKYQDIIIEHQKVVKGNQKRLESLRELAGKENLEYPSVTLPPQPHTKEGVDAYNEVIARVRMWVNLNLWQKLKLSRDDAKPLLRLKGFPSFPLVERQANAEVDWWDMVCNVKKLINEKKEDGKVFWQNLAIYKRQEALRPYLSSEEDRKKGKKFARYQLGDLLLHLEKKHGEDWGKVYDEAWERIDKKVEGLSKHIKLEEERRSEDAQSKAALTDWLRAKASFVIEGLKEADKDEFCRCELKLQKWYGDLRGKPFAIEAENSILDISGFSKQYNCAFIWQKDGVKKLNLYLIINYFKGGKLRFKKIKPEAFEANRFYTVINKKSGEIVPMEVNFNFDDPNLIILPLAFGKRQGREFIWNDLLSLETGSLKLANGRVIEKTLYNRRTRQDEPALFVALTFERREVLDSSNIKPMNLIGVDRGENIPAVIALTDPEGCPLSRFKDSLGNPTHILRIGESYKEKQRTIQAKKEVEQRRAGGYSRKYASKAKNLADDMVRNTARDLLYYAVTQDAMLIFENLSRGFGRQGKRTFMAERQYTRMEDWLTAKLAYEGLPSKTYLSKTLAQYTSKTCSNCGFTITSADYDRVLEKLKKTATGWMTTINGKELKVEGQITYYNRYKRQNVVKDLSVELDRLSEESVNNDISSWTKGRSGEALSLLKKRFSHRPVQEKFVCLNCGFETHADEQAALNIARSWLFLRSQEYKKYQTNKTTGNTDKRAFVETWQSFYRKKLKEVWKPAV

SEQ ID NO: 44378 - protein, 979 aa, synthetic construct
  REGION 1..979: note = engineered CasX variant
QEIKRINKIRRRLVKDSNTKKAGKTGPMKTLLVRVMTPDLRERLENLRKKPENIPQPISNTSRANLNKLLTDYTEMKKAILHVYWEEFQKDPVGLMSRVAQPASKKIDQNKLKPEMDEKGNLTTAGFACSQCGQPLFVYKLEQVSEKGKAYTNYFGRCNVAEHEKLILLAQLKPEKDSDEAVTYSLGKFGQRALDFYSIHVTKESTHPVKPLAQIAGNRYASSPVGKALSDACMGTIASFLSKYQDIIIEHQKVVKGNQKRLESLRELAGKENLEYPSVTLPPQPHTKEGVDAYNEVIARVRMWVNLNLWQKLKLSRDDAKPLLRLKGFPSFPLVERQANAEVDWWDMVCNVKKLINEKKEDGKVFWQNLAIYKRQEALRPYLSSEEDRKKGKKFARYQLGDLLLHLEKKHGEDWGKVYDEAWERIDKKVEGLSKHIKLEEERRSEDAQSKAALTDWLRAKASFVIEGLKEADKDEFCRCELKLQKWYGDLRGKPFAIEAENSILDISGFSKQYNCAFIWQKDGVKKLNLYLIINYFKGGKLRFKKIKPEAFEANRFYTVINKKSGEIVPMEVNFNFDDPNLIILPLAFGKRQGREFIWNDLLSLETGSLKLANGRVIEKTLYNRRTRQDEPALFVALTFERREVLDSSNIKPMNLIGVDRGENIPAVIALTDPEGCPLSRFKDSLGNPTHILRIGESYKEKQRTIQAKKEVEQRRAGGYSRKYASKAKNLADDMVRNTARDLLYYAVTQDAMLIFENLSRGFGRQGKRTFMAERQYTRMEDWLTAKLAYEGLPSKTYLSKTLAQYTSKTCSNCGFTITSADYDRVLEKLKKTATGWMTTINGKELKVEGQITYYNRYKRQNVVKDLSVELDRLSEESVNNDISSWTKGRSGEALSLLKKRFSHRPVQEKFVCLNCGFETHADEQAALNIARSWLFLRSQEYKKYQTNKTTGNTDKRAFVETWQSFYRKKLKEVWKPAV

SEQ ID NO: 44379 - protein, 979 aa, synthetic construct
  REGION 1..979: note = engineered CasX variant
QEIKRINKIRRRLVKDSNTKKAGKTGPMKTLLVRVMTPDLRERLENLRKKPENIPQPISNTSRANLNKLLTDYTEMKKAILHVYWEEFQKDPVGLMSRVAQPASKKIDQNKLKPEMDEKGNLTTAGFACSQCGQPLFVYKLEQVSEKGKAYTNYFGRCNVAEHEKLILLAQLKPEKDSDEAVTYSLGKFGQRALDFYSIHVTKESTHPVKPLAQIAGNRYASTPVGKALSDACMGTIASFLSKYQDIIIEHQKVVKGNQKRLESLRELAGKENLEYPSVTLPPQPHTKEGVDAYNEVIARVRMWVNLNLWQKLKLSRDDAKPLLRLKGFPSFPLVERQANAEVDWWDMVCNVKKLINEKKEDGKVFWQNLAIYKRQEALRPYLSSEEDRKKGKKFARYQLGDLLLHLEKKHGEDWGKVYDEAWERIDKKVEGLSKHIKLEEERRSEDAQSKAALTDWLRAKASFVIEGLKEADKDEFCRCELKLQKWYGDLRGKPFAIEAENSILDISGFSKQYNCAFIWQKDGVKKLNLYLIINYFKGGKLRFKKIKPEAFEANRFYTVINKKSGEIVPMEVNFNFDDPNLIILPLAFGKRQGREFIWNDLLSLETGSLKLANGRVIEKTLYNRRTRQDEPALFVALTFERREVLDSSNIKPMNLIGVDRGENIPAVIALTDPEGCPLSRFKDSLGNPTHILRIGESYKEKQRTIQAKKEVEQRRAGGYSRKYASKAKNLADDMVRNTARDLLYYAVTQDAMLIFENLSRGFGRQGKRTFMAERQYTRMEDWLTAKLAYEGLPSKTYLSKTLAQYTSKTCSNCGFTITSADYDRVLEKLKKTATGWMTTINGKELKVEGQITYYNRYKRQNVVKDLSVELDRLSEESVNNDISSWTKGRSGEALSLLKKRFSHRPVQEKFVCLNCGFETHADEQAALNIARSWLFLRSQEYKKYQTNKTTGNTDKRAFVETWQSFYRKKLKEVWKPAV

SEQ ID NO: 44380 - protein, 979 aa, synthetic construct
  REGION 1..979: note = engineered CasX variant
QEIKRINKIRRRLVKDSNTKKAGKTGPMKTLLVRVMTPDLRERLENLRKKPENIPQPISNTSRANLNKLLTDYTEMKKAILHVYWEEFQKDPVGLMSRVAQPASKKIDQNKLKPEMDEKGNLTTAGFACSQCGQPLFVYKLEQVSEKGKAYTNYFGRCNVAEHEKLILLAQLKPEKDSDEAVTYSLGKFGQRALDFYSIHVTKESTHPVKPLAQIAGNRYASAPVGKALSDACMGTIASFLSKYQDIIIEHQKVVKGNQKRLESLRELAGKENLEYPSVTLPPQPHTKEGVDAYNEVIARVRMWVNLNLWQKLKLSRDDAKPLLRLKGFPSFPLVERQANAEVDWWDMVCNVKKLINEKKEDGKVFWQNLAIYKRQEALRPYLSSEEDRKKGKKFARYQLGDLLLHLEKKHGEDWGKVYDEAWERIDKKVEGLSKHIKLEEERRSEDAQSKAALTDWLRAKASFVIEGLKEADKDEFCRCELKLQKWYGDLRGKPFAIEAENSILDISGFSKQYNCAFIWQKDGVKKLNLYLIINYFKGGKLRFKKIKPEAFEANRFYTVINKKSGEIVPMEVNFNFDDPNLIILPLAFGKRQGREFIWNDLLSLETGSLKLANGRVIEKTLYNRRTRQDEPALFVALTFERREVLDSSNIKPMNLIGVDRGENIPAVIALTDPEGCPLSRFKDSLGNPTHILRIGESYKEKQRTIQAKKEVEQRRAGGYSRKYASKAKNLADDMVRNTARDLLYYAVTQDAMLIFENLSRGFGRQGKRTFMAERQYTRMEDWLTAKLAYEGLPSKTYLSKTLAQYTSKTCSNCGFTITSADYDRVLEKLKKTATGWMTTINGKELKVEGQITYYNRYKRQNVVKDLSVELDRLSEESVNNDISSWTKGRSGEALSLLKKRFSHRPVQEKFVCLNCGFETHADEQAALNIARSWLFLRSQEYKKYQTNKTTGNTDKRAFVETWQSFYRKKLKEVWKPAV

SEQ ID NO: 44381 - protein, 979 aa, synthetic construct
  REGION 1..979: note = engineered CasX variant
QEIKRINKIRRRLVKDSNTKKAGKTGPMKTLLVRVMTPDLRERLENLRKKPENIPQPISNTSRANLNKLLTDYTEMKKAILHVYWEEFQKDPVGLMSRVAQPASKKIDQNKLKPEMDEKGNLTTAGFACSQCGQPLFVYKLEQVSEKGKAYTNYFGRCNVAEHEKLILLAQLKPEKDSDEAVTYSLGKFGQRALDFYSIHVTKESTHPVKPLAQIAGNRYASVPVGKALSDACMGTIASFLSKYQDIIIEHQKVVKGNQKRLESLRELAGKENLEYPSVTLPPQPHTKEGVDAYNEVIARVRMWVNLNLWQKLKLSRDDAKPLLRLKGFPSFPLVERQANAEVDWWDMVCNVKKLINEKKEDGKVFWQNLAIYKRQEALRPYLSSEEDRKKGKKFARYQLGDLLLHLEKKHGEDWGKVYDEAWERIDKKVEGLSKHIKLEEERRSEDAQSKAALTDWLRAKASFVIEGLKEADKDEFCRCELKLQKWYGDLRGKPFAIEAENSILDISGFSKQYNCAFIWQKDGVKKLNLYLIINYFKGGKLRFKKIKPEAFEANRFYTVINKKSGEIVPMEVNFNFDDPNLIILPLAFGKRQGREFIWNDLLSLETGSLKLANGRVIEKTLYNRRTRQDEPALFVALTFERREVLDSSNIKPMNLIGVDRGENIPAVIALTDPEGCPLSRFKDSLGNPTHILRIGESYKEKQRTIQAKKEVEQRRAGGYSRKYASKAKNLADDMVRNTARDLLYYAVTQDAMLIFENLSRGFGRQGKRTFMAERQYTRMEDWLTAKLAYEGLPSKTYLSKTLAQYTSKTCSNCGFTITSADYDRVLEKLKKTATGWMTTINGKELKVEGQITYYNRYKRQNVVKDLSVELDRLSEESVNNDISSWTKGRSGEALSLLKKRFSHRPVQEKFVCLNCGFETHADEQAALNIARSWLFLRSQEYKKYQTNKTTGNTDKRAFVETWQSFYRKKLKEVWKPAV

SEQ ID NO: 44382 - protein, 979 aa, synthetic construct
  REGION 1..979: note = engineered CasX variant
QEIKRINKIRRRLVKDSNTKKAGKTGPMKTLLVRVMTPDLRERLENLRKKPENIPQPISNTSRANLNKLLTDYTEMKKAILHVYWEEFQKDPVGLMSRVAQPASKKIDQNKLKPEMDEKGNLTTAGFACSQCGQPLFVYKLEQVSEKGKAYTNYFGRCNVAEHEKLIKLAQLKPEKDSDEAVTYSLGKFGQRALDFYSIHVTKESTHPVKPLAQIAGNRYASGPVGKALSDACMGTIASFLSKYQDIIIEHQKVVKGNQKRLESLRELAGKENLEYPSVTLPPQPHTKEGVDAYNEVIARVRMWVNLNLWQKLKLSRDDAKPLLRLKGFPSFPLVERQANAEVDWWDMVCNVKKLINEKKEDGKVFWQNLAIYKRQEALRPYLSSEEDRKKGKKFARYQLGDLLLHLEKKHGEDWGKVYDEAWERIDKKVEGLSKHIKLEEERRSEDAQSKAALTDWLRAKASFVIEGLKEADKDEFCRCELKLQKWYGDLRGKPFAIEAENSILDISGFSKQYNCAFIWQKDGVKKLNLYLIINYFKGGKLRFKKIKPEAFEANRFYTVINKKSGEIVPMEVNFNFDDPNLIILPLAFGKRQGREFIWNDLLSLETGSLKLANGRVIEKTLYNRRTRQDEPALFVALTFERREVLDSSNIKPMNLIGVDRGENIPAVIALTDPEGCPLSRFKDSLGNPTHILRIGESYKEKQRTIQAKKEVEQRRAGGYSRKYASKAKNLADDMVRNTARDLLYYAVTQDAMLIFENLSRGFGRQGKRTFMAERQYTRMEDWLTAKLAYEGLPSKTYLSKTLAQYTSKTCSNCGFTITSADYDRVLEKLKKTATGWMTTINGKELKVEGQITYYNRYKRQNVVKDLSVELDRLSEESVNNDISSWTKGRSGEALSLLKKRFSHRPVQEKFVCLNCGFETHADEQAALNIARSWLFLRSQEYKKYQTNKTTGNTDKRAFVETWQSFYRKKLKEVWKPAV

SEQ ID NO: 44383 - protein, 978 aa, synthetic construct
  REGION 1..978: note = engineered CasX variant
QEIKRINKIRRRLVKDSNTKKAGKTGPMKTLLVRVMTPDLRERLENLRKKPENIPQPISNTSRANLNKLLTDYTEMKKAILHVYWEEFQKDPVGLMSRVAQPASKKIDQNKLKPEMDEKGNLTTAGFACSQCGQPLFVYKLEQVSEKGKAYTNYFGRCNVAEHEKLILLAQLKPEKDSDEAVTYSLGKFGQRALDFYSIHVTKESTHPVKPLAQIAGNRYASPVGKALSDACMGTIASFLSKYQDIIIEHQKVVKGNQKRLESLRELAGKENLEYPSVTLPPQPHTKEGVDAYNEVIARVRMWVNLNLWQKLKLSRDDAKPLLRLKGFPSFPLVERQANAEVDWWDMVCNVKKLINEKKEDGKVFWQNLAIYKRQEALRPYLSSEEDRKKGKKFARYQLGDLLLHLEKKHGEDWGKVYDEAWERIDKKVEGLSKHIKLEEERRSEDAQSKAALTDWLRAKASFVIEGLKEADKDEFCRCELKLQKWYGDLRGKPFAIEAENSILDISGFSKQYNCAFIWQKDGVKKLNLYLIINYFKGGKLRFKKIKPEAFEANRFYTVINKKSGEIVPMEVNFNFDDPNLIILPLAFGKRQGREFIWNDLLSLETGSLKLANGRVIEKTLYNRRTRQDEPALFVALTFERREVLDSSNIKPMNLIGVDRGENIPAVIALTDPEGCPLSRFKDSLGNPTHILRIGESYKEKQRTIQAKKEVEQRRAGGYSRKYASKAKNLADDMVRNTARDLLYYAVTQDAMLIFENLSRGFGRQGKRTFMAERQYTRMEDWLTAKLAYEGLPSKTYLSKTLAQYTSKTCSNCGFTITSADYDRVLEKLKKTATGWMTTINGKELKVEGQITYYNRYKRQNVVKDLSVELDRLSEESVNNDISSWTKGRSGEALSLLKKRFSHRPVQEKFVCLNCGFETHADEQAALNIARSWLFLRSQEYKKYQTNKTTGNTDKRAFVETWQSFYRKKLKEVWKPAV

SEQ ID NO: 44384 - protein, 979 aa, synthetic construct
  REGION 1..979: note = engineered CasX variant
QEIKRINKIRRRLVKDSNTKKAGKTGPMKTLLVRVMTPDLRERLENLRKKPENIPQPISNTSRANLNKLLTDYTEMKKAILHVYWEEFQKDPVGLMSRVAQPASKKIDQNKLKPEMDEKGNLTTAGFACSQCGQPLFVYKLEQVSEKGKAYTNYFGRCNVAEHEKLILLAQLKPEKDSDEAVTYSLGKFGQRALDFYSIHVTKESTHPVKPLAQIAGNRYASYPVGKALSDACMGTIASFLSKYQDIIIEHQKVVKGNQKRLESLRELAGKENLEYPSVTLPPQPHTKEGVDAYNEVIARVRMWVNLNLWQKLKLSRDDAKPLLRLKGFPSFPLVERQANAEVDWWDMVCNVKKLINEKKEDGKVFWQNLAGYKRQEALRPYLSSEEDREKGKKFARYQLGDLLLHLEKKHGEDWGKVYDEAWERIDKKVEGLSKHIKLEEERRSEDAQSKAALTDWLRAKASFVIEGLKEADKDEFCRCELKLQKWYGDLRGKPFAIEAENSILDISGFSKQYNCAFIWQKDGVKKLNLYLIINYFKGGKLRFKKIKPEAFEANRFYTVINKKSGEIVPMEVNFNFDDPNLIILPLAFGKRQGREFIWNDLLSLETGSLKLANGRVIEKTLYNRRTRQDEPALFVALTFERREVLDSSNIKPMNLIGVDRGENIPAVIALTDPEGCPLSRFKDSLGNPTHILRIGESYKEKQRTIQAKKEVEQRRAGGYSRKYASKAKNLADDMVRNTARDLLYYAVTQDAMLIFENLSRGFGRQGKRTFMAERQYTRMEDWLTAKLAYEGLPSKTYLSKTLAQYTSKTCSNCGFTITSADYDRVLEKLKKTATGWMTTINGKELKVEGQITYYNRYKRQNVVKDLSVELDRLSEESVNNDISSWTKGRSGEALSLLKKRFSHRPVQEKFVCLNCGFETHADEQAALNIARSWLFLRSQEYKKYQTNKTTGNTDKRAFVETWQSFYRKKLKEVWKPAV

SEQ ID NO: 44385 - protein, 979 aa, synthetic construct
  REGION 1..979: note = engineered CasX variant
QEIKRINKIRRRLVKDSNTKKAGKTGPMKTLLVRVMTPDLRERLENLRKKPENIPQPISNTSRANLNKLLTDYTEMKKAILHVYWEEFQKDPVGLMSRVAQPASKKIDQNKLKPEMDEKGNLTTAGFACSQCGQPLFVYKLEQVSEKGKAYTNYFGRCNVAEHEKLILLAQLKPEKDSDEAVTYSLGKFGQRALDFYSIHVTKESTHPVKPLAQIAGNRYASHPVGKALSDACMGTIASFLSKYQDIIIEHQKVVKGNQKRLESLRELAGKENLEYPSVTLPPQPHTKEGVDAYNEVIARVRMWVNLNLWQKLKLSRDDAKPLLRLKGFPSFPLVERQANAEVDWWDMVCNVKKLINEKKEDGKVFWQNLAGYKRQEALRPYLSSEEDREKGKKFARYQLGDLLLHLEKKHGEDWGKVYDEAWERIDKKVEGLSKHIKLEEERRSEDAQSKAALTDWLRAKASFVIEGLKEADKDEFCRCELKLQKWYGDLRGKPFAIEAENSILDISGFSKQYNCAFIWQKDGVKKLNLYLIINYFKGGKLRFKKIKPEAFEANRFYTVINKKSGEIVPMEVNFNFDDPNLIILPLAFGKRQGREFIWNDLLSLETGSLKLANGRVIEKTLYNRRTRQDEPALFVALTFERREVLDSSNIKPMNLIGVDRGENIPAVIALTDPEGCPLSRFKDSLGNPTHILRIGESYKEKQRTIQAKKEVEQRRAGGYSRKYASKAKNLADDMVRNTARDLLYYAVTQDAMLIFENLSRGFGRQGKRTFMAERQYTRMEDWLTAKLAYEGLPSKTYLSKTLAQYTSKTCSNCGFTITSADYDRVLEKLKKTATGWMTTINGKELKVEGQITYYNRYKRQNVVKDLSVELDRLSEESVNNDISSWTKGRSGEALSLLKKRFSHRPVQEKFVCLNCGFETHADEQAALNIARSWLFLRSQEYKKYQTNKTTGNTDKRAFVETWQSFYRKKLKEVWKPAV

SEQ ID NO: 44386 - protein, 979 aa, synthetic construct
  REGION 1..979: note = engineered CasX variant
QEIKRINKIRRRLVKDSNTKKAGKTGPMKTLLVRVMTPDLRERLENLRKKPENIPQPISNTSRANLNKLLTDYTEMKKAILHVYWEEFQKDPVGLMSRVAQPASKKIDQNKLKPEMDEKGNLTTAGFACSQCGQPLFVYKLEQVSEKGKAYTNYFGRCNVAEHEKLILLAQLKPEKDSDEAVTYSLGKFGQRALDFYSIHVTKESTHPVKPLAQIAGNRYASSPVGKALSDACMGTIASFLSKYQDIIIEHQKVVKGNQKRLESLRELAGKENLEYPSVTLPPQPHTKEGVDAYNEVIARVRMWVNLNLWQKLKLSRDDAKPLLRLKGFPSFPLVERQANAEVDWWDMVCNVKKLINEKKEDGKVFWQNLAGYKRQEALRPYLSSEEDREKGKKFARYQLGDLLLHLEKKHGEDWGKVYDEAWERIDKKVEGLSKHIKLEEERRSEDAQSKAALTDWLRAKASFVIEGLKEADKDEFCRCELKLQKWYGDLRGKPFAIEAENSILDISGFSKQYNCAFIWQKDGVKKLNLYLIINYFKGGKLRFKKIKPEAFEANRFYTVINKKSGEIVPMEVNFNFDDPNLIILPLAFGKRQGREFIWNDLLSLETGSLKLANGRVIEKTLYNRRTRQDEPALFVALTFERREVLDSSNIKPMNLIGVDRGENIPAVIALTDPEGCPLSRFKDSLGNPTHILRIGESYKEKQRTIQAKKEVEQRRAGGYSRKYASKAKNLADDMVRNTARDLLYYAVTQDAMLIFENLSRGFGRQGKRTFMAERQYTRMEDWLTAKLAYEGLPSKTYLSKTLAQYTSKTCSNCGFTITSADYDRVLEKLKKTATGWMTTINGKELKVEGQITYYNRYKRQNVVKDLSVELDRLSEESVNNDISSWTKGRSGEALSLLKKRFSHRPVQEKFVCLNCGFETHADEQAALNIARSWLFLRSQEYKKYQTNKTTGNTDKRAFVETWQSFYRKKLKEVWKPAV

SEQ ID NO: 44387 - protein, 979 aa, synthetic construct
  REGION 1..979: note = engineered CasX variant
QEIKRINKIRRRLVKDSNTKKAGKTGPMKTLLVRVMTPDLRERLENLRKKPENIPQPISNTSRANLNKLLTDYTEMKKAILHVYWEEFQKDPVGLMSRVAQPASKKIDQNKLKPEMDEKGNLTTAGFACSQCGQPLFVYKLEQVSEKGKAYTNYFGRCNVAEHEKLILLAQLKPEKDSDEAVTYSLGKFGQRALDFYSIHVTKESTHPVKPLAQIAGNRYASTPVGKALSDACMGTIASFLSKYQDIIIEHQKVVKGNQKRLESLRELAGKENLEYPSVTLPPQPHTKEGVDAYNEVIARVRMWVNLNLWQKLKLSRDDAKPLLRLKGFPSFPLVERQANAEVDWWDMVCNVKKLINEKKEDGKVFWQNLAGYKRQEALRPYLSSEEDREKGKKFARYQLGDLLLHLEKKHGEDWGKVYDEAWERIDKKVEGLSKHIKLEEERRSEDAQSKAALTDWLRAKASFVIEGLKEADKDEFCRCELKLQKWYGDLRGKPFAIEAENSILDISGFSKQYNCAFIWQKDGVKKLNLYLIINYFKGGKLRFKKIKPEAFEANRFYTVINKKSGEIVPMEVNFNFDDPNLIILPLAFGKRQGREFIWNDLLSLETGSLKLANGRVIEKTLYNRRTRQDEPALFVALTFERREVLDSSNIKPMNLIGVDRGENIPAVIALTDPEGCPLSRFKDSLGNPTHILRIGESYKEKQRTIQAKKEVEQRRAGGYSRKYASKAKNLADDMVRNTARDLLYYAVTQDAMLIFENLSRGFGRQGKRTFMAERQYTRMEDWLTAKLAYEGLPSKTYLSKTLAQYTSKTCSNCGFTITSADYDRVLEKLKKTATGWMTTINGKELKVEGQITYYNRYKRQNVVKDLSVELDRLSEESVNNDISSWTKGRSGEALSLLKKRFSHRPVQEKFVCLNCGFETHADEQAALNIARSWLFLRSQEYKKYQTNKTTGNTDKRAFVETWQSFYRKKLKEVWKPAV

SEQ ID NO: 44388 - protein, 979 aa, synthetic construct
  REGION 1..979: note = engineered CasX variant
QEIKRINKIRRRLVKDSNTKKAGKTGPMKTLLVRVMTPDLRERLENLRKKPENIPQPISNTSRANLNKLLTDYTEMKKAILHVYWEEFQKDPVGLMSRVAQPASKKIDQNKLKPEMDEKGNLTTAGFACSQCGQPLFVYKLEQVSEKGKAYTNYFGRCNVAEHEKLILLAQLKPEKDSDEAVTYSLGKFGQRALDFYSIHVTKESTHPVKPLAQIAGNRYASAPVGKALSDACMGTIASFLSKYQDIIIEHQKVVKGNQKRLESLRELAGKENLEYPSVTLPPQPHTKEGVDAYNEVIARVRMWVNLNLWQKLKLSRDDAKPLLRLKGFPSFPLVERQANAEVDWWDMVCNVKKLINEKKEDGKVFWQNLAGYKRQEALRPYLSSEEDREKGKKFARYQLGDLLLHLEKKHGEDWGKVYDEAWERIDKKVEGLSKHIKLEEERRSEDAQSKAALTDWLRAKASFVIEGLKEADKDEFCRCELKLQKWYGDLRGKPFAIEAENSILDISGFSKQYNCAFIWQKDGVKKLNLYLIINYFKGGKLRFKKIKPEAFEANRFYTVINKKSGEIVPMEVNFNFDDPNLIILPLAFGKRQGREFIWNDLLSLETGSLKLANGRVIEKTLYNRRTRQDEPALFVALTFERREVLDSSNIKPMNLIGVDRGENIPAVIALTDPEGCPLSRFKDSLGNPTHILRIGESYKEKQRTIQAKKEVEQRRAGGYSRKYASKAKNLADDMVRNTARDLLYYAVTQDAMLIFENLSRGFGRQGKRTFMAERQYTRMEDWLTAKLAYEGLPSKTYLSKTLAQYTSKTCSNCGFTITSADYDRVLEKLKKTATGWMTTINGKELKVEGQITYYNRYKRQNVVKDLSVELDRLSEESVNNDISSWTKGRSGEALSLLKKRFSHRPVQEKFVCLNCGFETHADEQAALNIARSWLFLRSQEYKKYQTNKTTGNTDKRAFVETWQSFYRKKLKEVWKPAV

SEQ ID NO: 44389 - protein, 979 aa, synthetic construct
  REGION 1..979: note = engineered CasX variant
QEIKRINKIRRRLVKDSNTKKAGKTGPMKTLLVRVMTPDLRERLENLRKKPENIPQPISNTSRANLNKLLTDYTEMKKAILHVYWEEFQKDPVGLMSRVAQPASKKIDQNKLKPEMDEKGNLTTAGFACSQCGQPLFVYKLEQVSEKGKAYTNYFGRCNVAEHEKLILLAQLKPEKDSDEAVTYSLGKFGQRALDFYSIHVTKESTHPVKPLAQIAGNRYASVPVGKALSDACMGTIASFLSKYQDIIIEHQKVVKGNQKRLESLRELAGKENLEYPSVTLPPQPHTKEGVDAYNEVIARVRMWVNLNLWQKLKLSRDDAKPLLRLKGFPSFPLVERQANAEVDWWDMVCNVKKLINEKKEDGKVFWQNLAGYKRQEALRPYLSSEEDREKGKKFARYQLGDLLLHLEKKHGEDWGKVYDEAWERIDKKVEGLSKHIKLEEERRSEDAQSKAALTDWLRAKASFVIEGLKEADKDEFCRCELKLQKWYGDLRGKPFAIEAENSILDISGFSKQYNCAFIWQKDGVKKLNLYLIINYFKGGKLRFKKIKPEAFEANRFYTVINKKSGEIVPMEVNFNFDDPNLIILPLAFGKRQGREFIWNDLLSLETGSLKLANGRVIEKTLYNRRTRQDEPALFVALTFERREVLDSSNIKPMNLIGVDRGENIPAVIALTDPEGCPLSRFKDSLGNPTHILRIGESYKEKQRTIQAKKEVEQRRAGGYSRKYASKAKNLADDMVRNTARDLLYYAVTQDAMLIFENLSRGFGRQGKRTFMAERQYTRMEDWLTAKLAYEGLPSKTYLSKTLAQYTSKTCSNCGFTITSADYDRVLEKLKKTATGWMTTINGKELKVEGQITYYNRYKRQNVVKDLSVELDRLSEESVNNDISSWTKGRSGEALSLLKKRFSHRPVQEKFVCLNCGFETHADEQAALNIARSWLFLRSQEYKKYQTNKTTGNTDKRAFVETWQSFYRKKLKEVWKPAV

SEQ ID NO: 44390 - protein, 979 aa, synthetic construct
  REGION 1..979: note = engineered CasX variant
QEIKRINKIRRRLVKDSNTKKAGKTGPMKTLLVRVMTPDLRERLENLRKKPENIPQPISNTSRANLNKLLTDYTEMKKAILHVYWEEFQKDPVGLMSRVAQPASKKIDQNKLKPEMDEKGNLTTAGFACSQCGQPLFVYKLEQVSEKGKAYTNYFGRCNVAEHEKLIKLAQLKPEKDSDEAVTYSLGKFGQRALDFYSIHVTKESTHPVKPLAQIAGNRYASGPVGKALSDACMGTIASFLSKYQDIIIEHQKVVKGNQKRLESLRELAGKENLEYPSVTLPPQPHTKEGVDAYNEVIARVRMWVNLNLWQKLKLSRDDAKPLLRLKGFPSFPLVERQANAEVDWWDMVCNVKKLINEKKEDGKVFWQNLAGYKRQEALRPYLSSEEDREKGKKFARYQLGDLLLHLEKKHGEDWGKVYDEAWERIDKKVEGLSKHIKLEEERRSEDAQSKAALTDWLRAKASFVIEGLKEADKDEFCRCELKLQKWYGDLRGKPFAIEAENSILDISGFSKQYNCAFIWQKDGVKKLNLYLIINYFKGGKLRFKKIKPEAFEANRFYTVINKKSGEIVPMEVNFNFDDPNLIILPLAFGKRQGREFIWNDLLSLETGSLKLANGRVIEKTLYNRRTRQDEPALFVALTFERREVLDSSNIKPMNLIGVDRGENIPAVIALTDPEGCPLSRFKDSLGNPTHILRIGESYKEKQRTIQAKKEVEQRRAGGYSRKYASKAKNLADDMVRNTARDLLYYAVTQDAMLIFENLSRGFGRQGKRTFMAERQYTRMEDWLTAKLAYEGLPSKTYLSKTLAQYTSKTCSNCGFTITSADYDRVLEKLKKTATGWMTTINGKELKVEGQITYYNRYKRQNVVKDLSVELDRLSEESVNNDISSWTKGRSGEALSLLKKRFSHRPVQEKFVCLNCGFETHADEQAALNIARSWLFLRSQEYKKYQTNKTTGNTDKRAFVETWQSFYRKKLKEVWKPAV

SEQ ID NO: 44391 - protein, 978 aa, synthetic construct
  REGION 1..978: note = engineered CasX variant
QEIKRINKIRRRLVKDSNTKKAGKTGPMKTLLVRVMTPDLRERLENLRKKPENIPQPISNTSRANLNKLLTDYTEMKKAILHVYWEEFQKDPVGLMSRVAQPASKKIDQNKLKPEMDEKGNLTTAGFACSQCGQPLFVYKLEQVSEKGKAYTNYFGRCNVAEHEKLILLAQLKPEKDSDEAVTYSLGKFGQRALDFYSIHVTKESTHPVKPLAQIAGNRYASPVGKALSDACMGTIASFLSKYQDIIIEHQKVVKGNQKRLESLRELAGKENLEYPSVTLPPQPHTKEGVDAYNEVIARVRMWVNLNLWQKLKLSRDDAKPLLRLKGFPSFPLVERQANAEVDWWDMVCNVKKLINEKKEDGKVFWQNLAGYKRQEALRPYLSSEEDREKGKKFARYQLGDLLLHLEKKHGEDWGKVYDEAWERIDKKVEGLSKHIKLEEERRSEDAQSKAALTDWLRAKASFVIEGLKEADKDEFCRCELKLQKWYGDLRGKPFAIEAENSILDISGFSKQYNCAFIWQKDGVKKLNLYLIINYFKGGKLRFKKIKPEAFEANRFYTVINKKSGEIVPMEVNFNFDDPNLIILPLAFGKRQGREFIWNDLLSLETGSLKLANGRVIEKTLYNRRTRQDEPALFVALTFERREVLDSSNIKPMNLIGVDRGENIPAVIALTDPEGCPLSRFKDSLGNPTHILRIGESYKEKQRTIQAKKEVEQRRAGGYSRKYASKAKNLADDMVRNTARDLLYYAVTQDAMLIFENLSRGFGRQGKRTFMAERQYTRMEDWLTAKLAYEGLPSKTYLSKTLAQYTSKTCSNCGFTITSADYDRVLEKLKKTATGWMTTINGKELKVEGQITYYNRYKRQNVVKDLSVELDRLSEESVNNDISSWTKGRSGEALSLLKKRFSHRPVQEKFVCLNCGFETHADEQAALNIARSWLFLRSQEYKKYQTNKTTGNTDKRAFVETWQSFYRKKLKEVWKPAV

SEQ ID NO: 44392 - protein, 979 aa, synthetic construct
  REGION 1..979: note = engineered CasX variant
QEIKRINKIRRRLVKDSNTKKAGKTGPMKTLLVRVMTPDLRERLENLRKKPENIPQPISNTSRANLNKLLTDYTEMKKAILHVYWEEFQKDPVGLMSRVAQPASKKIDQNKLKPEMDEKGNLTTAGFACSQCGQPLFVYKLEQVSEKGKAYTNYFGRCNVAEHEKLILLAQLKPEKDSDEAVTYSLGKFGQRALDFYSIHVTKESTHPVKPLAQIAGNRYASYPVGKALSDACMGTIASFLSKYQDIIIEHQKVVKGNQKRLESLRELAGKENLEYPSVTLPPQPHTKEGVDAYNEVIARVRMWVNLNLWQKLKLSRDDAKPLLRLKGFPSFPLVERQANAEVDWWDMVCNVKKLINEKKEDGKVFWQNLAGYKRQEALRPYLSSEEDRKKGKKFARYQLGDLLLHLEKKHGEDWGKVYDEAWERIDKKVEGLSKHIKLEEERRSEDAQSKAALTDWLRAKASFVIEGLKEADKDEFCRCELKLQKWYGDLRGKPFAIEAENSILDISGFSKQYNCAFIWQKDGVKKLNLYLIINYFKGGKLRFKKIKPEAFEANRFYTVINKKSGEIVIMEVNFNFDDPNLIILPLAFGKRQGREFIWNDLLSLETGSLKLANGRVIEKTLYNRRTRQDEPALFVALTFERREVLDSSNIKPMNLIGVDRGENIPAVIALTDPEGCPLSRFKDSLGNPTHILRIGESYKEKQRTIQAKKEVEQRRAGGYSRKYASKAKNLADDMVRNTARDLLYYAVTQDAMLIFENLSRGFGRQGKRTFMAERQYTRMEDWLTAKLAYEGLPSKTYLSKTLAQYTSKTCSNCGFTITSADYDRVLEKLKKTATGWMTTINGKELKVEGQITYYNRYKRQNVVKDLSVELDRLSEESVNNDISSWTKGRSGEALSLLKKRFSHRPVQEKFVCLNCGFETHADEQAALNIARSWLFLRSQEYKKYQTNKTTGNTDKRAFVETWQSFYRKKLKEVWKPAV

SEQ ID NO: 44393 - protein, 979 aa, synthetic construct
  REGION 1..979: note = engineered CasX variant
QEIKRINKIRRRLVKDSNTKKAGKTGPMKTLLVRVMTPDLRERLENLRKKPENIPQPISNTSRANLNKLLTDYTEMKKAILHVYWEEFQKDPVGLMSRVAQPASKKIDQNKLKPEMDEKGNLTTAGFACSQCGQPLFVYKLEQVSEKGKAYTNYFGRCNVAEHEKLILLAQLKPEKDSDEAVTYSLGKFGQRALDFYSIHVTKESTHPVKPLAQIAGNRYASHPVGKALSDACMGTIASFLSKYQDIIIEHQKVVKGNQKRLESLRELAGKENLEYPSVTLPPQPHTKEGVDAYNEVIARVRMWVNLNLWQKLKLSRDDAKPLLRLKGFPSFPLVERQANAEVDWWDMVCNVKKLINEKKEDGKVFWQNLAGYKRQEALRPYLSSEEDRKKGKKFARYQLGDLLLHLEKKHGEDWGKVYDEAWERIDKKVEGLSKHIKLEEERRSEDAQSKAALTDWLRAKASFVIEGLKEADKDEFCRCELKLQKWYGDLRGKPFAIEAENSILDISGFSKQYNCAFIWQKDGVKKLNLYLIINYFKGGKLRFKKIKPEAFEANRFYTVINKKSGEIVIMEVNFNFDDPNLIILPLAFGKRQGREFIWNDLLSLETGSLKLANGRVIEKTLYNRRTRQDEPALFVALTFERREVLDSSNIKPMNLIGVDRGENIPAVIALTDPEGCPLSRFKDSLGNPTHILRIGESYKEKQRTIQAKKEVEQRRAGGYSRKYASKAKNLADDMVRNTARDLLYYAVTQDAMLIFENLSRGFGRQGKRTFMAERQYTRMEDWLTAKLAYEGLPSKTYLSKTLAQYTSKTCSNCGFTITSADYDRVLEKLKKTATGWMTTINGKELKVEGQITYYNRYKRQNVVKDLSVELDRLSEESVNNDISSWTKGRSGEALSLLKKRFSHRPVQEKFVCLNCGFETHADEQAALNIARSWLFLRSQEYKKYQTNKTTGNTDKRAFVETWQSFYRKKLKEVWKPAV

SEQ ID NO: 44394 - protein, 979 aa, synthetic construct
  REGION 1..979: note = engineered CasX variant
QEIKRINKIRRRLVKDSNTKKAGKTGPMKTLLVRVMTPDLRERLENLRKKPENIPQPISNTSRANLNKLLTDYTEMKKAILHVYWEEFQKDPVGLMSRVAQPASKKIDQNKLKPEMDEKGNLTTAGFACSQCGQPLFVYKLEQVSEKGKAYTNYFGRCNVAEHEKLILLAQLKPEKDSDEAVTYSLGKFGQRALDFYSIHVTKESTHPVKPLAQIAGNRYASSPVGKALSDACMGTIASFLSKYQDIIIEHQKVVKGNQKRLESLRELAGKENLEYPSVTLPPQPHTKEGVDAYNEVIARVRMWVNLNLWQKLKLSRDDAKPLLRLKGFPSFPLVERQANAEVDWWDMVCNVKKLINEKKEDGKVFWQNLAGYKRQEALRPYLSSEEDRKKGKKFARYQLGDLLLHLEKKHGEDWGKVYDEAWERIDKKVEGLSKHIKLEEERRSEDAQSKAALTDWLRAKASFVIEGLKEADKDEFCRCELKLQKWYGDLRGKPFAIEAENSILDISGFSKQYNCAFIWQKDGVKKLNLYLIINYFKGGKLRFKKIKPEAFEANRFYTVINKKSGEIVIMEVNFNFDDPNLIILPLAFGKRQGREFIWNDLLSLETGSLKLANGRVIEKTLYNRRTRQDEPALFVALTFERREVLDSSNIKPMNLIGVDRGENIPAVIALTDPEGCPLSRFKDSLGNPTHILRIGESYKEKQRTIQAKKEVEQRRAGGYSRKYASKAKNLADDMVRNTARDLLYYAVTQDAMLIFENLSRGFGRQGKRTFMAERQYTRMEDWLTAKLAYEGLPSKTYLSKTLAQYTSKTCSNCGFTITSADYDRVLEKLKKTATGWMTTINGKELKVEGQITYYNRYKRQNVVKDLSVELDRLSEESVNNDISSWTKGRSGEALSLLKKRFSHRPVQEKFVCLNCGFETHADEQAALNIARSWLFLRSQEYKKYQTNKTTGNTDKRAFVETWQSFYRKKLKEVWKPAV

SEQ ID NO: 44395 - protein, 979 aa, synthetic construct
  REGION 1..979: note = engineered CasX variant
QEIKRINKIRRRLVKDSNTKKAGKTGPMKTLLVRVMTPDLRERLENLRKKPENIPQPISNTSRANLNKLLTDYTEMKKAILHVYWEEFQKDPVGLMSRVAQPASKKIDQNKLKPEMDEKGNLTTAGFACSQCGQPLFVYKLEQVSEKGKAYTNYFGRCNVAEHEKLILLAQLKPEKDSDEAVTYSLGKFGQRALDFYSIHVTKESTHPVKPLAQIAGNRYASTPVGKALSDACMGTIASFLSKYQDIIIEHQKVVKGNQKRLESLRELAGKENLEYPSVTLPPQPHTKEGVDAYNEVIARVRMWVNLNLWQKLKLSRDDAKPLLRLKGFPSFPLVERQANAEVDWWDMVCNVKKLINEKKEDGKVFWQNLAGYKRQEALRPYLSSEEDRKKGKKFARYQLGDLLLHLEKKHGEDWGKVYDEAWERIDKKVEGLSKHIKLEEERRSEDAQSKAALTDWLRAKASFVIEGLKEADKDEFCRCELKLQKWYGDLRGKPFAIEAENSILDISGFSKQYNCAFIWQKDGVKKLNLYLIINYFKGGKLRFKKIKPEAFEANRFYTVINKKSGEIVIMEVNFNFDDPNLIILPLAFGKRQGREFIWNDLLSLETGSLKLANGRVIEKTLYNRRTRQDEPALFVALTFERREVLDSSNIKPMNLIGVDRGENIPAVIALTDPEGCPLSRFKDSLGNPTHILRIGESYKEKQRTIQAKKEVEQRRAGGYSRKYASKAKNLADDMVRNTARDLLYYAVTQDAMLIFENLSRGFGRQGKRTFMAERQYTRMEDWLTAKLAYEGLPSKTYLSKTLAQYTSKTCSNCGFTITSADYDRVLEKLKKTATGWMTTINGKELKVEGQITYYNRYKRQNVVKDLSVELDRLSEESVNNDISSWTKGRSGEALSLLKKRFSHRPVQEKFVCLNCGFETHADEQAALNIARSWLFLRSQEYKKYQTNKTTGNTDKRAFVETWQSFYRKKLKEVWKPAV

SEQ ID NO: 44396 - protein, 979 aa, synthetic construct
  REGION 1..979: note = engineered CasX variant
QEIKRINKIRRRLVKDSNTKKAGKTGPMKTLLVRVMTPDLRERLENLRKKPENIPQPISNTSRANLNKLLTDYTEMKKAILHVYWEEFQKDPVGLMSRVAQPASKKIDQNKLKPEMDEKGNLTTAGFACSQCGQPLFVYKLEQVSEKGKAYTNYFGRCNVAEHEKLILLAQLKPEKDSDEAVTYSLGKFGQRALDFYSIHVTKESTHPVKPLAQIAGNRYASAPVGKALSDACMGTIASFLSKYQDIIIEHQKVVKGNQKRLESLRELAGKENLEYPSVTLPPQPHTKEGVDAYNEVIARVRMWVNLNLWQKLKLSRDDAKPLLRLKGFPSFPLVERQANAEVDWWDMVCNVKKLINEKKEDGKVFWQNLAGYKRQEALRPYLSSEEDRKKGKKFARYQLGDLLLHLEKKHGEDWGKVYDEAWERIDKKVEGLSKHIKLEEERRSEDAQSKAALTDWLRAKASFVIEGLKEADKDEFCRCELKLQKWYGDLRGKPFAIEAENSILDISGFSKQYNCAFIWQKDGVKKLNLYLIINYFKGGKLRFKKIKPEAFEANRFYTVINKKSGEIVIMEVNFNFDDPNLIILPLAFGKRQGREFIWNDLLSLETGSLKLANGRVIEKTLYNRRTRQDEPALFVALTFERREVLDSSNIKPMNLIGVDRGENIPAVIALTDPEGCPLSRFKDSLGNPTHILRIGESYKEKQRTIQAKKEVEQRRAGGYSRKYASKAKNLADDMVRNTARDLLYYAVTQDAMLIFENLSRGFGRQGKRTFMAERQYTRMEDWLTAKLAYEGLPSKTYLSKTLAQYTSKTCSNCGFTITSADYDRVLEKLKKTATGWMTTINGKELKVEGQITYYNRYKRQNVVKDLSVELDRLSEESVNNDISSWTKGRSGEALSLLKKRFSHRPVQEKFVCLNCGFETHADEQAALNIARSWLFLRSQEYKKYQTNKTTGNTDKRAFVETWQSFYRKKLKEVWKPAV

SEQ ID NO: 44397 - protein, 979 aa, synthetic construct
  REGION 1..979: note = engineered CasX variant
QEIKRINKIRRRLVKDSNTKKAGKTGPMKTLLVRVMTPDLRERLENLRKKPENIPQPISNTSRANLNKLLTDYTEMKKAILHVYWEEFQKDPVGLMSRVAQPASKKIDQNKLKPEMDEKGNLTTAGFACSQCGQPLFVYKLEQVSEKGKAYTNYFGRCNVAEHEKLILLAQLKPEKDSDEAVTYSLGKFGQRALDFYSIHVTKESTHPVKPLAQIAGNRYASVPVGKALSDACMGTIASFLSKYQDIIIEHQKVVKGNQKRLESLRELAGKENLEYPSVTLPPQPHTKEGVDAYNEVIARVRMWVNLNLWQKLKLSRDDAKPLLRLKGFPSFPLVERQANAEVDWWDMVCNVKKLINEKKEDGKVFWQNLAGYKRQEALRPYLSSEEDRKKGKKFARYQLGDLLLHLEKKHGEDWGKVYDEAWERIDKKVEGLSKHIKLEEERRSEDAQSKAALTDWLRAKASFVIEGLKEADKDEFCRCELKLQKWYGDLRGKPFAIEAENSILDISGFSKQYNCAFIWQKDGVKKLNLYLIINYFKGGKLRFKKIKPEAFEANRFYTVINKKSGEIVIMEVNFNFDDPNLIILPLAFGKRQGREFIWNDLLSLETGSLKLANGRVIEKTLYNRRTRQDEPALFVALTFERREVLDSSNIKPMNLIGVDRGENIPAVIALTDPEGCPLSRFKDSLGNPTHILRIGESYKEKQRTIQAKKEVEQRRAGGYSRKYASKAKNLADDMVRNTARDLLYYAVTQDAMLIFENLSRGFGRQGKRTFMAERQYTRMEDWLTAKLAYEGLPSKTYLSKTLAQYTSKTCSNCGFTITSADYDRVLEKLKKTATGWMTTINGKELKVEGQITYYNRYKRQNVVKDLSVELDRLSEESVNNDISSWTKGRSGEALSLLKKRFSHRPVQEKFVCLNCGFETHADEQAALNIARSWLFLRSQEYKKYQTNKTTGNTDKRAFVETWQSFYRKKLKEVWKPAV

SEQ ID NO: 44398 - protein, 979 aa, synthetic construct
  REGION 1..979: note = engineered CasX variant
QEIKRINKIRRRLVKDSNTKKAGKTGPMKTLLVRVMTPDLRERLENLRKKPENIPQPISNTSRANLNKLLTDYTEMKKAILHVYWEEFQKDPVGLMSRVAQPASKKIDQNKLKPEMDEKGNLTTAGFACSQCGQPLFVYKLEQVSEKGKAYTNYFGRCNVAEHEKLIKLAQLKPEKDSDEAVTYSLGKFGQRALDFYSIHVTKESTHPVKPLAQIAGNRYASGPVGKALSDACMGTIASFLSKYQDIIIEHQKVVKGNQKRLESLRELAGKENLEYPSVTLPPQPHTKEGVDAYNEVIARVRMWVNLNLWQKLKLSRDDAKPLLRLKGFPSFPLVERQANAEVDWWDMVCNVKKLINEKKEDGKVFWQNLAGYKRQEALRPYLSSEEDRKKGKKFARYQLGDLLLHLEKKHGEDWGKVYDEAWERIDKKVEGLSKHIKLEEERRSEDAQSKAALTDWLRAKASFVIEGLKEADKDEFCRCELKLQKWYGDLRGKPFAIEAENSILDISGFSKQYNCAFIWQKDGVKKLNLYLIINYFKGGKLRFKKIKPEAFEANRFYTVINKKSGEIVIMEVNFNFDDPNLIILPLAFGKRQGREFIWNDLLSLETGSLKLANGRVIEKTLYNRRTRQDEPALFVALTFERREVLDSSNIKPMNLIGVDRGENIPAVIALTDPEGCPLSRFKDSLGNPTHILRIGESYKEKQRTIQAKKEVEQRRAGGYSRKYASKAKNLADDMVRNTARDLLYYAVTQDAMLIFENLSRGFGRQGKRTFMAERQYTRMEDWLTAKLAYEGLPSKTYLSKTLAQYTSKTCSNCGFTITSADYDRVLEKLKKTATGWMTTINGKELKVEGQITYYNRYKRQNVVKDLSVELDRLSEESVNNDISSWTKGRSGEALSLLKKRFSHRPVQEKFVCLNCGFETHADEQAALNIARSWLFLRSQEYKKYQTNKTTGNTDKRAFVETWQSFYRKKLKEVWKPAV

SEQ ID NO: 44399 - protein, 978 aa, synthetic construct
  REGION 1..978: note = engineered CasX variant
QEIKRINKIRRRLVKDSNTKKAGKTGPMKTLLVRVMTPDLRERLENLRKKPENIPQPISNTSRANLNKLLTDYTEMKKAILHVYWEEFQKDPVGLMSRVAQPASKKIDQNKLKPEMDEKGNLTTAGFACSQCGQPLFVYKLEQVSEKGKAYTNYFGRCNVAEHEKLILLAQLKPEKDSDEAVTYSLGKFGQRALDFYSIHVTKESTHPVKPLAQIAGNRYASPVGKALSDACMGTIASFLSKYQDIIIEHQKVVKGNQKRLESLRELAGKENLEYPSVTLPPQPHTKEGVDAYNEVIARVRMWVNLNLWQKLKLSRDDAKPLLRLKGFPSFPLVERQANAEVDWWDMVCNVKKLINEKKEDGKVFWQNLAGYKRQEALRPYLSSEEDRKKGKKFARYQLGDLLLHLEKKHGEDWGKVYDEAWERIDKKVEGLSKHIKLEEERRSEDAQSKAALTDWLRAKASFVIEGLKEADKDEFCRCELKLQKWYGDLRGKPFAIEAENSILDISGFSKQYNCAFIWQKDGVKKLNLYLIINYFKGGKLRFKKIKPEAFEANRFYTVINKKSGEIVIMEVNFNFDDPNLIILPLAFGKRQGREFIWNDLLSLETGSLKLANGRVIEKTLYNRRTRQDEPALFVALTFERREVLDSSNIKPMNLIGVDRGENIPAVIALTDPEGCPLSRFKDSLGNPTHILRIGESYKEKQRTIQAKKEVEQRRAGGYSRKYASKAKNLADDMVRNTARDLLYYAVTQDAMLIFENLSRGFGRQGKRTFMAERQYTRMEDWLTAKLAYEGLPSKTYLSKTLAQYTSKTCSNCGFTITSADYDRVLEKLKKTATGWMTTINGKELKVEGQITYYNRYKRQNVVKDLSVELDRLSEESVNNDISSWTKGRSGEALSLLKKRFSHRPVQEKFVCLNCGFETHADEQAALNIARSWLFLRSQEYKKYQTNKTTGNTDKRAFVETWQSFYRKKLKEVWKPAV

SEQ ID NO: 44400 - protein, 978 aa, synthetic construct
  REGION 1..978: note = engineered CasX variant
QEIKRINKIRRRLVKDSNTKKAGKTGPMKTLLVRVMTPDLRERLENLRKKPENIPQPISNTSRANLNKLLTDYTEMKKAILHVYWEEFQKDPVGLMSRVAQPASKKIDQNKLKPEMDEKGNLTTAGFACSQCGQPLFVYKLEQVSEKGKAYTNYFGRCNVAEHEKLILLAQLKPEKDSDEAVTYSLGKFGQRALDFYSIHVTKESTHPVKPLAQIAGNRYASYPVGKALSGACMGTIASFLSKYQDIIIEHQKVVKGNQKRLESLRELAGKENLEYPSVTLPPQPHTKEGVDAYNEVIARVRMWVNLNLWQKLKLSRDDAKPLLRLKGFPSFPLVERQANEVDWWDMVCNVKKLINEKKEDGKVFWQNLAGYKRQEALRPYLSSEEDRKKGKKFARTQLGDLLLHLEKKHGEDWGKVYDEAWERIDKKVEGLSKHIKLEEERRSEDAQSKAALTDWLRAKASFVIEGLKEADKDEFCRCELKLQKWYGDLRGKPFAIEAENSILDISGFSKQYNCAFIWQKDGVKKLNLYLIINYFKGGKLRFKKIKPEAFEANRFYTVINKKSGEIVPMEVNFNFDDPNLIILPLAFGKRQGREFIWNDLLSLETGSLKLANGRVIEKTLYNRRTRQDEPALFVALTFERREVLDSSNIKPMNLIGVDRGENIPAVIALTDPEGCPLSRFKDSLGNPTHILRIGESYKEKQRTIQAKKEVEQRRAGGYSRKYASKAKNLADDMVRNTARDLLYYAVTQDAMLIFENLSRGFGRQGKRTFMAERQYTRMEDWLTAKLAYEGLPSKTYLSKTLAQYTSKTCSNCGFTITSADYDRVLEKLKKTATGWMTTINGKELKVEGQITYYNRYKRQNVVKDLSVELDRLSEESVNNDISSWTKGRSGEALSLLKKRFSHRPVQEKFVCLNCGFETHADEQAALNIARSWLFLRSQEYKKYQTNKTTGNTDKRAFVETWQSFYRKKLKEVWKPAV

SEQ ID NO: 44401 - protein, 978 aa, synthetic construct
  REGION 1..978: note = engineered CasX variant
QEIKRINKIRRRLVKDSNTKKAGKTGPMKTLLVRVMTPDLRERLENLRKKPENIPQPISNTSRANLNKLLTDYTEMKKAILHVYWEEFQKDPVGLMSRVAQPASKKIDQNKLKPEMDEKGNLTTAGFACSQCGQPLFVYKLEQVSEKGKAYTNYFGRCNVAEHEKLILLAQLKPEKDSDEAVTYSLGKFGQRALDFYSIHVTKESTHPVKPLAQIAGNRYASHPVGKALSGACMGTIASFLSKYQDIIIEHQKVVKGNQKRLESLRELAGKENLEYPSVTLPPQPHTKEGVDAYNEVIARVRMWVNLNLWQKLKLSRDDAKPLLRLKGFPSFPLVERQANEVDWWDMVCNVKKLINEKKEDGKVFWQNLAGYKRQEALRPYLSSEEDRKKGKKFARTQLGDLLLHLEKKHGEDWGKVYDEAWERIDKKVEGLSKHIKLEEERRSEDAQSKAALTDWLRAKASFVIEGLKEADKDEFCRCELKLQKWYGDLRGKPFAIEAENSILDISGFSKQYNCAFIWQKDGVKKLNLYLIINYFKGGKLRFKKIKPEAFEANRFYTVINKKSGEIVPMEVNFNFDDPNLIILPLAFGKRQGREFIWNDLLSLETGSLKLANGRVIEKTLYNRRTRQDEPALFVALTFERREVLDSSNIKPMNLIGVDRGENIPAVIALTDPEGCPLSRFKDSLGNPTHILRIGESYKEKQRTIQAKKEVEQRRAGGYSRKYASKAKNLADDMVRNTARDLLYYAVTQDAMLIFENLSRGFGRQGKRTFMAERQYTRMEDWLTAKLAYEGLPSKTYLSKTLAQYTSKTCSNCGFTITSADYDRVLEKLKKTATGWMTTINGKELKVEGQITYYNRYKRQNVVKDLSVELDRLSEESVNNDISSWTKGRSGEALSLLKKRFSHRPVQEKFVCLNCGFETHADEQAALNIARSWLFLRSQEYKKYQTNKTTGNTDKRAFVETWQSFYRKKLKEVWKPAV

SEQ ID NO: 44402 - protein, 978 aa, synthetic construct
  REGION 1..978: note = engineered CasX variant
QEIKRINKIRRRLVKDSNTKKAGKTGPMKTLLVRVMTPDLRERLENLRKKPENIPQPISNTSRANLNKLLTDYTEMKKAILHVYWEEFQKDPVGLMSRVAQPASKKIDQNKLKPEMDEKGNLTTAGFACSQCGQPLFVYKLEQVSEKGKAYTNYFGRCNVAEHEKLILLAQLKPEKDSDEAVTYSLGKFGQRALDFYSIHVTKESTHPVKPLAQIAGNRYASSPVGKALSGACMGTIASFLSKYQDIIIEHQKVVKGNQKRLESLRELAGKENLEYPSVTLPPQPHTKEGVDAYNEVIARVRMWVNLNLWQKLKLSRDDAKPLLRLKGFPSFPLVERQANEVDWWDMVCNVKKLINEKKEDGKVFWQNLAGYKRQEALRPYLSSEEDRKKGKKFARTQLGDLLLHLEKKHGEDWGKVYDEAWERIDKKVEGLSKHIKLEEERRSEDAQSKAALTDWLRAKASFVIEGLKEADKDEFCRCELKLQKWYGDLRGKPFAIEAENSILDISGFSKQYNCAFIWQKDGVKKLNLYLIINYFKGGKLRFKKIKPEAFEANRFYTVINKKSGEIVPMEVNFNFDDPNLIILPLAFGKRQGREFIWNDLLSLETGSLKLANGRVIEKTLYNRRTRQDEPALFVALTFERREVLDSSNIKPMNLIGVDRGENIPAVIALTDPEGCPLSRFKDSLGNPTHILRIGESYKEKQRTIQAKKEVEQRRAGGYSRKYASKAKNLADDMVRNTARDLLYYAVTQDAMLIFENLSRGFGRQGKRTFMAERQYTRMEDWLTAKLAYEGLPSKTYLSKTLAQYTSKTCSNCGFTITSADYDRVLEKLKKTATGWMTTINGKELKVEGQITYYNRYKRQNVVKDLSVELDRLSEESVNNDISSWTKGRSGEALSLLKKRFSHRPVQEKFVCLNCGFETHADEQAALNIARSWLFLRSQEYKKYQTNKTTGNTDKRAFVETWQSFYRKKLKEVWKPAV

SEQ ID NO: 44403 - protein, 978 aa, synthetic construct
  REGION 1..978: note = engineered CasX variant
QEIKRINKIRRRLVKDSNTKKAGKTGPMKTLLVRVMTPDLRERLENLRKKPENIPQPISNTSRANLNKLLTDYTEMKKAILHVYWEEFQKDPVGLMSRVAQPASKKIDQNKLKPEMDEKGNLTTAGFACSQCGQPLFVYKLEQVSEKGKAYTNYFGRCNVAEHEKLILLAQLKPEKDSDEAVTYSLGKFGQRALDFYSIHVTKESTHPVKPLAQIAGNRYASTPVGKALSGACMGTIASFLSKYQDIIIEHQKVVKGNQKRLESLRELAGKENLEYPSVTLPPQPHTKEGVDAYNEVIARVRMWVNLNLWQKLKLSRDDAKPLLRLKGFPSFPLVERQANEVDWWDMVCNVKKLINEKKEDGKVFWQNLAGYKRQEALRPYLSSEEDRKKGKKFARTQLGDLLLHLEKKHGEDWGKVYDEAWERIDKKVEGLSKHIKLEEERRSEDAQSKAALTDWLRAKASFVIEGLKEADKDEFCRCELKLQKWYGDLRGKPFAIEAENSILDISGFSKQYNCAFIWQKDGVKKLNLYLIINYFKGGKLRFKKIKPEAFEANRFYTVINKKSGEIVPMEVNFNFDDPNLIILPLAFGKRQGREFIWNDLLSLETGSLKLANGRVIEKTLYNRRTRQDEPALFVALTFERREVLDSSNIKPMNLIGVDRGENIPAVIALTDPEGCPLSRFKDSLGNPTHILRIGESYKEKQRTIQAKKEVEQRRAGGYSRKYASKAKNLADDMVRNTARDLLYYAVTQDAMLIFENLSRGFGRQGKRTFMAERQYTRMEDWLTAKLAYEGLPSKTYLSKTLAQYTSKTCSNCGFTITSADYDRVLEKLKKTATGWMTTINGKELKVEGQITYYNRYKRQNVVKDLSVELDRLSEESVNNDISSWTKGRSGEALSLLKKRFSHRPVQEKFVCLNCGFETHADEQAALNIARSWLFLRSQEYKKYQTNKTTGNTDKRAFVETWQSFYRKKLKEVWKPAV

SEQ ID NO: 44404 - protein, 978 aa, synthetic construct
  REGION 1..978: note = engineered CasX variant
QEIKRINKIRRRLVKDSNTKKAGKTGPMKTLLVRVMTPDLRERLENLRKKPENIPQPISNTSRANLNKLLTDYTEMKKAILHVYWEEFQKDPVGLMSRVAQPASKKIDQNKLKPEMDEKGNLTTAGFACSQCGQPLFVYKLEQVSEKGKAYTNYFGRCNVAEHEKLILLAQLKPEKDSDEAVTYSLGKFGQRALDFYSIHVTKESTHPVKPLAQIAGNRYASAPVGKALSGACMGTIASFLSKYQDIIIEHQKVVKGNQKRLESLRELAGKENLEYPSVTLPPQPHTKEGVDAYNEVIARVRMWVNLNLWQKLKLSRDDAKPLLRLKGFPSFPLVERQANEVDWWDMVCNVKKLINEKKEDGKVFWQNLAGYKRQEALRPYLSSEEDRKKGKKFARTQLGDLLLHLEKKHGEDWGKVYDEAWERIDKKVEGLSKHIKLEEERRSEDAQSKAALTDWLRAKASFVIEGLKEADKDEFCRCELKLQKWYGDLRGKPFAIEAENSILDISGFSKQYNCAFIWQKDGVKKLNLYLIINYFKGGKLRFKKIKPEAFEANRFYTVINKKSGEIVPMEVNFNFDDPNLIILPLAFGKRQGREFIWNDLLSLETGSLKLANGRVIEKTLYNRRTRQDEPALFVALTFERREVLDSSNIKPMNLIGVDRGENIPAVIALTDPEGCPLSRFKDSLGNPTHILRIGESYKEKQRTIQAKKEVEQRRAGGYSRKYASKAKNLADDMVRNTARDLLYYAVTQDAMLIFENLSRGFGRQGKRTFMAERQYTRMEDWLTAKLAYEGLPSKTYLSKTLAQYTSKTCSNCGFTITSADYDRVLEKLKKTATGWMTTINGKELKVEGQITYYNRYKRQNVVKDLSVELDRLSEESVNNDISSWTKGRSGEALSLLKKRFSHRPVQEKFVCLNCGFETHADEQAALNIARSWLFLRSQEYKKYQTNKTTGNTDKRAFVETWQSFYRKKLKEVWKPAV

SEQ ID NO: 44405 - protein, 978 aa, synthetic construct
  REGION 1..978: note = engineered CasX variant
QEIKRINKIRRRLVKDSNTKKAGKTGPMKTLLVRVMTPDLRERLENLRKKPENIPQPISNTSRANLNKLLTDYTEMKKAILHVYWEEFQKDPVGLMSRVAQPASKKIDQNKLKPEMDEKGNLTTAGFACSQCGQPLFVYKLEQVSEKGKAYTNYFGRCNVAEHEKLILLAQLKPEKDSDEAVTYSLGKFGQRALDFYSIHVTKESTHPVKPLAQIAGNRYASVPVGKALSGACMGTIASFLSKYQDIIIEHQKVVKGNQKRLESLRELAGKENLEYPSVTLPPQPHTKEGVDAYNEVIARVRMWVNLNLWQKLKLSRDDAKPLLRLKGFPSFPLVERQANEVDWWDMVCNVKKLINEKKEDGKVFWQNLAGYKRQEALRPYLSSEEDRKKGKKFARTQLGDLLLHLEKKHGEDWGKVYDEAWERIDKKVEGLSKHIKLEEERRSEDAQSKAALTDWLRAKASFVIEGLKEADKDEFCRCELKLQKWYGDLRGKPFAIEAENSILDISGFSKQYNCAFIWQKDGVKKLNLYLIINYFKGGKLRFKKIKPEAFEANRFYTVINKKSGEIVPMEVNFNFDDPNLIILPLAFGKRQGREFIWNDLLSLETGSLKLANGRVIEKTLYNRRTRQDEPALFVALTFERREVLDSSNIKPMNLIGVDRGENIPAVIALTDPEGCPLSRFKDSLGNPTHILRIGESYKEKQRTIQAKKEVEQRRAGGYSRKYASKAKNLADDMVRNTARDLLYYAVTQDAMLIFENLSRGFGRQGKRTFMAERQYTRMEDWLTAKLAYEGLPSKTYLSKTLAQYTSKTCSNCGFTITSADYDRVLEKLKKTATGWMTTINGKELKVEGQITYYNRYKRQNVVKDLSVELDRLSEESVNNDISSWTKGRSGEALSLLKKRFSHRPVQEKFVCLNCGFETHADEQAALNIARSWLFLRSQEYKKYQTNKTTGNTDKRAFVETWQSFYRKKLKEVWKPAV

SEQ ID NO: 44406 - protein, 978 aa, synthetic construct
  REGION 1..978: note = engineered CasX variant
QEIKRINKIRRRLVKDSNTKKAGKTGPMKTLLVRVMTPDLRERLENLRKKPENIPQPISNTSRANLNKLLTDYTEMKKAILHVYWEEFQKDPVGLMSRVAQPASKKIDQNKLKPEMDEKGNLTTAGFACSQCGQPLFVYKLEQVSEKGKAYTNYFGRCNVAEHEKLIKLAQLKPEKDSDEAVTYSLGKFGQRALDFYSIHVTKESTHPVKPLAQIAGNRYASGPVGKALSGACMGTIASFLSKYQDIIIEHQKVVKGNQKRLESLRELAGKENLEYPSVTLPPQPHTKEGVDAYNEVIARVRMWVNLNLWQKLKLSRDDAKPLLRLKGFPSFPLVERQANEVDWWDMVCNVKKLINEKKEDGKVFWQNLAGYKRQEALRPYLSSEEDRKKGKKFARTQLGDLLLHLEKKHGEDWGKVYDEAWERIDKKVEGLSKHIKLEEERRSEDAQSKAALTDWLRAKASFVIEGLKEADKDEFCRCELKLQKWYGDLRGKPFAIEAENSILDISGFSKQYNCAFIWQKDGVKKLNLYLIINYFKGGKLRFKKIKPEAFEANRFYTVINKKSGEIVPMEVNFNFDDPNLIILPLAFGKRQGREFIWNDLLSLETGSLKLANGRVIEKTLYNRRTRQDEPALFVALTFERREVLDSSNIKPMNLIGVDRGENIPAVIALTDPEGCPLSRFKDSLGNPTHILRIGESYKEKQRTIQAKKEVEQRRAGGYSRKYASKAKNLADDMVRNTARDLLYYAVTQDAMLIFENLSRGFGRQGKRTFMAERQYTRMEDWLTAKLAYEGLPSKTYLSKTLAQYTSKTCSNCGFTITSADYDRVLEKLKKTATGWMTTINGKELKVEGQITYYNRYKRQNVVKDLSVELDRLSEESVNNDISSWTKGRSGEALSLLKKRFSHRPVQEKFVCLNCGFETHADEQAALNIARSWLFLRSQEYKKYQTNKTTGNTDKRAFVETWQSFYRKKLKEVWKPAV

SEQ ID NO: 44407 - protein, 977 aa, synthetic construct
  REGION 1..977: note = engineered CasX variant
QEIKRINKIRRRLVKDSNTKKAGKTGPMKTLLVRVMTPDLRERLENLRKKPENIPQPISNTSRANLNKLLTDYTEMKKAILHVYWEEFQKDPVGLMSRVAQPASKKIDQNKLKPEMDEKGNLTTAGFACSQCGQPLFVYKLEQVSEKGKAYTNYFGRCNVAEHEKLILLAQLKPEKDSDEAVTYSLGKFGQRALDFYSIHVTKESTHPVKPLAQIAGNRYASPVGKALSGACMGTIASFLSKYQDIIIEHQKVVKGNQKRLESLRELAGKENLEYPSVTLPPQPHTKEGVDAYNEVIARVRMWVNLNLWQKLKLSRDDAKPLLRLKGFPSFPLVERQANEVDWWDMVCNVKKLINEKKEDGKVFWQNLAGYKRQEALRPYLSSEEDRKKGKKFARTQLGDLLLHLEKKHGEDWGKVYDEAWERIDKKVEGLSKHIKLEEERRSEDAQSKAALTDWLRAKASFVIEGLKEADKDEFCRCELKLQKWYGDLRGKPFAIEAENSILDISGFSKQYNCAFIWQKDGVKKLNLYLIINYFKGGKLRFKKIKPEAFEANRFYTVINKKSGEIVPMEVNFNFDDPNLIILPLAFGKRQGREFIWNDLLSLETGSLKLANGRVIEKTLYNRRTRQDEPALFVALTFERREVLDSSNIKPMNLIGVDRGENIPAVIALTDPEGCPLSRFKDSLGNPTHILRIGESYKEKQRTIQAKKEVEQRRAGGYSRKYASKAKNLADDMVRNTARDLLYYAVTQDAMLIFENLSRGFGRQGKRTFMAERQYTRMEDWLTAKLAYEGLPSKTYLSKTLAQYTSKTCSNCGFTITSADYDRVLEKLKKTATGWMTTINGKELKVEGQITYYNRYKRQNVVKDLSVELDRLSEESVNNDISSWTKGRSGEALSLLKKRFSHRPVQEKFVCLNCGFETHADEQAALNIARSWLFLRSQEYKKYQTNKTTGNTDKRAFVETWQSFYRKKLKEVWKPAV

SEQ ID NO: 44408 - protein, 978 aa, synthetic construct
  REGION 1..978: note = engineered CasX variant
QEIKRINKIRRRLVKDSNTKKAGKTGPMKTLLVRVMTPDLRERLENLRKKPENIPQPISNTSRANLNKLLTDYTEMKKAILHVYWEEFQKDPVGLMSRVAQPASKKIDQNKLKPEMDEKGNLTTAGFACSQCGQPLFVYKLEQVSEKGKAYTNYFGRCNVAEHEKLILLAQLKPEKDSDEAVTYSLGKFGQRALDFYSIHVTKESTHPVKPLAQIAGNRYASYPVGKALSDACMGTIASFLSKYQDIIIEHQKVVKGNQKRLESLRELAGKENLEYPSVTLPPQPHTKEGVDAYNEVIARVRMWVNLNLWQKLKLSRDDAKPLLRLKNFPSFPLVERQANEVDWWDMVCNVKKLINEKKEDGKVFWQNLAGYKRQEALRPYLSSEEDRKKGKKFARTQLGDLLLHLEKKHGEDWGKVYDEAWERIDKKVEGLSKHIKLEEERRSEDAQSKAALTDWLRAKASFVIEGLKEADKDEFCRCELKLQKWYGDLRGKPFAIEAENSILDISGFSKQYNCAFIWQKDGVKKLNLYLIINYFKGGKLRFKKIKPEAFEANRFYTVINKKSGEIVPMEVNFNFDDPNLIILPLAFGKRQGREFIWNDLLSLETGSLKLANGRVIEKTLYNRRTRQDEPALFVALTFERREVLDSSNIKPMNLIGVDRGENIPAVIALTDPEGCPLSRFKDSLGNPTHILRIGESYKEKQRTIQAKKEVEQRRAGGYSRKYASKAKNLADDMVRNTARDLLYYAVTQDAMLIFENLSRGFGRQGKRTFMAERQYTRMEDWLTAKLAYEGLPSKTYLSKTLAQYTSKTCSNCGFTITSADYDRVLEKLKKTATGWMTTINGKELKVEGQITYYNRYKRQNVVKDLSVELDRLSEESVNNDISSWTKGRSGEALSLLKKRFSHRPVQEKFVCLNCGFETHADEQAALNIARSWLFLRSQEYKKYQTNKTTGNTDKRAFVETWQSFYRKKLKEVWKPAV

SEQ ID NO: 44409 - protein, 978 aa, synthetic construct
  REGION 1..978: note = engineered CasX variant
QEIKRINKIRRRLVKDSNTKKAGKTGPMKTLLVRVMTPDLRERLENLRKKPENIPQPISNTSRANLNKLLTDYTEMKKAILHVYWEEFQKDPVGLMSRVAQPASKKIDQNKLKPEMDEKGNLTTAGFACSQCGQPLFVYKLEQVSEKGKAYTNYFGRCNVAEHEKLILLAQLKPEKDSDEAVTYSLGKFGQRALDFYSIHVTKESTHPVKPLAQIAGNRYASHPVGKALSDACMGTIASFLSKYQDIIIEHQKVVKGNQKRLESLRELAGKENLEYPSVTLPPQPHTKEGVDAYNEVIARVRMWVNLNLWQKLKLSRDDAKPLLRLKNFPSFPLVERQANEVDWWDMVCNVKKLINEKKEDGKVFWQNLAGYKRQEALRPYLSSEEDRKKGKKFARTQLGDLLLHLEKKHGEDWGKVYDEAWERIDKKVEGLSKHIKLEEERRSEDAQSKAALTDWLRAKASFVIEGLKEADKDEFCRCELKLQKWYGDLRGKPFAIEAENSILDISGFSKQYNCAFIWQKDGVKKLNLYLIINYFKGGKLRFKKIKPEAFEANRFYTVINKKSGEIVPMEVNFNFDDPNLIILPLAFGKRQGREFIWNDLLSLETGSLKLANGRVIEKTLYNRRTRQDEPALFVALTFERREVLDSSNIKPMNLIGVDRGENIPAVIALTDPEGCPLSRFKDSLGNPTHILRIGESYKEKQRTIQAKKEVEQRRAGGYSRKYASKAKNLADDMVRNTARDLLYYAVTQDAMLIFENLSRGFGRQGKRTFMAERQYTRMEDWLTAKLAYEGLPSKTYLSKTLAQYTSKTCSNCGFTITSADYDRVLEKLKKTATGWMTTINGKELKVEGQITYYNRYKRQNVVKDLSVELDRLSEESVNNDISSWTKGRSGEALSLLKKRFSHRPVQEKFVCLNCGFETHADEQAALNIARSWLFLRSQEYKKYQTNKTTGNTDKRAFVETWQSFYRKKLKEVWKPAV

SEQ ID NO: 44410 - protein, 978 aa, synthetic construct
  REGION 1..978: note = engineered CasX variant
QEIKRINKIRRRLVKDSNTKKAGKTGPMKTLLVRVMTPDLRERLENLRKKPENIPQPISNTSRANLNKLLTDYTEMKKAILHVYWEEFQKDPVGLMSRVAQPASKKIDQNKLKPEMDEKGNLTTAGFACSQCGQPLFVYKLEQVSEKGKAYTNYFGRCNVAEHEKLILLAQLKPEKDSDEAVTYSLGKFGQRALDFYSIHVTKESTHPVKPLAQIAGNRYASSPVGKALSDACMGTIASFLSKYQDIIIEHQKVVKGNQKRLESLRELAGKENLEYPSVTLPPQPHTKEGVDAYNEVIARVRMWVNLNLWQKLKLSRDDAKPLLRLKNFPSFPLVERQANEVDWWDMVCNVKKLINEKKEDGKVFWQNLAGYKRQEALRPYLSSEEDRKKGKKFARTQLGDLLLHLEKKHGEDWGKVYDEAWERIDKKVEGLSKHIKLEEERRSEDAQSKAALTDWLRAKASFVIEGLKEADKDEFCRCELKLQKWYGDLRGKPFAIEAENSILDISGFSKQYNCAFIWQKDGVKKLNLYLIINYFKGGKLRFKKIKPEAFEANRFYTVINKKSGEIVPMEVNFNFDDPNLIILPLAFGKRQGREFIWNDLLSLETGSLKLANGRVIEKTLYNRRTRQDEPALFVALTFERREVLDSSNIKPMNLIGVDRGENIPAVIALTDPEGCPLSRFKDSLGNPTHILRIGESYKEKQRTIQAKKEVEQRRAGGYSRKYASKAKNLADDMVRNTARDLLYYAVTQDAMLIFENLSRGFGRQGKRTFMAERQYTRMEDWLTAKLAYEGLPSKTYLSKTLAQYTSKTCSNCGFTITSADYDRVLEKLKKTATGWMTTINGKELKVEGQITYYNRYKRQNVVKDLSVELDRLSEESVNNDISSWTKGRSGEALSLLKKRFSHRPVQEKFVCLNCGFETHADEQAALNIARSWLFLRSQEYKKYQTNKTTGNTDKRAFVETWQSFYRKKLKEVWKPAV

SEQ ID NO: 44411 - protein, 978 aa, synthetic construct
  REGION 1..978: note = engineered CasX variant
QEIKRINKIRRRLVKDSNTKKAGKTGPMKTLLVRVMTPDLRERLENLRKKPENIPQPISNTSRANLNKLLTDYTEMKKAILHVYWEEFQKDPVGLMSRVAQPASKKIDQNKLKPEMDEKGNLTTAGFACSQCGQPLFVYKLEQVSEKGKAYTNYFGRCNVAEHEKLILLAQLKPEKDSDEAVTYSLGKFGQRALDFYSIHVTKESTHPVKPLAQIAGNRYASTPVGKALSDACMGTIASFLSKYQDIIIEHQKVVKGNQKRLESLRELAGKENLEYPSVTLPPQPHTKEGVDAYNEVIARVRMWVNLNLWQKLKLSRDDAKPLLRLKNFPSFPLVERQANEVDWWDMVCNVKKLINEKKEDGKVFWQNLAGYKRQEALRPYLSSEEDRKKGKKFARTQLGDLLLHLEKKHGEDWGKVYDEAWERIDKKVEGLSKHIKLEEERRSEDAQSKAALTDWLRAKASFVIEGLKEADKDEFCRCELKLQKWYGDLRGKPFAIEAENSILDISGFSKQYNCAFIWQKDGVKKLNLYLIINYFKGGKLRFKKIKPEAFEANRFYTVINKKSGEIVPMEVNFNFDDPNLIILPLAFGKRQGREFIWNDLLSLETGSLKLANGRVIEKTLYNRRTRQDEPALFVALTFERREVLDSSNIKPMNLIGVDRGENIPAVIALTDPEGCPLSRFKDSLGNPTHILRIGESYKEKQRTIQAKKEVEQRRAGGYSRKYASKAKNLADDMVRNTARDLLYYAVTQDAMLIFENLSRGFGRQGKRTFMAERQYTRMEDWLTAKLAYEGLPSKTYLSKTLAQYTSKTCSNCGFTITSADYDRVLEKLKKTATGWMTTINGKELKVEGQITYYNRYKRQNVVKDLSVELDRLSEESVNNDISSWTKGRSGEALSLLKKRFSHRPVQEKFVCLNCGFETHADEQAALNIARSWLFLRSQEYKKYQTNKTTGNTDKRAFVETWQSFYRKKLKEVWKPAV

SEQ ID NO: 44412 - protein, 978 aa, synthetic construct
  REGION 1..978: note = engineered CasX variant
QEIKRINKIRRRLVKDSNTKKAGKTGPMKTLLVRVMTPDLRERLENLRKKPENIPQPISNTSRANLNKLLTDYTEMKKAILHVYWEEFQKDPVGLMSRVAQPASKKIDQNKLKPEMDEKGNLTTAGFACSQCGQPLFVYKLEQVSEKGKAYTNYFGRCNVAEHEKLILLAQLKPEKDSDEAVTYSLGKFGQRALDFYSIHVTKESTHPVKPLAQIAGNRYASAPVGKALSDACMGTIASFLSKYQDIIIEHQKVVKGNQKRLESLRELAGKENLEYPSVTLPPQPHTKEGVDAYNEVIARVRMWVNLNLWQKLKLSRDDAKPLLRLKNFPSFPLVERQANEVDWWDMVCNVKKLINEKKEDGKVFWQNLAGYKRQEALRPYLSSEEDRKKGKKFARTQLGDLLLHLEKKHGEDWGKVYDEAWERIDKKVEGLSKHIKLEEERRSEDAQSKAALTDWLRAKASFVIEGLKEADKDEFCRCELKLQKWYGDLRGKPFAIEAENSILDISGFSKQYNCAFIWQKDGVKKLNLYLIINYFKGGKLRFKKIKPEAFEANRFYTVINKKSGEIVPMEVNFNFDDPNLIILPLAFGKRQGREFIWNDLLSLETGSLKLANGRVIEKTLYNRRTRQDEPALFVALTFERREVLDSSNIKPMNLIGVDRGENIPAVIALTDPEGCPLSRFKDSLGNPTHILRIGESYKEKQRTIQAKKEVEQRRAGGYSRKYASKAKNLADDMVRNTARDLLYYAVTQDAMLIFENLSRGFGRQGKRTFMAERQYTRMEDWLTAKLAYEGLPSKTYLSKTLAQYTSKTCSNCGFTITSADYDRVLEKLKKTATGWMTTINGKELKVEGQITYYNRYKRQNVVKDLSVELDRLSEESVNNDISSWTKGRSGEALSLLKKRFSHRPVQEKFVCLNCGFETHADEQAALNIARSWLFLRSQEYKKYQTNKTTGNTDKRAFVETWQSFYRKKLKEVWKPAV

SEQ ID NO: 44413 - protein, 978 aa, synthetic construct
  REGION 1..978: note = engineered CasX variant
QEIKRINKIRRRLVKDSNTKKAGKTGPMKTLLVRVMTPDLRERLENLRKKPENIPQPISNTSRANLNKLLTDYTEMKKAILHVYWEEFQKDPVGLMSRVAQPASKKIDQNKLKPEMDEKGNLTTAGFACSQCGQPLFVYKLEQVSEKGKAYTNYFGRCNVAEHEKLILLAQLKPEKDSDEAVTYSLGKFGQRALDFYSIHVTKESTHPVKPLAQIAGNRYASVPVGKALSDACMGTIASFLSKYQDIIIEHQKVVKGNQKRLESLRELAGKENLEYPSVTLPPQPHTKEGVDAYNEVIARVRMWVNLNLWQKLKLSRDDAKPLLRLKNFPSFPLVERQANEVDWWDMVCNVKKLINEKKEDGKVFWQNLAGYKRQEALRPYLSSEEDRKKGKKFARTQLGDLLLHLEKKHGEDWGKVYDEAWERIDKKVEGLSKHIKLEEERRSEDAQSKAALTDWLRAKASFVIEGLKEADKDEFCRCELKLQKWYGDLRGKPFAIEAENSILDISGFSKQYNCAFIWQKDGVKKLNLYLIINYFKGGKLRFKKIKPEAFEANRFYTVINKKSGEIVPMEVNFNFDDPNLIILPLAFGKRQGREFIWNDLLSLETGSLKLANGRVIEKTLYNRRTRQDEPALFVALTFERREVLDSSNIKPMNLIGVDRGENIPAVIALTDPEGCPLSRFKDSLGNPTHILRIGESYKEKQRTIQAKKEVEQRRAGGYSRKYASKAKNLADDMVRNTARDLLYYAVTQDAMLIFENLSRGFGRQGKRTFMAERQYTRMEDWLTAKLAYEGLPSKTYLSKTLAQYTSKTCSNCGFTITSADYDRVLEKLKKTATGWMTTINGKELKVEGQITYYNRYKRQNVVKDLSVELDRLSEESVNNDISSWTKGRSGEALSLLKKRFSHRPVQEKFVCLNCGFETHADEQAALNIARSWLFLRSQEYKKYQTNKTTGNTDKRAFVETWQSFYRKKLKEVWKPAV

SEQ ID NO: 44414 - protein, 978 aa, synthetic construct
  REGION 1..978: note = engineered CasX variant
QEIKRINKIRRRLVKDSNTKKAGKTGPMKTLLVRVMTPDLRERLENLRKKPENIPQPISNTSRANLNKLLTDYTEMKKAILHVYWEEFQKDPVGLMSRVAQPASKKIDQNKLKPEMDEKGNLTTAGFACSQCGQPLFVYKLEQVSEKGKAYTNYFGRCNVAEHEKLIKLAQLKPEKDSDEAVTYSLGKFGQRALDFYSIHVTKESTHPVKPLAQIAGNRYASGPVGKALSDACMGTIASFLSKYQDIIIEHQKVVKGNQKRLESLRELAGKENLEYPSVTLPPQPHTKEGVDAYNEVIARVRMWVNLNLWQKLKLSRDDAKPLLRLKNFPSFPLVERQANEVDWWDMVCNVKKLINEKKEDGKVFWQNLAGYKRQEALRPYLSSEEDRKKGKKFARTQLGDLLLHLEKKHGEDWGKVYDEAWERIDKKVEGLSKHIKLEEERRSEDAQSKAALTDWLRAKASFVIEGLKEADKDEFCRCELKLQKWYGDLRGKPFAIEAENSILDISGFSKQYNCAFIWQKDGVKKLNLYLIINYFKGGKLRFKKIKPEAFEANRFYTVINKKSGEIVPMEVNFNFDDPNLIILPLAFGKRQGREFIWNDLLSLETGSLKLANGRVIEKTLYNRRTRQDEPALFVALTFERREVLDSSNIKPMNLIGVDRGENIPAVIALTDPEGCPLSRFKDSLGNPTHILRIGESYKEKQRTIQAKKEVEQRRAGGYSRKYASKAKNLADDMVRNTARDLLYYAVTQDAMLIFENLSRGFGRQGKRTFMAERQYTRMEDWLTAKLAYEGLPSKTYLSKTLAQYTSKTCSNCGFTITSADYDRVLEKLKKTATGWMTTINGKELKVEGQITYYNRYKRQNVVKDLSVELDRLSEESVNNDISSWTKGRSGEALSLLKKRFSHRPVQEKFVCLNCGFETHADEQAALNIARSWLFLRSQEYKKYQTNKTTGNTDKRAFVETWQSFYRKKLKEVWKPAV

SEQ ID NO: 44415 - protein, 977 aa, synthetic construct
  REGION 1..977: note = engineered CasX variant
QEIKRINKIRRRLVKDSNTKKAGKTGPMKTLLVRVMTPDLRERLENLRKKPENIPQPISNTSRANLNKLLTDYTEMKKAILHVYWEEFQKDPVGLMSRVAQPASKKIDQNKLKPEMDEKGNLTTAGFACSQCGQPLFVYKLEQVSEKGKAYTNYFGRCNVAEHEKLILLAQLKPEKDSDEAVTYSLGKFGQRALDFYSIHVTKESTHPVKPLAQIAGNRYASPVGKALSDACMGTIASFLSKYQDIIIEHQKVVKGNQKRLESLRELAGKENLEYPSVTLPPQPHTKEGVDAYNEVIARVRMWVNLNLWQKLKLSRDDAKPLLRLKNFPSFPLVERQANEVDWWDMVCNVKKLINEKKEDGKVFWQNLAGYKRQEALRPYLSSEEDRKKGKKFARTQLGDLLLHLEKKHGEDWGKVYDEAWERIDKKVEGLSKHIKLEEERRSEDAQSKAALTDWLRAKASFVIEGLKEADKDEFCRCELKLQKWYGDLRGKPFAIEAENSILDISGFSKQYNCAFIWQKDGVKKLNLYLIINYFKGGKLRFKKIKPEAFEANRFYTVINKKSGEIVPMEVNFNFDDPNLIILPLAFGKRQGREFIWNDLLSLETGSLKLANGRVIEKTLYNRRTRQDEPALFVALTFERREVLDSSNIKPMNLIGVDRGENIPAVIALTDPEGCPLSRFKDSLGNPTHILRIGESYKEKQRTIQAKKEVEQRRAGGYSRKYASKAKNLADDMVRNTARDLLYYAVTQDAMLIFENLSRGFGRQGKRTFMAERQYTRMEDWLTAKLAYEGLPSKTYLSKTLAQYTSKTCSNCGFTITSADYDRVLEKLKKTATGWMTTINGKELKVEGQITYYNRYKRQNVVKDLSVELDRLSEESVNNDISSWTKGRSGEALSLLKKRFSHRPVQEKFVCLNCGFETHADEQAALNIARSWLFLRSQEYKKYQTNKTTGNTDKRAFVETWQSFYRKKLKEVWKPAV

SEQ ID NO: 44416 - protein, 978 aa, synthetic construct
  REGION 1..978: note = engineered CasX variant
QEIKRINKIRRRLVKDSNTKKAGKTGPMKTLLVRVMTPDLRERLENLRKKPENIPQPISNTSRANLNKLLTDYTEMKKAILHVYWEEFQKDPVGLMSRVAQPASKKIDQNKLKPEMDEKGNLTTAGFACSQCGQPLFVYKLEQVSEKGKAYTNYFGRCNVAEHEKLILLAQLKPEKDSDEAVTYSLGKFGQRALDFYSIHVTKESTHPVKPLAQIAGNRYASYPVGKALSDACMGTIASFLSKYQDIIIEHQKVVKGNQKRLESLRELAGKENLEYPSVTLPPQPHTKEGVDAYNEVIARVRMWVNLNLWQKLKLSRDDAKPLLRLKGFPSFPLVERQANEVDWWDMVCNVKKLINEKKEDGKVFWQNLAGYKRQEALRPYLSSEEDRKKGKKFARTQLGDLLNHLEKKHGEDWGKVYDEAWERIDKKVEGLSKHIKLEEERRSEDAQSKAALTDWLRAKASFVIEGLKEADKDEFCRCELKLQKWYGDLRGKPFAIEAENSILDISGFSKQYNCAFIWQKDGVKKLNLYLIINYFKGGKLRFKKIKPEAFEANRFYTVINKKSGEIVPMEVNFNFDDPNLIILPLAFGKRQGREFIWNDLLSLETGSLKLANGRVIEKTLYNRRTRQDEPALFVALTFERREVLDSSNIKPMNLIGVDRGENIPAVIALTDPEGCPLSRFKDSLGNPTHILRIGESYKEKQRTIQAKKEVEQRRAGGYSRKYASKAKNLADDMVRNTARDLLYYAVTQDAMLIFENLSRGFGRQGKRTFMAERQYTRMEDWLTAKLAYEGLPSKTYLSKTLAQYTSKTCSNCGFTITSADYDRVLEKLKKTATGWMTTINGKELKVEGQITYYNRYKRQNVVKDLSVELDRLSEESVNNDISSWTKGRSGEALSLLKKRFSHRPVQEKFVCLNCGFETHADEQAALNIARSWLFLRSQEYKKYQTNKTTGNTDKRAFVETWQSFYRKKLKEVWKPAV

SEQ ID NO: 44417 - protein, 978 aa, synthetic construct
  REGION 1..978: note = engineered CasX variant
QEIKRINKIRRRLVKDSNTKKAGKTGPMKTLLVRVMTPDLRERLENLRKKPENIPQPISNTSRANLNKLLTDYTEMKKAILHVYWEEFQKDPVGLMSRVAQPASKKIDQNKLKPEMDEKGNLTTAGFACSQCGQPLFVYKLEQVSEKGKAYTNYFGRCNVAEHEKLILLAQLKPEKDSDEAVTYSLGKFGQRALDFYSIHVTKESTHPVKPLAQIAGNRYASHPVGKALSDACMGTIASFLSKYQDIIIEHQKVVKGNQKRLESLRELAGKENLEYPSVTLPPQPHTKEGVDAYNEVIARVRMWVNLNLWQKLKLSRDDAKPLLRLKGFPSFPLVERQANEVDWWDMVCNVKKLINEKKEDGKVFWQNLAGYKRQEALRPYLSSEEDRKKGKKFARTQLGDLLNHLEKKHGEDWGKVYDEAWERIDKKVEGLSKHIKLEEERRSEDAQSKAALTDWLRAKASFVIEGLKEADKDEFCRCELKLQKWYGDLRGKPFAIEAENSILDISGFSKQYNCAFIWQKDGVKKLNLYLIINYFKGGKLRFKKIKPEAFEANRFYTVINKKSGEIVPMEVNFNFDDPNLIILPLAFGKRQGREFIWNDLLSLETGSLKLANGRVIEKTLYNRRTRQDEPALFVALTFERREVLDSSNIKPMNLIGVDRGENIPAVIALTDPEGCPLSRFKDSLGNPTHILRIGESYKEKQRTIQAKKEVEQRRAGGYSRKYASKAKNLADDMVRNTARDLLYYAVTQDAMLIFENLSRGFGRQGKRTFMAERQYTRMEDWLTAKLAYEGLPSKTYLSKTLAQYTSKTCSNCGFTITSADYDRVLEKLKKTATGWMTTINGKELKVEGQITYYNRYKRQNVVKDLSVELDRLSEESVNNDISSWTKGRSGEALSLLKKRFSHRPVQEKFVCLNCGFETHADEQAALNIARSWLFLRSQEYKKYQTNKTTGNTDKRAFVETWQSFYRKKLKEVWKPAV

SEQ ID NO: 44418 - protein, 978 aa, synthetic construct
  REGION 1..978: note = engineered CasX variant
QEIKRINKIRRRLVKDSNTKKAGKTGPMKTLLVRVMTPDLRERLENLRKKPENIPQPISNTSRANLNKLLTDYTEMKKAILHVYWEEFQKDPVGLMSRVAQPASKKIDQNKLKPEMDEKGNLTTAGFACSQCGQPLFVYKLEQVSEKGKAYTNYFGRCNVAEHEKLILLAQLKPEKDSDEAVTYSLGKFGQRALDFYSIHVTKESTHPVKPLAQIAGNRYASSPVGKALSDACMGTIASFLSKYQDIIIEHQKVVKGNQKRLESLRELAGKENLEYPSVTLPPQPHTKEGVDAYNEVIARVRMWVNLNLWQKLKLSRDDAKPLLRLKGFPSFPLVERQANEVDWWDMVCNVKKLINEKKEDGKVFWQNLAGYKRQEALRPYLSSEEDRKKGKKFARTQLGDLLNHLEKKHGEDWGKVYDEAWERIDKKVEGLSKHIKLEEERRSEDAQSKAALTDWLRAKASFVIEGLKEADKDEFCRCELKLQKWYGDLRGKPFAIEAENSILDISGFSKQYNCAFIWQKDGVKKLNLYLIINYFKGGKLRFKKIKPEAFEANRFYTVINKKSGEIVPMEVNFNFDDPNLIILPLAFGKRQGREFIWNDLLSLETGSLKLANGRVIEKTLYNRRTRQDEPALFVALTFERREVLDSSNIKPMNLIGVDRGENIPAVIALTDPEGCPLSRFKDSLGNPTHILRIGESYKEKQRTIQAKKEVEQRRAGGYSRKYASKAKNLADDMVRNTARDLLYYAVTQDAMLIFENLSRGFGRQGKRTFMAERQYTRMEDWLTAKLAYEGLPSKTYLSKTLAQYTSKTCSNCGFTITSADYDRVLEKLKKTATGWMTTINGKELKVEGQITYYNRYKRQNVVKDLSVELDRLSEESVNNDISSWTKGRSGEALSLLKKRFSHRPVQEKFVCLNCGFETHADEQAALNIARSWLFLRSQEYKKYQTNKTTGNTDKRAFVETWQSFYRKKLKEVWKPAV

SEQ ID NO: 44419 - protein, 978 aa, synthetic construct
  REGION 1..978: note = engineered CasX variant
QEIKRINKIRRRLVKDSNTKKAGKTGPMKTLLVRVMTPDLRERLENLRKKPENIPQPISNTSRANLNKLLTDYTEMKKAILHVYWEEFQKDPVGLMSRVAQPASKKIDQNKLKPEMDEKGNLTTAGFACSQCGQPLFVYKLEQVSEKGKAYTNYFGRCNVAEHEKLILLAQLKPEKDSDEAVTYSLGKFGQRALDFYSIHVTKESTHPVKPLAQIAGNRYASTPVGKALSDACMGTIASFLSKYQDIIIEHQKVVKGNQKRLESLRELAGKENLEYPSVTLPPQPHTKEGVDAYNEVIARVRMWVNLNLWQKLKLSRDDAKPLLRLKGFPSFPLVERQANEVDWWDMVCNVKKLINEKKEDGKVFWQNLAGYKRQEALRPYLSSEEDRKKGKKFARTQLGDLLNHLEKKHGEDWGKVYDEAWERIDKKVEGLSKHIKLEEERRSEDAQSKAALTDWLRAKASFVIEGLKEADKDEFCRCELKLQKWYGDLRGKPFAIEAENSILDISGFSKQYNCAFIWQKDGVKKLNLYLIINYFKGGKLRFKKIKPEAFEANRFYTVINKKSGEIVPMEVNFNFDDPNLIILPLAFGKRQGREFIWNDLLSLETGSLKLANGRVIEKTLYNRRTRQDEPALFVALTFERREVLDSSNIKPMNLIGVDRGENIPAVIALTDPEGCPLSRFKDSLGNPTHILRIGESYKEKQRTIQAKKEVEQRRAGGYSRKYASKAKNLADDMVRNTARDLLYYAVTQDAMLIFENLSRGFGRQGKRTFMAERQYTRMEDWLTAKLAYEGLPSKTYLSKTLAQYTSKTCSNCGFTITSADYDRVLEKLKKTATGWMTTINGKELKVEGQITYYNRYKRQNVVKDLSVELDRLSEESVNNDISSWTKGRSGEALSLLKKRFSHRPVQEKFVCLNCGFETHADEQAALNIARSWLFLRSQEYKKYQTNKTTGNTDKRAFVETWQSFYRKKLKEVWKPAV

SEQ ID NO: 44420 - protein, 978 aa, synthetic construct
  REGION 1..978: note = engineered CasX variant
QEIKRINKIRRRLVKDSNTKKAGKTGPMKTLLVRVMTPDLRERLENLRKKPENIPQPISNTSRANLNKLLTDYTEMKKAILHVYWEEFQKDPVGLMSRVAQPASKKIDQNKLKPEMDEKGNLTTAGFACSQCGQPLFVYKLEQVSEKGKAYTNYFGRCNVAEHEKLILLAQLKPEKDSDEAVTYSLGKFGQRALDFYSIHVTKESTHPVKPLAQIAGNRYASAPVGKALSDACMGTIASFLSKYQDIIIEHQKVVKGNQKRLESLRELAGKENLEYPSVTLPPQPHTKEGVDAYNEVIARVRMWVNLNLWQKLKLSRDDAKPLLRLKGFPSFPLVERQANEVDWWDMVCNVKKLINEKKEDGKVFWQNLAGYKRQEALRPYLSSEEDRKKGKKFARTQLGDLLNHLEKKHGEDWGKVYDEAWERIDKKVEGLSKHIKLEEERRSEDAQSKAALTDWLRAKASFVIEGLKEADKDEFCRCELKLQKWYGDLRGKPFAIEAENSILDISGFSKQYNCAFIWQKDGVKKLNLYLIINYFKGGKLRFKKIKPEAFEANRFYTVINKKSGEIVPMEVNFNFDDPNLIILPLAFGKRQGREFIWNDLLSLETGSLKLANGRVIEKTLYNRRTRQDEPALFVALTFERREVLDSSNIKPMNLIGVDRGENIPAVIALTDPEGCPLSRFKDSLGNPTHILRIGESYKEKQRTIQAKKEVEQRRAGGYSRKYASKAKNLADDMVRNTARDLLYYAVTQDAMLIFENLSRGFGRQGKRTFMAERQYTRMEDWLTAKLAYEGLPSKTYLSKTLAQYTSKTCSNCGFTITSADYDRVLEKLKKTATGWMTTINGKELKVEGQITYYNRYKRQNVVKDLSVELDRLSEESVNNDISSWTKGRSGEALSLLKKRFSHRPVQEKFVCLNCGFETHADEQAALNIARSWLFLRSQEYKKYQTNKTTGNTDKRAFVETWQSFYRKKLKEVWKPAV

SEQ ID NO: 44421 - protein, 978 aa, synthetic construct
  REGION 1..978: note = engineered CasX variant
QEIKRINKIRRRLVKDSNTKKAGKTGPMKTLLVRVMTPDLRERLENLRKKPENIPQPISNTSRANLNKLLTDYTEMKKAILHVYWEEFQKDPVGLMSRVAQPASKKIDQNKLKPEMDEKGNLTTAGFACSQCGQPLFVYKLEQVSEKGKAYTNYFGRCNVAEHEKLILLAQLKPEKDSDEAVTYSLGKFGQRALDFYSIHVTKESTHPVKPLAQIAGNRYASVPVGKALSDACMGTIASFLSKYQDIIIEHQKVVKGNQKRLESLRELAGKENLEYPSVTLPPQPHTKEGVDAYNEVIARVRMWVNLNLWQKLKLSRDDAKPLLRLKGFPSFPLVERQANEVDWWDMVCNVKKLINEKKEDGKVFWQNLAGYKRQEALRPYLSSEEDRKKGKKFARTQLGDLLNHLEKKHGEDWGKVYDEAWERIDKKVEGLSKHIKLEEERRSEDAQSKAALTDWLRAKASFVIEGLKEADKDEFCRCELKLQKWYGDLRGKPFAIEAENSILDISGFSKQYNCAFIWQKDGVKKLNLYLIINYFKGGKLRFKKIKPEAFEANRFYTVINKKSGEIVPMEVNFNFDDPNLIILPLAFGKRQGREFIWNDLLSLETGSLKLANGRVIEKTLYNRRTRQDEPALFVALTFERREVLDSSNIKPMNLIGVDRGENIPAVIALTDPEGCPLSRFKDSLGNPTHILRIGESYKEKQRTIQAKKEVEQRRAGGYSRKYASKAKNLADDMVRNTARDLLYYAVTQDAMLIFENLSRGFGRQGKRTFMAERQYTRMEDWLTAKLAYEGLPSKTYLSKTLAQYTSKTCSNCGFTITSADYDRVLEKLKKTATGWMTTINGKELKVEGQITYYNRYKRQNVVKDLSVELDRLSEESVNNDISSWTKGRSGEALSLLKKRFSHRPVQEKFVCLNCGFETHADEQAALNIARSWLFLRSQEYKKYQTNKTTGNTDKRAFVETWQSFYRKKLKEVWKPAV

SEQ ID NO: 44422 - protein, 978 aa, synthetic construct
  REGION 1..978: note = engineered CasX variant
QEIKRINKIRRRLVKDSNTKKAGKTGPMKTLLVRVMTPDLRERLENLRKKPENIPQPISNTSRANLNKLLTDYTEMKKAILHVYWEEFQKDPVGLMSRVAQPASKKIDQNKLKPEMDEKGNLTTAGFACSQCGQPLFVYKLEQVSEKGKAYTNYFGRCNVAEHEKLIKLAQLKPEKDSDEAVTYSLGKFGQRALDFYSIHVTKESTHPVKPLAQIAGNRYASGPVGKALSDACMGTIASFLSKYQDIIIEHQKVVKGNQKRLESLRELAGKENLEYPSVTLPPQPHTKEGVDAYNEVIARVRMWVNLNLWQKLKLSRDDAKPLLRLKGFPSFPLVERQANEVDWWDMVCNVKKLINEKKEDGKVFWQNLAGYKRQEALRPYLSSEEDRKKGKKFARTQLGDLLNHLEKKHGEDWGKVYDEAWERIDKKVEGLSKHIKLEEERRSEDAQSKAALTDWLRAKASFVIEGLKEADKDEFCRCELKLQKWYGDLRGKPFAIEAENSILDISGFSKQYNCAFIWQKDGVKKLNLYLIINYFKGGKLRFKKIKPEAFEANRFYTVINKKSGEIVPMEVNFNFDDPNLIILPLAFGKRQGREFIWNDLLSLETGSLKLANGRVIEKTLYNRRTRQDEPALFVALTFERREVLDSSNIKPMNLIGVDRGENIPAVIALTDPEGCPLSRFKDSLGNPTHILRIGESYKEKQRTIQAKKEVEQRRAGGYSRKYASKAKNLADDMVRNTARDLLYYAVTQDAMLIFENLSRGFGRQGKRTFMAERQYTRMEDWLTAKLAYEGLPSKTYLSKTLAQYTSKTCSNCGFTITSADYDRVLEKLKKTATGWMTTINGKELKVEGQITYYNRYKRQNVVKDLSVELDRLSEESVNNDISSWTKGRSGEALSLLKKRFSHRPVQEKFVCLNCGFETHADEQAALNIARSWLFLRSQEYKKYQTNKTTGNTDKRAFVETWQSFYRKKLKEVWKPAV

SEQ ID NO: 44423 - protein, 977 aa, synthetic construct
  REGION 1..977: note = engineered CasX variant
QEIKRINKIRRRLVKDSNTKKAGKTGPMKTLLVRVMTPDLRERLENLRKKPENIPQPISNTSRANLNKLLTDYTEMKKAILHVYWEEFQKDPVGLMSRVAQPASKKIDQNKLKPEMDEKGNLTTAGFACSQCGQPLFVYKLEQVSEKGKAYTNYFGRCNVAEHEKLILLAQLKPEKDSDEAVTYSLGKFGQRALDFYSIHVTKESTHPVKPLAQIAGNRYASPVGKALSDACMGTIASFLSKYQDIIIEHQKVVKGNQKRLESLRELAGKENLEYPSVTLPPQPHTKEGVDAYNEVIARVRMWVNLNLWQKLKLSRDDAKPLLRLKGFPSFPLVERQANEVDWWDMVCNVKKLINEKKEDGKVFWQNLAGYKRQEALRPYLSSEEDRKKGKKFARTQLGDLLNHLEKKHGEDWGKVYDEAWERIDKKVEGLSKHIKLEEERRSEDAQSKAALTDWLRAKASFVIEGLKEADKDEFCRCELKLQKWYGDLRGKPFAIEAENSILDISGFSKQYNCAFIWQKDGVKKLNLYLIINYFKGGKLRFKKIKPEAFEANRFYTVINKKSGEIVPMEVNFNFDDPNLIILPLAFGKRQGREFIWNDLLSLETGSLKLANGRVIEKTLYNRRTRQDEPALFVALTFERREVLDSSNIKPMNLIGVDRGENIPAVIALTDPEGCPLSRFKDSLGNPTHILRIGESYKEKQRTIQAKKEVEQRRAGGYSRKYASKAKNLADDMVRNTARDLLYYAVTQDAMLIFENLSRGFGRQGKRTFMAERQYTRMEDWLTAKLAYEGLPSKTYLSKTLAQYTSKTCSNCGFTITSADYDRVLEKLKKTATGWMTTINGKELKVEGQITYYNRYKRQNVVKDLSVELDRLSEESVNNDISSWTKGRSGEALSLLKKRFSHRPVQEKFVCLNCGFETHADEQAALNIARSWLFLRSQEYKKYQTNKTTGNTDKRAFVETWQSFYRKKLKEVWKPAV

SEQ ID NO: 44424 - protein, 978 aa, synthetic construct
  REGION 1..978: note = engineered CasX variant
QEIKRINKIRRRLVKDSNTKKAGKTGPMKTLLVRVMTPDLRERLENLRKKPENIPQPISNTSRANLNKLLTDYTEMKKAILHVYWEEFQKDPVGLMSRVAQPASKKIDQNKLKPEMDEKGNLTTAGFACSQCGQPLFVYKLEQVSEKGKAYTNYFGRCNVAEHEKLILLAQLKPEKDSDEAVTYSLGKFGQRALDFYSIHVTKESTHPVKPLAQIAGNRYASYPVGKALSDACMGTIASFLSKYQDIIIEHQKVVKGNQKRLESLRELAGKENLEYPSVTLPPQPHTKEGVDAYNEVIARVRMWVNLNLWQKLKLSRDDAKPLLRLKGFPSFPLVERQANEVDWWDMVCNVKKLINEKKEDGKVFWQNLAGYKRQEALRPYLSSEEDRKKGKKFARTQLGDLLWHLEKKHGEDWGKVYDEAWERIDKKVEGLSKHIKLEEERRSEDAQSKAALTDWLRAKASFVIEGLKEADKDEFCRCELKLQKWYGDLRGKPFAIEAENSILDISGFSKQYNCAFIWQKDGVKKLNLYLIINYFKGGKLRFKKIKPEAFEANRFYTVINKKSGEIVPMEVNFNFDDPNLIILPLAFGKRQGREFIWNDLLSLETGSLKLANGRVIEKTLYNRRTRQDEPALFVALTFERREVLDSSNIKPMNLIGVDRGENIPAVIALTDPEGCPLSRFKDSLGNPTHILRIGESYKEKQRTIQAKKEVEQRRAGGYSRKYASKAKNLADDMVRNTARDLLYYAVTQDAMLIFENLSRGFGRQGKRTFMAERQYTRMEDWLTAKLAYEGLPSKTYLSKTLAQYTSKTCSNCGFTITSADYDRVLEKLKKTATGWMTTINGKELKVEGQITYYNRYKRQNVVKDLSVELDRLSEESVNNDISSWTKGRSGEALSLLKKRFSHRPVQEKFVCLNCGFETHADEQAALNIARSWLFLRSQEYKKYQTNKTTGNTDKRAFVETWQSFYRKKLKEVWKPAV

SEQ ID NO: 44425 - protein, 978 aa, synthetic construct
  REGION 1..978: note = engineered CasX variant
QEIKRINKIRRRLVKDSNTKKAGKTGPMKTLLVRVMTPDLRERLENLRKKPENIPQPISNTSRANLNKLLTDYTEMKKAILHVYWEEFQKDPVGLMSRVAQPASKKIDQNKLKPEMDEKGNLTTAGFACSQCGQPLFVYKLEQVSEKGKAYTNYFGRCNVAEHEKLILLAQLKPEKDSDEAVTYSLGKFGQRALDFYSIHVTKESTHPVKPLAQIAGNRYASHPVGKALSDACMGTIASFLSKYQDIIIEHQKVVKGNQKRLESLRELAGKENLEYPSVTLPPQPHTKEGVDAYNEVIARVRMWVNLNLWQKLKLSRDDAKPLLRLKGFPSFPLVERQANEVDWWDMVCNVKKLINEKKEDGKVFWQNLAGYKRQEALRPYLSSEEDRKKGKKFARTQLGDLLWHLEKKHGEDWGKVYDEAWERIDKKVEGLSKHIKLEEERRSEDAQSKAALTDWLRAKASFVIEGLKEADKDEFCRCELKLQKWYGDLRGKPFAIEAENSILDISGFSKQYNCAFIWQKDGVKKLNLYLIINYFKGGKLRFKKIKPEAFEANRFYTVINKKSGEIVPMEVNFNFDDPNLIILPLAFGKRQGREFIWNDLLSLETGSLKLANGRVIEKTLYNRRTRQDEPALFVALTFERREVLDSSNIKPMNLIGVDRGENIPAVIALTDPEGCPLSRFKDSLGNPTHILRIGESYKEKQRTIQAKKEVEQRRAGGYSRKYASKAKNLADDMVRNTARDLLYYAVTQDAMLIFENLSRGFGRQGKRTFMAERQYTRMEDWLTAKLAYEGLPSKTYLSKTLAQYTSKTCSNCGFTITSADYDRVLEKLKKTATGWMTTINGKELKVEGQITYYNRYKRQNVVKDLSVELDRLSEESVNNDISSWTKGRSGEALSLLKKRFSHRPVQEKFVCLNCGFETHADEQAALNIARSWLFLRSQEYKKYQTNKTTGNTDKRAFVETWQSFYRKKLKEVWKPAV

SEQ ID NO: 44426 - protein, 978 aa, synthetic construct
  REGION 1..978: note = engineered CasX variant
QEIKRINKIRRRLVKDSNTKKAGKTGPMKTLLVRVMTPDLRERLENLRKKPENIPQPISNTSRANLNKLLTDYTEMKKAILHVYWEEFQKDPVGLMSRVAQPASKKIDQNKLKPEMDEKGNLTTAGFACSQCGQPLFVYKLEQVSEKGKAYTNYFGRCNVAEHEKLILLAQLKPEKDSDEAVTYSLGKFGQRALDFYSIHVTKESTHPVKPLAQIAGNRYASSPVGKALSDACMGTIASFLSKYQDIIIEHQKVVKGNQKRLESLRELAGKENLEYPSVTLPPQPHTKEGVDAYNEVIARVRMWVNLNLWQKLKLSRDDAKPLLRLKGFPSFPLVERQANEVDWWDMVCNVKKLINEKKEDGKVFWQNLAGYKRQEALRPYLSSEEDRKKGKKFARTQLGDLLWHLEKKHGEDWGKVYDEAWERIDKKVEGLSKHIKLEEERRSEDAQSKAALTDWLRAKASFVIEGLKEADKDEFCRCELKLQKWYGDLRGKPFAIEAENSILDISGFSKQYNCAFIWQKDGVKKLNLYLIINYFKGGKLRFKKIKPEAFEANRFYTVINKKSGEIVPMEVNFNFDDPNLIILPLAFGKRQGREFIWNDLLSLETGSLKLANGRVIEKTLYNRRTRQDEPALFVALTFERREVLDSSNIKPMNLIGVDRGENIPAVIALTDPEGCPLSRFKDSLGNPTHILRIGESYKEKQRTIQAKKEVEQRRAGGYSRKYASKAKNLADDMVRNTARDLLYYAVTQDAMLIFENLSRGFGRQGKRTFMAERQYTRMEDWLTAKLAYEGLPSKTYLSKTLAQYTSKTCSNCGFTITSADYDRVLEKLKKTATGWMTTINGKELKVEGQITYYNRYKRQNVVKDLSVELDRLSEESVNNDISSWTKGRSGEALSLLKKRFSHRPVQEKFVCLNCGFETHADEQAALNIARSWLFLRSQEYKKYQTNKTTGNTDKRAFVETWQSFYRKKLKEVWKPAV

SEQ ID NO: 44427 - protein, 978 aa, synthetic construct
  REGION 1..978: note = engineered CasX variant
QEIKRINKIRRRLVKDSNTKKAGKTGPMKTLLVRVMTPDLRERLENLRKKPENIPQPISNTSRANLNKLLTDYTEMKKAILHVYWEEFQKDPVGLMSRVAQPASKKIDQNKLKPEMDEKGNLTTAGFACSQCGQPLFVYKLEQVSEKGKAYTNYFGRCNVAEHEKLILLAQLKPEKDSDEAVTYSLGKFGQRALDFYSIHVTKESTHPVKPLAQIAGNRYASTPVGKALSDACMGTIASFLSKYQDIIIEHQKVVKGNQKRLESLRELAGKENLEYPSVTLPPQPHTKEGVDAYNEVIARVRMWVNLNLWQKLKLSRDDAKPLLRLKGFPSFPLVERQANEVDWWDMVCNVKKLINEKKEDGKVFWQNLAGYKRQEALRPYLSSEEDRKKGKKFARTQLGDLLWHLEKKHGEDWGKVYDEAWERIDKKVEGLSKHIKLEEERRSEDAQSKAALTDWLRAKASFVIEGLKEADKDEFCRCELKLQKWYGDLRGKPFAIEAENSILDISGFSKQYNCAFIWQKDGVKKLNLYLIINYFKGGKLRFKKIKPEAFEANRFYTVINKKSGEIVPMEVNFNFDDPNLIILPLAFGKRQGREFIWNDLLSLETGSLKLANGRVIEKTLYNRRTRQDEPALFVALTFERREVLDSSNIKPMNLIGVDRGENIPAVIALTDPEGCPLSRFKDSLGNPTHILRIGESYKEKQRTIQAKKEVEQRRAGGYSRKYASKAKNLADDMVRNTARDLLYYAVTQDAMLIFENLSRGFGRQGKRTFMAERQYTRMEDWLTAKLAYEGLPSKTYLSKTLAQYTSKTCSNCGFTITSADYDRVLEKLKKTATGWMTTINGKELKVEGQITYYNRYKRQNVVKDLSVELDRLSEESVNNDISSWTKGRSGEALSLLKKRFSHRPVQEKFVCLNCGFETHADEQAALNIARSWLFLRSQEYKKYQTNKTTGNTDKRAFVETWQSFYRKKLKEVWKPAV

SEQ ID NO: 44428 - protein, 978 aa, synthetic construct
  REGION 1..978: note = engineered CasX variant
QEIKRINKIRRRLVKDSNTKKAGKTGPMKTLLVRVMTPDLRERLENLRKKPENIPQPISNTSRANLNKLLTDYTEMKKAILHVYWEEFQKDPVGLMSRVAQPASKKIDQNKLKPEMDEKGNLTTAGFACSQCGQPLFVYKLEQVSEKGKAYTNYFGRCNVAEHEKLILLAQLKPEKDSDEAVTYSLGKFGQRALDFYSIHVTKESTHPVKPLAQIAGNRYASAPVGKALSDACMGTIASFLSKYQDIIIEHQKVVKGNQKRLESLRELAGKENLEYPSVTLPPQPHTKEGVDAYNEVIARVRMWVNLNLWQKLKLSRDDAKPLLRLKGFPSFPLVERQANEVDWWDMVCNVKKLINEKKEDGKVFWQNLAGYKRQEALRPYLSSEEDRKKGKKFARTQLGDLLWHLEKKHGEDWGKVYDEAWERIDKKVEGLSKHIKLEEERRSEDAQSKAALTDWLRAKASFVIEGLKEADKDEFCRCELKLQKWYGDLRGKPFAIEAENSILDISGFSKQYNCAFIWQKDGVKKLNLYLIINYFKGGKLRFKKIKPEAFEANRFYTVINKKSGEIVPMEVNFNFDDPNLIILPLAFGKRQGREFIWNDLLSLETGSLKLANGRVIEKTLYNRRTRQDEPALFVALTFERREVLDSSNIKPMNLIGVDRGENIPAVIALTDPEGCPLSRFKDSLGNPTHILRIGESYKEKQRTIQAKKEVEQRRAGGYSRKYASKAKNLADDMVRNTARDLLYYAVTQDAMLIFENLSRGFGRQGKRTFMAERQYTRMEDWLTAKLAYEGLPSKTYLSKTLAQYTSKTCSNCGFTITSADYDRVLEKLKKTATGWMTTINGKELKVEGQITYYNRYKRQNVVKDLSVELDRLSEESVNNDISSWTKGRSGEALSLLKKRFSHRPVQEKFVCLNCGFETHADEQAALNIARSWLFLRSQEYKKYQTNKTTGNTDKRAFVETWQSFYRKKLKEVWKPAV

SEQ ID NO: 44429 - protein, 978 aa, synthetic construct
  REGION 1..978: note = engineered CasX variant
QEIKRINKIRRRLVKDSNTKKAGKTGPMKTLLVRVMTPDLRERLENLRKKPENIPQPISNTSRANLNKLLTDYTEMKKAILHVYWEEFQKDPVGLMSRVAQPASKKIDQNKLKPEMDEKGNLTTAGFACSQCGQPLFVYKLEQVSEKGKAYTNYFGRCNVAEHEKLILLAQLKPEKDSDEAVTYSLGKFGQRALDFYSIHVTKESTHPVKPLAQIAGNRYASVPVGKALSDACMGTIASFLSKYQDIIIEHQKVVKGNQKRLESLRELAGKENLEYPSVTLPPQPHTKEGVDAYNEVIARVRMWVNLNLWQKLKLSRDDAKPLLRLKGFPSFPLVERQANEVDWWDMVCNVKKLINEKKEDGKVFWQNLAGYKRQEALRPYLSSEEDRKKGKKFARTQLGDLLWHLEKKHGEDWGKVYDEAWERIDKKVEGLSKHIKLEEERRSEDAQSKAALTDWLRAKASFVIEGLKEADKDEFCRCELKLQKWYGDLRGKPFAIEAENSILDISGFSKQYNCAFIWQKDGVKKLNLYLIINYFKGGKLRFKKIKPEAFEANRFYTVINKKSGEIVPMEVNFNFDDPNLIILPLAFGKRQGREFIWNDLLSLETGSLKLANGRVIEKTLYNRRTRQDEPALFVALTFERREVLDSSNIKPMNLIGVDRGENIPAVIALTDPEGCPLSRFKDSLGNPTHILRIGESYKEKQRTIQAKKEVEQRRAGGYSRKYASKAKNLADDMVRNTARDLLYYAVTQDAMLIFENLSRGFGRQGKRTFMAERQYTRMEDWLTAKLAYEGLPSKTYLSKTLAQYTSKTCSNCGFTITSADYDRVLEKLKKTATGWMTTINGKELKVEGQITYYNRYKRQNVVKDLSVELDRLSEESVNNDISSWTKGRSGEALSLLKKRFSHRPVQEKFVCLNCGFETHADEQAALNIARSWLFLRSQEYKKYQTNKTTGNTDKRAFVETWQSFYRKKLKEVWKPAV

SEQ ID NO: 44430 - protein, 978 aa, synthetic construct
  REGION 1..978: note = engineered CasX variant
QEIKRINKIRRRLVKDSNTKKAGKTGPMKTLLVRVMTPDLRERLENLRKKPENIPQPISNTSRANLNKLLTDYTEMKKAILHVYWEEFQKDPVGLMSRVAQPASKKIDQNKLKPEMDEKGNLTTAGFACSQCGQPLFVYKLEQVSEKGKAYTNYFGRCNVAEHEKLIKLAQLKPEKDSDEAVTYSLGKFGQRALDFYSIHVTKESTHPVKPLAQIAGNRYASGPVGKALSDACMGTIASFLSKYQDIIIEHQKVVKGNQKRLESLRELAGKENLEYPSVTLPPQPHTKEGVDAYNEVIARVRMWVNLNLWQKLKLSRDDAKPLLRLKGFPSFPLVERQANEVDWWDMVCNVKKLINEKKEDGKVFWQNLAGYKRQEALRPYLSSEEDRKKGKKFARTQLGDLLWHLEKKHGEDWGKVYDEAWERIDKKVEGLSKHIKLEEERRSEDAQSKAALTDWLRAKASFVIEGLKEADKDEFCRCELKLQKWYGDLRGKPFAIEAENSILDISGFSKQYNCAFIWQKDGVKKLNLYLIINYFKGGKLRFKKIKPEAFEANRFYTVINKKSGEIVPMEVNFNFDDPNLIILPLAFGKRQGREFIWNDLLSLETGSLKLANGRVIEKTLYNRRTRQDEPALFVALTFERREVLDSSNIKPMNLIGVDRGENIPAVIALTDPEGCPLSRFKDSLGNPTHILRIGESYKEKQRTIQAKKEVEQRRAGGYSRKYASKAKNLADDMVRNTARDLLYYAVTQDAMLIFENLSRGFGRQGKRTFMAERQYTRMEDWLTAKLAYEGLPSKTYLSKTLAQYTSKTCSNCGFTITSADYDRVLEKLKKTATGWMTTINGKELKVEGQITYYNRYKRQNVVKDLSVELDRLSEESVNNDISSWTKGRSGEALSLLKKRFSHRPVQEKFVCLNCGFETHADEQAALNIARSWLFLRSQEYKKYQTNKTTGNTDKRAFVETWQSFYRKKLKEVWKPAV

SEQ ID NO: 44431 - protein, 977 aa, synthetic construct
  REGION 1..977: note = engineered CasX variant
QEIKRINKIRRRLVKDSNTKKAGKTGPMKTLLVRVMTPDLRERLENLRKKPENIPQPISNTSRANLNKLLTDYTEMKKAILHVYWEEFQKDPVGLMSRVAQPASKKIDQNKLKPEMDEKGNLTTAGFACSQCGQPLFVYKLEQVSEKGKAYTNYFGRCNVAEHEKLILLAQLKPEKDSDEAVTYSLGKFGQRALDFYSIHVTKESTHPVKPLAQIAGNRYASPVGKALSDACMGTIASFLSKYQDIIIEHQKVVKGNQKRLESLRELAGKENLEYPSVTLPPQPHTKEGVDAYNEVIARVRMWVNLNLWQKLKLSRDDAKPLLRLKGFPSFPLVERQANEVDWWDMVCNVKKLINEKKEDGKVFWQNLAGYKRQEALRPYLSSEEDRKKGKKFARTQLGDLLWHLEKKHGEDWGKVYDEAWERIDKKVEGLSKHIKLEEERRSEDAQSKAALTDWLRAKASFVIEGLKEADKDEFCRCELKLQKWYGDLRGKPFAIEAENSILDISGFSKQYNCAFIWQKDGVKKLNLYLIINYFKGGKLRFKKIKPEAFEANRFYTVINKKSGEIVPMEVNFNFDDPNLIILPLAFGKRQGREFIWNDLLSLETGSLKLANGRVIEKTLYNRRTRQDEPALFVALTFERREVLDSSNIKPMNLIGVDRGENIPAVIALTDPEGCPLSRFKDSLGNPTHILRIGESYKEKQRTIQAKKEVEQRRAGGYSRKYASKAKNLADDMVRNTARDLLYYAVTQDAMLIFENLSRGFGRQGKRTFMAERQYTRMEDWLTAKLAYEGLPSKTYLSKTLAQYTSKTCSNCGFTITSADYDRVLEKLKKTATGWMTTINGKELKVEGQITYYNRYKRQNVVKDLSVELDRLSEESVNNDISSWTKGRSGEALSLLKKRFSHRPVQEKFVCLNCGFETHADEQAALNIARSWLFLRSQEYKKYQTNKTTGNTDKRAFVETWQSFYRKKLKEVWKPAV

SEQ ID NO: 44432 - protein, 978 aa, synthetic construct
  REGION 1..978: note = engineered CasX variant
QEIKRINKIRRRLVKDSNTKKAGKTGPMKTLLVRVMTPDLRERLENLRKKPENIPQPISNTSRANLNKLLTDYTEMKKAILHVYWEEFQKDPVGLMSRVAQPASKKIDQNKLKPEMDEKGNLTTAGFACSQCGQPLFVYKLEQVSEKGKAYTNYFGRCNVAEHEKLILLAQLKPEKDSDEAVTYSLGKFGQRALDFYSIHVTKESTHPVKPLAQIAGNRYASYPVGKALSDACMGTIASFLSKYQDIIIEHQKVVKGNQKRLESLRELAGKENLEYPSVTLPPQPHTKEGVDAYNEVIARVRMWVNLNLWQKLKLSRDDAKPLLRLKGFPSFPLVERQANEVDWWDMVCNVKKLINEKKEDGKVFWQNLAGYKRQEALRPYLSSEEDRKKGKKFARTQLGDLLLHLYKKHGEDWGKVYDEAWERIDKKVEGLSKHIKLEEERRSEDAQSKAALTDWLRAKASFVIEGLKEADKDEFCRCELKLQKWYGDLRGKPFAIEAENSILDISGFSKQYNCAFIWQKDGVKKLNLYLIINYFKGGKLRFKKIKPEAFEANRFYTVINKKSGEIVPMEVNFNFDDPNLIILPLAFGKRQGREFIWNDLLSLETGSLKLANGRVIEKTLYNRRTRQDEPALFVALTFERREVLDSSNIKPMNLIGVDRGENIPAVIALTDPEGCPLSRFKDSLGNPTHILRIGESYKEKQRTIQAKKEVEQRRAGGYSRKYASKAKNLADDMVRNTARDLLYYAVTQDAMLIFENLSRGFGRQGKRTFMAERQYTRMEDWLTAKLAYEGLPSKTYLSKTLAQYTSKTCSNCGFTITSADYDRVLEKLKKTATGWMTTINGKELKVEGQITYYNRYKRQNVVKDLSVELDRLSEESVNNDISSWTKGRSGEALSLLKKRFSHRPVQEKFVCLNCGFETHADEQAALNIARSWLFLRSQEYKKYQTNKTTGNTDKRAFVETWQSFYRKKLKEVWKPAV

SEQ ID NO: 44433 - protein, 978 aa, synthetic construct
  REGION 1..978: note = engineered CasX variant
QEIKRINKIRRRLVKDSNTKKAGKTGPMKTLLVRVMTPDLRERLENLRKKPENIPQPISNTSRANLNKLLTDYTEMKKAILHVYWEEFQKDPVGLMSRVAQPASKKIDQNKLKPEMDEKGNLTTAGFACSQCGQPLFVYKLEQVSEKGKAYTNYFGRCNVAEHEKLILLAQLKPEKDSDEAVTYSLGKFGQRALDFYSIHVTKESTHPVKPLAQIAGNRYASHPVGKALSDACMGTIASFLSKYQDIIIEHQKVVKGNQKRLESLRELAGKENLEYPSVTLPPQPHTKEGVDAYNEVIARVRMWVNLNLWQKLKLSRDDAKPLLRLKGFPSFPLVERQANEVDWWDMVCNVKKLINEKKEDGKVFWQNLAGYKRQEALRPYLSSEEDRKKGKKFARTQLGDLLLHLYKKHGEDWGKVYDEAWERIDKKVEGLSKHIKLEEERRSEDAQSKAALTDWLRAKASFVIEGLKEADKDEFCRCELKLQKWYGDLRGKPFAIEAENSILDISGFSKQYNCAFIWQKDGVKKLNLYLIINYFKGGKLRFKKIKPEAFEANRFYTVINKKSGEIVPMEVNFNFDDPNLIILPLAFGKRQGREFIWNDLLSLETGSLKLANGRVIEKTLYNRRTRQDEPALFVALTFERREVLDSSNIKPMNLIGVDRGENIPAVIALTDPEGCPLSRFKDSLGNPTHILRIGESYKEKQRTIQAKKEVEQRRAGGYSRKYASKAKNLADDMVRNTARDLLYYAVTQDAMLIFENLSRGFGRQGKRTFMAERQYTRMEDWLTAKLAYEGLPSKTYLSKTLAQYTSKTCSNCGFTITSADYDRVLEKLKKTATGWMTTINGKELKVEGQITYYNRYKRQNVVKDLSVELDRLSEESVNNDISSWTKGRSGEALSLLKKRFSHRPVQEKFVCLNCGFETHADEQAALNIARSWLFLRSQEYKKYQTNKTTGNTDKRAFVETWQSFYRKKLKEVWKPAV

SEQ ID NO: 44434 - protein, 978 aa, synthetic construct
  REGION 1..978: note = engineered CasX variant
QEIKRINKIRRRLVKDSNTKKAGKTGPMKTLLVRVMTPDLRERLENLRKKPENIPQPISNTSRANLNKLLTDYTEMKKAILHVYWEEFQKDPVGLMSRVAQPASKKIDQNKLKPEMDEKGNLTTAGFACSQCGQPLFVYKLEQVSEKGKAYTNYFGRCNVAEHEKLILLAQLKPEKDSDEAVTYSLGKFGQRALDFYSIHVTKESTHPVKPLAQIAGNRYASSPVGKALSDACMGTIASFLSKYQDIIIEHQKVVKGNQKRLESLRELAGKENLEYPSVTLPPQPHTKEGVDAYNEVIARVRMWVNLNLWQKLKLSRDDAKPLLRLKGFPSFPLVERQANEVDWWDMVCNVKKLINEKKEDGKVFWQNLAGYKRQEALRPYLSSEEDRKKGKKFARTQLGDLLLHLYKKHGEDWGKVYDEAWERIDKKVEGLSKHIKLEEERRSEDAQSKAALTDWLRAKASFVIEGLKEADKDEFCRCELKLQKWYGDLRGKPFAIEAENSILDISGFSKQYNCAFIWQKDGVKKLNLYLIINYFKGGKLRFKKIKPEAFEANRFYTVINKKSGEIVPMEVNFNFDDPNLIILPLAFGKRQGREFIWNDLLSLETGSLKLANGRVIEKTLYNRRTRQDEPALFVALTFERREVLDSSNIKPMNLIGVDRGENIPAVIALTDPEGCPLSRFKDSLGNPTHILRIGESYKEKQRTIQAKKEVEQRRAGGYSRKYASKAKNLADDMVRNTARDLLYYAVTQDAMLIFENLSRGFGRQGKRTFMAERQYTRMEDWLTAKLAYEGLPSKTYLSKTLAQYTSKTCSNCGFTITSADYDRVLEKLKKTATGWMTTINGKELKVEGQITYYNRYKRQNVVKDLSVELDRLSEESVNNDISSWTKGRSGEALSLLKKRFSHRPVQEKFVCLNCGFETHADEQAALNIARSWLFLRSQEYKKYQTNKTTGNTDKRAFVETWQSFYRKKLKEVWKPAV

SEQ ID NO: 44435 - protein, 978 aa, synthetic construct
  REGION 1..978: note = engineered CasX variant
QEIKRINKIRRRLVKDSNTKKAGKTGPMKTLLVRVMTPDLRERLENLRKKPENIPQPISNTSRANLNKLLTDYTEMKKAILHVYWEEFQKDPVGLMSRVAQPASKKIDQNKLKPEMDEKGNLTTAGFACSQCGQPLFVYKLEQVSEKGKAYTNYFGRCNVAEHEKLILLAQLKPEKDSDEAVTYSLGKFGQRALDFYSIHVTKESTHPVKPLAQIAGNRYASTPVGKALSDACMGTIASFLSKYQDIIIEHQKVVKGNQKRLESLRELAGKENLEYPSVTLPPQPHTKEGVDAYNEVIARVRMWVNLNLWQKLKLSRDDAKPLLRLKGFPSFPLVERQANEVDWWDMVCNVKKLINEKKEDGKVFWQNLAGYKRQEALRPYLSSEEDRKKGKKFARTQLGDLLLHLYKKHGEDWGKVYDEAWERIDKKVEGLSKHIKLEEERRSEDAQSKAALTDWLRAKASFVIEGLKEADKDEFCRCELKLQKWYGDLRGKPFAIEAENSILDISGFSKQYNCAFIWQKDGVKKLNLYLIINYFKGGKLRFKKIKPEAFEANRFYTVINKKSGEIVPMEVNFNFDDPNLIILPLAFGKRQGREFIWNDLLSLETGSLKLANGRVIEKTLYNRRTRQDEPALFVALTFERREVLDSSNIKPMNLIGVDRGENIPAVIALTDPEGCPLSRFKDSLGNPTHILRIGESYKEKQRTIQAKKEVEQRRAGGYSRKYASKAKNLADDMVRNTARDLLYYAVTQDAMLIFENLSRGFGRQGKRTFMAERQYTRMEDWLTAKLAYEGLPSKTYLSKTLAQYTSKTCSNCGFTITSADYDRVLEKLKKTATGWMTTINGKELKVEGQITYYNRYKRQNVVKDLSVELDRLSEESVNNDISSWTKGRSGEALSLLKKRFSHRPVQEKFVCLNCGFETHADEQAALNIARSWLFLRSQEYKKYQTNKTTGNTDKRAFVETWQSFYRKKLKEVWKPAV

SEQ ID NO: 44436 - protein, 978 aa, synthetic construct
  REGION 1..978: note = engineered CasX variant
QEIKRINKIRRRLVKDSNTKKAGKTGPMKTLLVRVMTPDLRERLENLRKKPENIPQPISNTSRANLNKLLTDYTEMKKAILHVYWEEFQKDPVGLMSRVAQPASKKIDQNKLKPEMDEKGNLTTAGFACSQCGQPLFVYKLEQVSEKGKAYTNYFGRCNVAEHEKLILLAQLKPEKDSDEAVTYSLGKFGQRALDFYSIHVTKESTHPVKPLAQIAGNRYASAPVGKALSDACMGTIASFLSKYQDIIIEHQKVVKGNQKRLESLRELAGKENLEYPSVTLPPQPHTKEGVDAYNEVIARVRMWVNLNLWQKLKLSRDDAKPLLRLKGFPSFPLVERQANEVDWWDMVCNVKKLINEKKEDGKVFWQNLAGYKRQEALRPYLSSEEDRKKGKKFARTQLGDLLLHLYKKHGEDWGKVYDEAWERIDKKVEGLSKHIKLEEERRSEDAQSKAALTDWLRAKASFVIEGLKEADKDEFCRCELKLQKWYGDLRGKPFAIEAENSILDISGFSKQYNCAFIWQKDGVKKLNLYLIINYFKGGKLRFKKIKPEAFEANRFYTVINKKSGEIVPMEVNFNFDDPNLIILPLAFGKRQGREFIWNDLLSLETGSLKLANGRVIEKTLYNRRTRQDEPALFVALTFERREVLDSSNIKPMNLIGVDRGENIPAVIALTDPEGCPLSRFKDSLGNPTHILRIGESYKEKQRTIQAKKEVEQRRAGGYSRKYASKAKNLADDMVRNTARDLLYYAVTQDAMLIFENLSRGFGRQGKRTFMAERQYTRMEDWLTAKLAYEGLPSKTYLSKTLAQYTSKTCSNCGFTITSADYDRVLEKLKKTATGWMTTINGKELKVEGQITYYNRYKRQNVVKDLSVELDRLSEESVNNDISSWTKGRSGEALSLLKKRFSHRPVQEKFVCLNCGFETHADEQAALNIARSWLFLRSQEYKKYQTNKTTGNTDKRAFVETWQSFYRKKLKEVWKPAV

SEQ ID NO: 44437 - protein, 978 aa, synthetic construct
  REGION 1..978: note = engineered CasX variant
QEIKRINKIRRRLVKDSNTKKAGKTGPMKTLLVRVMTPDLRERLENLRKKPENIPQPISNTSRANLNKLLTDYTEMKKAILHVYWEEFQKDPVGLMSRVAQPASKKIDQNKLKPEMDEKGNLTTAGFACSQCGQPLFVYKLEQVSEKGKAYTNYFGRCNVAEHEKLILLAQLKPEKDSDEAVTYSLGKFGQRALDFYSIHVTKESTHPVKPLAQIAGNRYASVPVGKALSDACMGTIASFLSKYQDIIIEHQKVVKGNQKRLESLRELAGKENLEYPSVTLPPQPHTKEGVDAYNEVIARVRMWVNLNLWQKLKLSRDDAKPLLRLKGFPSFPLVERQANEVDWWDMVCNVKKLINEKKEDGKVFWQNLAGYKRQEALRPYLSSEEDRKKGKKFARTQLGDLLLHLYKKHGEDWGKVYDEAWERIDKKVEGLSKHIKLEEERRSEDAQSKAALTDWLRAKASFVIEGLKEADKDEFCRCELKLQKWYGDLRGKPFAIEAENSILDISGFSKQYNCAFIWQKDGVKKLNLYLIINYFKGGKLRFKKIKPEAFEANRFYTVINKKSGEIVPMEVNFNFDDPNLIILPLAFGKRQGREFIWNDLLSLETGSLKLANGRVIEKTLYNRRTRQDEPALFVALTFERREVLDSSNIKPMNLIGVDRGENIPAVIALTDPEGCPLSRFKDSLGNPTHILRIGESYKEKQRTIQAKKEVEQRRAGGYSRKYASKAKNLADDMVRNTARDLLYYAVTQDAMLIFENLSRGFGRQGKRTFMAERQYTRMEDWLTAKLAYEGLPSKTYLSKTLAQYTSKTCSNCGFTITSADYDRVLEKLKKTATGWMTTINGKELKVEGQITYYNRYKRQNVVKDLSVELDRLSEESVNNDISSWTKGRSGEALSLLKKRFSHRPVQEKFVCLNCGFETHADEQAALNIARSWLFLRSQEYKKYQTNKTTGNTDKRAFVETWQSFYRKKLKEVWKPAV

SEQ ID NO: 44438 - protein, 978 aa, synthetic construct
  REGION 1..978: note = engineered CasX variant
QEIKRINKIRRRLVKDSNTKKAGKTGPMKTLLVRVMTPDLRERLENLRKKPENIPQPISNTSRANLNKLLTDYTEMKKAILHVYWEEFQKDPVGLMSRVAQPASKKIDQNKLKPEMDEKGNLTTAGFACSQCGQPLFVYKLEQVSEKGKAYTNYFGRCNVAEHEKLIKLAQLKPEKDSDEAVTYSLGKFGQRALDFYSIHVTKESTHPVKPLAQIAGNRYASGPVGKALSDACMGTIASFLSKYQDIIIEHQKVVKGNQKRLESLRELAGKENLEYPSVTLPPQPHTKEGVDAYNEVIARVRMWVNLNLWQKLKLSRDDAKPLLRLKGFPSFPLVERQANEVDWWDMVCNVKKLINEKKEDGKVFWQNLAGYKRQEALRPYLSSEEDRKKGKKFARTQLGDLLLHLYKKHGEDWGKVYDEAWERIDKKVEGLSKHIKLEEERRSEDAQSKAALTDWLRAKASFVIEGLKEADKDEFCRCELKLQKWYGDLRGKPFAIEAENSILDISGFSKQYNCAFIWQKDGVKKLNLYLIINYFKGGKLRFKKIKPEAFEANRFYTVINKKSGEIVPMEVNFNFDDPNLIILPLAFGKRQGREFIWNDLLSLETGSLKLANGRVIEKTLYNRRTRQDEPALFVALTFERREVLDSSNIKPMNLIGVDRGENIPAVIALTDPEGCPLSRFKDSLGNPTHILRIGESYKEKQRTIQAKKEVEQRRAGGYSRKYASKAKNLADDMVRNTARDLLYYAVTQDAMLIFENLSRGFGRQGKRTFMAERQYTRMEDWLTAKLAYEGLPSKTYLSKTLAQYTSKTCSNCGFTITSADYDRVLEKLKKTATGWMTTINGKELKVEGQITYYNRYKRQNVVKDLSVELDRLSEESVNNDISSWTKGRSGEALSLLKKRFSHRPVQEKFVCLNCGFETHADEQAALNIARSWLFLRSQEYKKYQTNKTTGNTDKRAFVETWQSFYRKKLKEVWKPAV

SEQ ID NO: 44439 - protein, 977 aa, synthetic construct
  REGION 1..977: note = engineered CasX variant
QEIKRINKIRRRLVKDSNTKKAGKTGPMKTLLVRVMTPDLRERLENLRKKPENIPQPISNTSRANLNKLLTDYTEMKKAILHVYWEEFQKDPVGLMSRVAQPASKKIDQNKLKPEMDEKGNLTTAGFACSQCGQPLFVYKLEQVSEKGKAYTNYFGRCNVAEHEKLILLAQLKPEKDSDEAVTYSLGKFGQRALDFYSIHVTKESTHPVKPLAQIAGNRYASPVGKALSDACMGTIASFLSKYQDIIIEHQKVVKGNQKRLESLRELAGKENLEYPSVTLPPQPHTKEGVDAYNEVIARVRMWVNLNLWQKLKLSRDDAKPLLRLKGFPSFPLVERQANEVDWWDMVCNVKKLINEKKEDGKVFWQNLAGYKRQEALRPYLSSEEDRKKGKKFARTQLGDLLLHLYKKHGEDWGKVYDEAWERIDKKVEGLSKHIKLEEERRSEDAQSKAALTDWLRAKASFVIEGLKEADKDEFCRCELKLQKWYGDLRGKPFAIEAENSILDISGFSKQYNCAFIWQKDGVKKLNLYLIINYFKGGKLRFKKIKPEAFEANRFYTVINKKSGEIVPMEVNFNFDDPNLIILPLAFGKRQGREFIWNDLLSLETGSLKLANGRVIEKTLYNRRTRQDEPALFVALTFERREVLDSSNIKPMNLIGVDRGENIPAVIALTDPEGCPLSRFKDSLGNPTHILRIGESYKEKQRTIQAKKEVEQRRAGGYSRKYASKAKNLADDMVRNTARDLLYYAVTQDAMLIFENLSRGFGRQGKRTFMAERQYTRMEDWLTAKLAYEGLPSKTYLSKTLAQYTSKTCSNCGFTITSADYDRVLEKLKKTATGWMTTINGKELKVEGQITYYNRYKRQNVVKDLSVELDRLSEESVNNDISSWTKGRSGEALSLLKKRFSHRPVQEKFVCLNCGFETHADEQAALNIARSWLFLRSQEYKKYQTNKTTGNTDKRAFVETWQSFYRKKLKEVWKPAV

SEQ ID NO: 44440 - protein, 978 aa, synthetic construct
  REGION 1..978: note = engineered CasX variant
QEIKRINKIRRRLVKDSNTKKAGKTGPMKTLLVRVMTPDLRERLENLRKKPENIPQPISNTSRANLNKLLTDYTEMKKAILHVYWEEFQKDPVGLMSRVAQPASKKIDQNKLKPEMDEKGNLTTAGFACSQCGQPLFVYKLEQVSEKGKAYTNYFGRCNVAEHEKLILLAQLKPEKDSDEAVTYSLGKFGQRALDFYSIHVTKESTHPVKPLAQIAGNRYASYPVGKALSDACMGTIASFLSKYQDIIIEHQKVVKGNQKRLESLRELAGKENLEYPSVTLPPQPHTKEGVDAYNEVIARVRMWVNLNLWQKLKLSRDDAKPLLRLKGFPSFPLVERQANEVDWWDMVCNVKKLINEKKEDGKVFWQNLAGYKRQEALRPYLSSEEDRKKGKKFARTQLGDLLLHLEKKHPEDWGKVYDEAWERIDKKVEGLSKHIKLEEERRSEDAQSKAALTDWLRAKASFVIEGLKEADKDEFCRCELKLQKWYGDLRGKPFAIEAENSILDISGFSKQYNCAFIWQKDGVKKLNLYLIINYFKGGKLRFKKIKPEAFEANRFYTVINKKSGEIVPMEVNFNFDDPNLIILPLAFGKRQGREFIWNDLLSLETGSLKLANGRVIEKTLYNRRTRQDEPALFVALTFERREVLDSSNIKPMNLIGVDRGENIPAVIALTDPEGCPLSRFKDSLGNPTHILRIGESYKEKQRTIQAKKEVEQRRAGGYSRKYASKAKNLADDMVRNTARDLLYYAVTQDAMLIFENLSRGFGRQGKRTFMAERQYTRMEDWLTAKLAYEGLPSKTYLSKTLAQYTSKTCSNCGFTITSADYDRVLEKLKKTATGWMTTINGKELKVEGQITYYNRYKRQNVVKDLSVELDRLSEESVNNDISSWTKGRSGEALSLLKKRFSHRPVQEKFVCLNCGFETHADEQAALNIARSWLFLRSQEYKKYQTNKTTGNTDKRAFVETWQSFYRKKLKEVWKPAV

SEQ ID NO: 44441 - protein, 978 aa, synthetic construct
  REGION 1..978: note = engineered CasX variant
QEIKRINKIRRRLVKDSNTKKAGKTGPMKTLLVRVMTPDLRERLENLRKKPENIPQPISNTSRANLNKLLTDYTEMKKAILHVYWEEFQKDPVGLMSRVAQPASKKIDQNKLKPEMDEKGNLTTAGFACSQCGQPLFVYKLEQVSEKGKAYTNYFGRCNVAEHEKLILLAQLKPEKDSDEAVTYSLGKFGQRALDFYSIHVTKESTHPVKPLAQIAGNRYASHPVGKALSDACMGTIASFLSKYQDIIIEHQKVVKGNQKRLESLRELAGKENLEYPSVTLPPQPHTKEGVDAYNEVIARVRMWVNLNLWQKLKLSRDDAKPLLRLKGFPSFPLVERQANEVDWWDMVCNVKKLINEKKEDGKVFWQNLAGYKRQEALRPYLSSEEDRKKGKKFARTQLGDLLLHLEKKHPEDWGKVYDEAWERIDKKVEGLSKHIKLEEERRSEDAQSKAALTDWLRAKASFVIEGLKEADKDEFCRCELKLQKWYGDLRGKPFAIEAENSILDISGFSKQYNCAFIWQKDGVKKLNLYLIINYFKGGKLRFKKIKPEAFEANRFYTVINKKSGEIVPMEVNFNFDDPNLIILPLAFGKRQGREFIWNDLLSLETGSLKLANGRVIEKTLYNRRTRQDEPALFVALTFERREVLDSSNIKPMNLIGVDRGENIPAVIALTDPEGCPLSRFKDSLGNPTHILRIGESYKEKQRTIQAKKEVEQRRAGGYSRKYASKAKNLADDMVRNTARDLLYYAVTQDAMLIFENLSRGFGRQGKRTFMAERQYTRMEDWLTAKLAYEGLPSKTYLSKTLAQYTSKTCSNCGFTITSADYDRVLEKLKKTATGWMTTINGKELKVEGQITYYNRYKRQNVVKDLSVELDRLSEESVNNDISSWTKGRSGEALSLLKKRFSHRPVQEKFVCLNCGFETHADEQAALNIARSWLFLRSQEYKKYQTNKTTGNTDKRAFVETWQSFYRKKLKEVWKPAV

SEQ ID NO: 44442 - protein, 978 aa, synthetic construct
  REGION 1..978: note = engineered CasX variant
QEIKRINKIRRRLVKDSNTKKAGKTGPMKTLLVRVMTPDLRERLENLRKKPENIPQPISNTSRANLNKLLTDYTEMKKAILHVYWEEFQKDPVGLMSRVAQPASKKIDQNKLKPEMDEKGNLTTAGFACSQCGQPLFVYKLEQVSEKGKAYTNYFGRCNVAEHEKLILLAQLKPEKDSDEAVTYSLGKFGQRALDFYSIHVTKESTHPVKPLAQIAGNRYASSPVGKALSDACMGTIASFLSKYQDIIIEHQKVVKGNQKRLESLRELAGKENLEYPSVTLPPQPHTKEGVDAYNEVIARVRMWVNLNLWQKLKLSRDDAKPLLRLKGFPSFPLVERQANEVDWWDMVCNVKKLINEKKEDGKVFWQNLAGYKRQEALRPYLSSEEDRKKGKKFARTQLGDLLLHLEKKHPEDWGKVYDEAWERIDKKVEGLSKHIKLEEERRSEDAQSKAALTDWLRAKASFVIEGLKEADKDEFCRCELKLQKWYGDLRGKPFAIEAENSILDISGFSKQYNCAFIWQKDGVKKLNLYLIINYFKGGKLRFKKIKPEAFEANRFYTVINKKSGEIVPMEVNFNFDDPNLIILPLAFGKRQGREFIWNDLLSLETGSLKLANGRVIEKTLYNRRTRQDEPALFVALTFERREVLDSSNIKPMNLIGVDRGENIPAVIALTDPEGCPLSRFKDSLGNPTHILRIGESYKEKQRTIQAKKEVEQRRAGGYSRKYASKAKNLADDMVRNTARDLLYYAVTQDAMLIFENLSRGFGRQGKRTFMAERQYTRMEDWLTAKLAYEGLPSKTYLSKTLAQYTSKTCSNCGFTITSADYDRVLEKLKKTATGWMTTINGKELKVEGQITYYNRYKRQNVVKDLSVELDRLSEESVNNDISSWTKGRSGEALSLLKKRFSHRPVQEKFVCLNCGFETHADEQAALNIARSWLFLRSQEYKKYQTNKTTGNTDKRAFVETWQSFYRKKLKEVWKPAV

SEQ ID NO: 44443 - protein, 978 aa, synthetic construct
  REGION 1..978: note = engineered CasX variant
QEIKRINKIRRRLVKDSNTKKAGKTGPMKTLLVRVMTPDLRERLENLRKKPENIPQPISNTSRANLNKLLTDYTEMKKAILHVYWEEFQKDPVGLMSRVAQPASKKIDQNKLKPEMDEKGNLTTAGFACSQCGQPLFVYKLEQVSEKGKAYTNYFGRCNVAEHEKLILLAQLKPEKDSDEAVTYSLGKFGQRALDFYSIHVTKESTHPVKPLAQIAGNRYASTPVGKALSDACMGTIASFLSKYQDIIIEHQKVVKGNQKRLESLRELAGKENLEYPSVTLPPQPHTKEGVDAYNEVIARVRMWVNLNLWQKLKLSRDDAKPLLRLKGFPSFPLVERQANEVDWWDMVCNVKKLINEKKEDGKVFWQNLAGYKRQEALRPYLSSEEDRKKGKKFARTQLGDLLLHLEKKHPEDWGKVYDEAWERIDKKVEGLSKHIKLEEERRSEDAQSKAALTDWLRAKASFVIEGLKEADKDEFCRCELKLQKWYGDLRGKPFAIEAENSILDISGFSKQYNCAFIWQKDGVKKLNLYLIINYFKGGKLRFKKIKPEAFEANRFYTVINKKSGEIVPMEVNFNFDDPNLIILPLAFGKRQGREFIWNDLLSLETGSLKLANGRVIEKTLYNRRTRQDEPALFVALTFERREVLDSSNIKPMNLIGVDRGENIPAVIALTDPEGCPLSRFKDSLGNPTHILRIGESYKEKQRTIQAKKEVEQRRAGGYSRKYASKAKNLADDMVRNTARDLLYYAVTQDAMLIFENLSRGFGRQGKRTFMAERQYTRMEDWLTAKLAYEGLPSKTYLSKTLAQYTSKTCSNCGFTITSADYDRVLEKLKKTATGWMTTINGKELKVEGQITYYNRYKRQNVVKDLSVELDRLSEESVNNDISSWTKGRSGEALSLLKKRFSHRPVQEKFVCLNCGFETHADEQAALNIARSWLFLRSQEYKKYQTNKTTGNTDKRAFVETWQSFYRKKLKEVWKPAV

SEQ ID NO: 44444 - protein, 978 aa, synthetic construct
  REGION 1..978: note = engineered CasX variant
QEIKRINKIRRRLVKDSNTKKAGKTGPMKTLLVRVMTPDLRERLENLRKKPENIPQPISNTSRANLNKLLTDYTEMKKAILHVYWEEFQKDPVGLMSRVAQPASKKIDQNKLKPEMDEKGNLTTAGFACSQCGQPLFVYKLEQVSEKGKAYTNYFGRCNVAEHEKLILLAQLKPEKDSDEAVTYSLGKFGQRALDFYSIHVTKESTHPVKPLAQIAGNRYASAPVGKALSDACMGTIASFLSKYQDIIIEHQKVVKGNQKRLESLRELAGKENLEYPSVTLPPQPHTKEGVDAYNEVIARVRMWVNLNLWQKLKLSRDDAKPLLRLKGFPSFPLVERQANEVDWWDMVCNVKKLINEKKEDGKVFWQNLAGYKRQEALRPYLSSEEDRKKGKKFARTQLGDLLLHLEKKHPEDWGKVYDEAWERIDKKVEGLSKHIKLEEERRSEDAQSKAALTDWLRAKASFVIEGLKEADKDEFCRCELKLQKWYGDLRGKPFAIEAENSILDISGFSKQYNCAFIWQKDGVKKLNLYLIINYFKGGKLRFKKIKPEAFEANRFYTVINKKSGEIVPMEVNFNFDDPNLIILPLAFGKRQGREFIWNDLLSLETGSLKLANGRVIEKTLYNRRTRQDEPALFVALTFERREVLDSSNIKPMNLIGVDRGENIPAVIALTDPEGCPLSRFKDSLGNPTHILRIGESYKEKQRTIQAKKEVEQRRAGGYSRKYASKAKNLADDMVRNTARDLLYYAVTQDAMLIFENLSRGFGRQGKRTFMAERQYTRMEDWLTAKLAYEGLPSKTYLSKTLAQYTSKTCSNCGFTITSADYDRVLEKLKKTATGWMTTINGKELKVEGQITYYNRYKRQNVVKDLSVELDRLSEESVNNDISSWTKGRSGEALSLLKKRFSHRPVQEKFVCLNCGFETHADEQAALNIARSWLFLRSQEYKKYQTNKTTGNTDKRAFVETWQSFYRKKLKEVWKPAV

SEQ ID NO: 44445 - protein, 978 aa, synthetic construct
  REGION 1..978: note = engineered CasX variant
QEIKRINKIRRRLVKDSNTKKAGKTGPMKTLLVRVMTPDLRERLENLRKKPENIPQPISNTSRANLNKLLTDYTEMKKAILHVYWEEFQKDPVGLMSRVAQPASKKIDQNKLKPEMDEKGNLTTAGFACSQCGQPLFVYKLEQVSEKGKAYTNYFGRCNVAEHEKLILLAQLKPEKDSDEAVTYSLGKFGQRALDFYSIHVTKESTHPVKPLAQIAGNRYASVPVGKALSDACMGTIASFLSKYQDIIIEHQKVVKGNQKRLESLRELAGKENLEYPSVTLPPQPHTKEGVDAYNEVIARVRMWVNLNLWQKLKLSRDDAKPLLRLKGFPSFPLVERQANEVDWWDMVCNVKKLINEKKEDGKVFWQNLAGYKRQEALRPYLSSEEDRKKGKKFARTQLGDLLLHLEKKHPEDWGKVYDEAWERIDKKVEGLSKHIKLEEERRSEDAQSKAALTDWLRAKASFVIEGLKEADKDEFCRCELKLQKWYGDLRGKPFAIEAENSILDISGFSKQYNCAFIWQKDGVKKLNLYLIINYFKGGKLRFKKIKPEAFEANRFYTVINKKSGEIVPMEVNFNFDDPNLIILPLAFGKRQGREFIWNDLLSLETGSLKLANGRVIEKTLYNRRTRQDEPALFVALTFERREVLDSSNIKPMNLIGVDRGENIPAVIALTDPEGCPLSRFKDSLGNPTHILRIGESYKEKQRTIQAKKEVEQRRAGGYSRKYASKAKNLADDMVRNTARDLLYYAVTQDAMLIFENLSRGFGRQGKRTFMAERQYTRMEDWLTAKLAYEGLPSKTYLSKTLAQYTSKTCSNCGFTITSADYDRVLEKLKKTATGWMTTINGKELKVEGQITYYNRYKRQNVVKDLSVELDRLSEESVNNDISSWTKGRSGEALSLLKKRFSHRPVQEKFVCLNCGFETHADEQAALNIARSWLFLRSQEYKKYQTNKTTGNTDKRAFVETWQSFYRKKLKEVWKPAV

SEQ ID NO: 44446 - protein, 978 aa, synthetic construct
  REGION 1..978: note = engineered CasX variant
QEIKRINKIRRRLVKDSNTKKAGKTGPMKTLLVRVMTPDLRERLENLRKKPENIPQPISNTSRANLNKLLTDYTEMKKAILHVYWEEFQKDPVGLMSRVAQPASKKIDQNKLKPEMDEKGNLTTAGFACSQCGQPLFVYKLEQVSEKGKAYTNYFGRCNVAEHEKLIKLAQLKPEKDSDEAVTYSLGKFGQRALDFYSIHVTKESTHPVKPLAQIAGNRYASGPVGKALSDACMGTIASFLSKYQDIIIEHQKVVKGNQKRLESLRELAGKENLEYPSVTLPPQPHTKEGVDAYNEVIARVRMWVNLNLWQKLKLSRDDAKPLLRLKGFPSFPLVERQANEVDWWDMVCNVKKLINEKKEDGKVFWQNLAGYKRQEALRPYLSSEEDRKKGKKFARTQLGDLLLHLEKKHPEDWGKVYDEAWERIDKKVEGLSKHIKLEEERRSEDAQSKAALTDWLRAKASFVIEGLKEADKDEFCRCELKLQKWYGDLRGKPFAIEAENSILDISGFSKQYNCAFIWQKDGVKKLNLYLIINYFKGGKLRFKKIKPEAFEANRFYTVINKKSGEIVPMEVNFNFDDPNLIILPLAFGKRQGREFIWNDLLSLETGSLKLANGRVIEKTLYNRRTRQDEPALFVALTFERREVLDSSNIKPMNLIGVDRGENIPAVIALTDPEGCPLSRFKDSLGNPTHILRIGESYKEKQRTIQAKKEVEQRRAGGYSRKYASKAKNLADDMVRNTARDLLYYAVTQDAMLIFENLSRGFGRQGKRTFMAERQYTRMEDWLTAKLAYEGLPSKTYLSKTLAQYTSKTCSNCGFTITSADYDRVLEKLKKTATGWMTTINGKELKVEGQITYYNRYKRQNVVKDLSVELDRLSEESVNNDISSWTKGRSGEALSLLKKRFSHRPVQEKFVCLNCGFETHADEQAALNIARSWLFLRSQEYKKYQTNKTTGNTDKRAFVETWQSFYRKKLKEVWKPAV

SEQ ID NO: 44447 - protein, 977 aa, synthetic construct
  REGION 1..977: note = engineered CasX variant
QEIKRINKIRRRLVKDSNTKKAGKTGPMKTLLVRVMTPDLRERLENLRKKPENIPQPISNTSRANLNKLLTDYTEMKKAILHVYWEEFQKDPVGLMSRVAQPASKKIDQNKLKPEMDEKGNLTTAGFACSQCGQPLFVYKLEQVSEKGKAYTNYFGRCNVAEHEKLILLAQLKPEKDSDEAVTYSLGKFGQRALDFYSIHVTKESTHPVKPLAQIAGNRYASPVGKALSDACMGTIASFLSKYQDIIIEHQKVVKGNQKRLESLRELAGKENLEYPSVTLPPQPHTKEGVDAYNEVIARVRMWVNLNLWQKLKLSRDDAKPLLRLKGFPSFPLVERQANEVDWWDMVCNVKKLINEKKEDGKVFWQNLAGYKRQEALRPYLSSEEDRKKGKKFARTQLGDLLLHLEKKHPEDWGKVYDEAWERIDKKVEGLSKHIKLEEERRSEDAQSKAALTDWLRAKASFVIEGLKEADKDEFCRCELKLQKWYGDLRGKPFAIEAENSILDISGFSKQYNCAFIWQKDGVKKLNLYLIINYFKGGKLRFKKIKPEAFEANRFYTVINKKSGEIVPMEVNFNFDDPNLIILPLAFGKRQGREFIWNDLLSLETGSLKLANGRVIEKTLYNRRTRQDEPALFVALTFERREVLDSSNIKPMNLIGVDRGENIPAVIALTDPEGCPLSRFKDSLGNPTHILRIGESYKEKQRTIQAKKEVEQRRAGGYSRKYASKAKNLADDMVRNTARDLLYYAVTQDAMLIFENLSRGFGRQGKRTFMAERQYTRMEDWLTAKLAYEGLPSKTYLSKTLAQYTSKTCSNCGFTITSADYDRVLEKLKKTATGWMTTINGKELKVEGQITYYNRYKRQNVVKDLSVELDRLSEESVNNDISSWTKGRSGEALSLLKKRFSHRPVQEKFVCLNCGFETHADEQAALNIARSWLFLRSQEYKKYQTNKTTGNTDKRAFVETWQSFYRKKLKEVWKPAV

SEQ ID NO: 44448 - protein, 979 aa, synthetic construct
  REGION 1..979: note = engineered CasX variant
QEIKRINKIRRRLVKDSNTKKAGKTGPMKTLLVRVMTPDLRERLENLRKKPENIPQPISNTSRANLNKLLTDYTEMKKAILHVYWEEFQKDPVGLMSRVAQPASKKIDQNKLKPEMDEKGNLTTAGFACSQCGQPLFVYKLEQVSEKGKAYTNYFGRCNVAEHEKLILLAQLKPEKDSDEAVTYSLGKFGQRALDFYSIHVTKESTHPVKPLAQIAGNRYASYPVGKALSDACMGTIASFLSKYQDIIIEHQKVVKGNQKRLESLRELAGKENLEYPSVTLPPQPHTKEGVDAYNEVIARVRMWVNLNLWQKLKLSRDDAKPLLRLKGFPSFPLVERQANEVDWWDMVCNVKKLINEKKEDGKVFWQNLAGYKRQEALRPYLSSEEDRKKGKKFARTQLGDLLLHLEKKHGERDWGKVYDEAWERIDKKVEGLSKHIKLEEERRSEDAQSKAALTDWLRAKASFVIEGLKEADKDEFCRCELKLQKWYGDLRGKPFAIEAENSILDISGFSKQYNCAFIWQKDGVKKLNLYLIINYFKGGKLRFKKIKPEAFEANRFYTVINKKSGEIVPMEVNFNFDDPNLIILPLAFGKRQGREFIWNDLLSLETGSLKLANGRVIEKTLYNRRTRQDEPALFVALTFERREVLDSSNIKPMNLIGVDRGENIPAVIALTDPEGCPLSRFKDSLGNPTHILRIGESYKEKQRTIQAKKEVEQRRAGGYSRKYASKAKNLADDMVRNTARDLLYYAVTQDAMLIFENLSRGFGRQGKRTFMAERQYTRMEDWLTAKLAYEGLPSKTYLSKTLAQYTSKTCSNCGFTITSADYDRVLEKLKKTATGWMTTINGKELKVEGQITYYNRYKRQNVVKDLSVELDRLSEESVNNDISSWTKGRSGEALSLLKKRFSHRPVQEKFVCLNCGFETHADEQAALNIARSWLFLRSQEYKKYQTNKTTGNTDKRAFVETWQSFYRKKLKEVWKPAV

SEQ ID NO: 44449 - protein, 979 aa, synthetic construct
  REGION 1..979: note = engineered CasX variant
QEIKRINKIRRRLVKDSNTKKAGKTGPMKTLLVRVMTPDLRERLENLRKKPENIPQPISNTSRANLNKLLTDYTEMKKAILHVYWEEFQKDPVGLMSRVAQPASKKIDQNKLKPEMDEKGNLTTAGFACSQCGQPLFVYKLEQVSEKGKAYTNYFGRCNVAEHEKLILLAQLKPEKDSDEAVTYSLGKFGQRALDFYSIHVTKESTHPVKPLAQIAGNRYASHPVGKALSDACMGTIASFLSKYQDIIIEHQKVVKGNQKRLESLRELAGKENLEYPSVTLPPQPHTKEGVDAYNEVIARVRMWVNLNLWQKLKLSRDDAKPLLRLKGFPSFPLVERQANEVDWWDMVCNVKKLINEKKEDGKVFWQNLAGYKRQEALRPYLSSEEDRKKGKKFARTQLGDLLLHLEKKHGERDWGKVYDEAWERIDKKVEGLSKHIKLEEERRSEDAQSKAALTDWLRAKASFVIEGLKEADKDEFCRCELKLQKWYGDLRGKPFAIEAENSILDISGFSKQYNCAFIWQKDGVKKLNLYLIINYFKGGKLRFKKIKPEAFEANRFYTVINKKSGEIVPMEVNFNFDDPNLIILPLAFGKRQGREFIWNDLLSLETGSLKLANGRVIEKTLYNRRTRQDEPALFVALTFERREVLDSSNIKPMNLIGVDRGENIPAVIALTDPEGCPLSRFKDSLGNPTHILRIGESYKEKQRTIQAKKEVEQRRAGGYSRKYASKAKNLADDMVRNTARDLLYYAVTQDAMLIFENLSRGFGRQGKRTFMAERQYTRMEDWLTAKLAYEGLPSKTYLSKTLAQYTSKTCSNCGFTITSADYDRVLEKLKKTATGWMTTINGKELKVEGQITYYNRYKRQNVVKDLSVELDRLSEESVNNDISSWTKGRSGEALSLLKKRFSHRPVQEKFVCLNCGFETHADEQAALNIARSWLFLRSQEYKKYQTNKTTGNTDKRAFVETWQSFYRKKLKEVWKPAV

SEQ ID NO: 44450 - protein, 979 aa, synthetic construct
  REGION 1..979: note = engineered CasX variant
QEIKRINKIRRRLVKDSNTKKAGKTGPMKTLLVRVMTPDLRERLENLRKKPENIPQPISNTSRANLNKLLTDYTEMKKAILHVYWEEFQKDPVGLMSRVAQPASKKIDQNKLKPEMDEKGNLTTAGFACSQCGQPLFVYKLEQVSEKGKAYTNYFGRCNVAEHEKLILLAQLKPEKDSDEAVTYSLGKFGQRALDFYSIHVTKESTHPVKPLAQIAGNRYASSPVGKALSDACMGTIASFLSKYQDIIIEHQKVVKGNQKRLESLRELAGKENLEYPSVTLPPQPHTKEGVDAYNEVIARVRMWVNLNLWQKLKLSRDDAKPLLRLKGFPSFPLVERQANEVDWWDMVCNVKKLINEKKEDGKVFWQNLAGYKRQEALRPYLSSEEDRKKGKKFARTQLGDLLLHLEKKHGERDWGKVYDEAWERIDKKVEGLSKHIKLEEERRSEDAQSKAALTDWLRAKASFVIEGLKEADKDEFCRCELKLQKWYGDLRGKPFAIEAENSILDISGFSKQYNCAFIWQKDGVKKLNLYLIINYFKGGKLRFKKIKPEAFEANRFYTVINKKSGEIVPMEVNFNFDDPNLIILPLAFGKRQGREFIWNDLLSLETGSLKLANGRVIEKTLYNRRTRQDEPALFVALTFERREVLDSSNIKPMNLIGVDRGENIPAVIALTDPEGCPLSRFKDSLGNPTHILRIGESYKEKQRTIQAKKEVEQRRAGGYSRKYASKAKNLADDMVRNTARDLLYYAVTQDAMLIFENLSRGFGRQGKRTFMAERQYTRMEDWLTAKLAYEGLPSKTYLSKTLAQYTSKTCSNCGFTITSADYDRVLEKLKKTATGWMTTINGKELKVEGQITYYNRYKRQNVVKDLSVELDRLSEESVNNDISSWTKGRSGEALSLLKKRFSHRPVQEKFVCLNCGFETHADEQAALNIARSWLFLRSQEYKKYQTNKTTGNTDKRAFVETWQSFYRKKLKEVWKPAV

SEQ ID NO: 44451 - protein, 979 aa, synthetic construct
  REGION 1..979: note = engineered CasX variant
QEIKRINKIRRRLVKDSNTKKAGKTGPMKTLLVRVMTPDLRERLENLRKKPENIPQPISNTSRANLNKLLTDYTEMKKAILHVYWEEFQKDPVGLMSRVAQPASKKIDQNKLKPEMDEKGNLTTAGFACSQCGQPLFVYKLEQVSEKGKAYTNYFGRCNVAEHEKLILLAQLKPEKDSDEAVTYSLGKFGQRALDFYSIHVTKESTHPVKPLAQIAGNRYASTPVGKALSDACMGTIASFLSKYQDIIIEHQKVVKGNQKRLESLRELAGKENLEYPSVTLPPQPHTKEGVDAYNEVIARVRMWVNLNLWQKLKLSRDDAKPLLRLKGFPSFPLVERQANEVDWWDMVCNVKKLINEKKEDGKVFWQNLAGYKRQEALRPYLSSEEDRKKGKKFARTQLGDLLLHLEKKHGERDWGKVYDEAWERIDKKVEGLSKHIKLEEERRSEDAQSKAALTDWLRAKASFVIEGLKEADKDEFCRCELKLQKWYGDLRGKPFAIEAENSILDISGFSKQYNCAFIWQKDGVKKLNLYLIINYFKGGKLRFKKIKPEAFEANRFYTVINKKSGEIVPMEVNFNFDDPNLIILPLAFGKRQGREFIWNDLLSLETGSLKLANGRVIEKTLYNRRTRQDEPALFVALTFERREVLDSSNIKPMNLIGVDRGENIPAVIALTDPEGCPLSRFKDSLGNPTHILRIGESYKEKQRTIQAKKEVEQRRAGGYSRKYASKAKNLADDMVRNTARDLLYYAVTQDAMLIFENLSRGFGRQGKRTFMAERQYTRMEDWLTAKLAYEGLPSKTYLSKTLAQYTSKTCSNCGFTITSADYDRVLEKLKKTATGWMTTINGKELKVEGQITYYNRYKRQNVVKDLSVELDRLSEESVNNDISSWTKGRSGEALSLLKKRFSHRPVQEKFVCLNCGFETHADEQAALNIARSWLFLRSQEYKKYQTNKTTGNTDKRAFVETWQSFYRKKLKEVWKPAV

SEQ ID NO: 44452 - protein, 979 aa, synthetic construct
  REGION 1..979: note = engineered CasX variant
QEIKRINKIRRRLVKDSNTKKAGKTGPMKTLLVRVMTPDLRERLENLRKKPENIPQPISNTSRANLNKLLTDYTEMKKAILHVYWEEFQKDPVGLMSRVAQPASKKIDQNKLKPEMDEKGNLTTAGFACSQCGQPLFVYKLEQVSEKGKAYTNYFGRCNVAEHEKLILLAQLKPEKDSDEAVTYSLGKFGQRALDFYSIHVTKESTHPVKPLAQIAGNRYASAPVGKALSDACMGTIASFLSKYQDIIIEHQKVVKGNQKRLESLRELAGKENLEYPSVTLPPQPHTKEGVDAYNEVIARVRMWVNLNLWQKLKLSRDDAKPLLRLKGFPSFPLVERQANEVDWWDMVCNVKKLINEKKEDGKVFWQNLAGYKRQEALRPYLSSEEDRKKGKKFARTQLGDLLLHLEKKHGERDWGKVYDEAWERIDKKVEGLSKHIKLEEERRSEDAQSKAALTDWLRAKASFVIEGLKEADKDEFCRCELKLQKWYGDLRGKPFAIEAENSILDISGFSKQYNCAFIWQKDGVKKLNLYLIINYFKGGKLRFKKIKPEAFEANRFYTVINKKSGEIVPMEVNFNFDDPNLIILPLAFGKRQGREFIWNDLLSLETGSLKLANGRVIEKTLYNRRTRQDEPALFVALTFERREVLDSSNIKPMNLIGVDRGENIPAVIALTDPEGCPLSRFKDSLGNPTHILRIGESYKEKQRTIQAKKEVEQRRAGGYSRKYASKAKNLADDMVRNTARDLLYYAVTQDAMLIFENLSRGFGRQGKRTFMAERQYTRMEDWLTAKLAYEGLPSKTYLSKTLAQYTSKTCSNCGFTITSADYDRVLEKLKKTATGWMTTINGKELKVEGQITYYNRYKRQNVVKDLSVELDRLSEESVNNDISSWTKGRSGEALSLLKKRFSHRPVQEKFVCLNCGFETHADEQAALNIARSWLFLRSQEYKKYQTNKTTGNTDKRAFVETWQSFYRKKLKEVWKPAV

SEQ ID NO: 44453 - protein, 979 aa, synthetic construct
  REGION 1..979: note = engineered CasX variant
QEIKRINKIRRRLVKDSNTKKAGKTGPMKTLLVRVMTPDLRERLENLRKKPENIPQPISNTSRANLNKLLTDYTEMKKAILHVYWEEFQKDPVGLMSRVAQPASKKIDQNKLKPEMDEKGNLTTAGFACSQCGQPLFVYKLEQVSEKGKAYTNYFGRCNVAEHEKLILLAQLKPEKDSDEAVTYSLGKFGQRALDFYSIHVTKESTHPVKPLAQIAGNRYASVPVGKALSDACMGTIASFLSKYQDIIIEHQKVVKGNQKRLESLRELAGKENLEYPSVTLPPQPHTKEGVDAYNEVIARVRMWVNLNLWQKLKLSRDDAKPLLRLKGFPSFPLVERQANEVDWWDMVCNVKKLINEKKEDGKVFWQNLAGYKRQEALRPYLSSEEDRKKGKKFARTQLGDLLLHLEKKHGERDWGKVYDEAWERIDKKVEGLSKHIKLEEERRSEDAQSKAALTDWLRAKASFVIEGLKEADKDEFCRCELKLQKWYGDLRGKPFAIEAENSILDISGFSKQYNCAFIWQKDGVKKLNLYLIINYFKGGKLRFKKIKPEAFEANRFYTVINKKSGEIVPMEVNFNFDDPNLIILPLAFGKRQGREFIWNDLLSLETGSLKLANGRVIEKTLYNRRTRQDEPALFVALTFERREVLDSSNIKPMNLIGVDRGENIPAVIALTDPEGCPLSRFKDSLGNPTHILRIGESYKEKQRTIQAKKEVEQRRAGGYSRKYASKAKNLADDMVRNTARDLLYYAVTQDAMLIFENLSRGFGRQGKRTFMAERQYTRMEDWLTAKLAYEGLPSKTYLSKTLAQYTSKTCSNCGFTITSADYDRVLEKLKKTATGWMTTINGKELKVEGQITYYNRYKRQNVVKDLSVELDRLSEESVNNDISSWTKGRSGEALSLLKKRFSHRPVQEKFVCLNCGFETHADEQAALNIARSWLFLRSQEYKKYQTNKTTGNTDKRAFVETWQSFYRKKLKEVWKPAV

SEQ ID NO: 44454 - protein, 979 aa, synthetic construct
  REGION 1..979: note = engineered CasX variant
QEIKRINKIRRRLVKDSNTKKAGKTGPMKTLLVRVMTPDLRERLENLRKKPENIPQPISNTSRANLNKLLTDYTEMKKAILHVYWEEFQKDPVGLMSRVAQPASKKIDQNKLKPEMDEKGNLTTAGFACSQCGQPLFVYKLEQVSEKGKAYTNYFGRCNVAEHEKLIKLAQLKPEKDSDEAVTYSLGKFGQRALDFYSIHVTKESTHPVKPLAQIAGNRYASGPVGKALSDACMGTIASFLSKYQDIIIEHQKVVKGNQKRLESLRELAGKENLEYPSVTLPPQPHTKEGVDAYNEVIARVRMWVNLNLWQKLKLSRDDAKPLLRLKGFPSFPLVERQANEVDWWDMVCNVKKLINEKKEDGKVFWQNLAGYKRQEALRPYLSSEEDRKKGKKFARTQLGDLLLHLEKKHGERDWGKVYDEAWERIDKKVEGLSKHIKLEEERRSEDAQSKAALTDWLRAKASFVIEGLKEADKDEFCRCELKLQKWYGDLRGKPFAIEAENSILDISGFSKQYNCAFIWQKDGVKKLNLYLIINYFKGGKLRFKKIKPEAFEANRFYTVINKKSGEIVPMEVNFNFDDPNLIILPLAFGKRQGREFIWNDLLSLETGSLKLANGRVIEKTLYNRRTRQDEPALFVALTFERREVLDSSNIKPMNLIGVDRGENIPAVIALTDPEGCPLSRFKDSLGNPTHILRIGESYKEKQRTIQAKKEVEQRRAGGYSRKYASKAKNLADDMVRNTARDLLYYAVTQDAMLIFENLSRGFGRQGKRTFMAERQYTRMEDWLTAKLAYEGLPSKTYLSKTLAQYTSKTCSNCGFTITSADYDRVLEKLKKTATGWMTTINGKELKVEGQITYYNRYKRQNVVKDLSVELDRLSEESVNNDISSWTKGRSGEALSLLKKRFSHRPVQEKFVCLNCGFETHADEQAALNIARSWLFLRSQEYKKYQTNKTTGNTDKRAFVETWQSFYRKKLKEVWKPAV

SEQ ID NO: 44455 - protein, 978 aa, synthetic construct
  REGION 1..978: note = engineered CasX variant
QEIKRINKIRRRLVKDSNTKKAGKTGPMKTLLVRVMTPDLRERLENLRKKPENIPQPISNTSRANLNKLLTDYTEMKKAILHVYWEEFQKDPVGLMSRVAQPASKKIDQNKLKPEMDEKGNLTTAGFACSQCGQPLFVYKLEQVSEKGKAYTNYFGRCNVAEHEKLILLAQLKPEKDSDEAVTYSLGKFGQRALDFYSIHVTKESTHPVKPLAQIAGNRYASPVGKALSDACMGTIASFLSKYQDIIIEHQKVVKGNQKRLESLRELAGKENLEYPSVTLPPQPHTKEGVDAYNEVIARVRMWVNLNLWQKLKLSRDDAKPLLRLKGFPSFPLVERQANEVDWWDMVCNVKKLINEKKEDGKVFWQNLAGYKRQEALRPYLSSEEDRKKGKKFARTQLGDLLLHLEKKHGERDWGKVYDEAWERIDKKVEGLSKHIKLEEERRSEDAQSKAALTDWLRAKASFVIEGLKEADKDEFCRCELKLQKWYGDLRGKPFAIEAENSILDISGFSKQYNCAFIWQKDGVKKLNLYLIINYFKGGKLRFKKIKPEAFEANRFYTVINKKSGEIVPMEVNFNFDDPNLIILPLAFGKRQGREFIWNDLLSLETGSLKLANGRVIEKTLYNRRTRQDEPALFVALTFERREVLDSSNIKPMNLIGVDRGENIPAVIALTDPEGCPLSRFKDSLGNPTHILRIGESYKEKQRTIQAKKEVEQRRAGGYSRKYASKAKNLADDMVRNTARDLLYYAVTQDAMLIFENLSRGFGRQGKRTFMAERQYTRMEDWLTAKLAYEGLPSKTYLSKTLAQYTSKTCSNCGFTITSADYDRVLEKLKKTATGWMTTINGKELKVEGQITYYNRYKRQNVVKDLSVELDRLSEESVNNDISSWTKGRSGEALSLLKKRFSHRPVQEKFVCLNCGFETHADEQAALNIARSWLFLRSQEYKKYQTNKTTGNTDKRAFVETWQSFYRKKLKEVWKPAV

SEQ ID NO: 44456 - protein, 979 aa, synthetic construct
  REGION 1..979: note = engineered CasX variant
QEIKRINKIRRRLVKDSNTKKAGKTGPMKTLLVRVMTPDLRERLENLRKKPENIPQPISNTSRANLNKLLTDYTEMKKAILHVYWEEFQKDPVGLMSRVAQPASKKIDQNKLKPEMDEKGNLTTAGFACSQCGQPLFVYKLEQVSEKGKAYTNYFGRCNVAEHEKLILLAQLKPEKDSDEAVTYSLGKFGQRALDFYSIHVTKESTHPVKPLAQIAGNRYASYPVGKALSDACMGTIASFLSKYQDIIIEHQKVVKGNQKRLESLRELAGKENLEYPSVTLPPQPHTKEGVDAYNEVIARVRMWVNLNLWQKLKLSRDDAKPLLRLKGFPSFPLVERQANEVDWWDMVCNVKKLINEKKEDGKVFWQNLAGYKRQEALRPYLSSEEDRKKGKKFARTQLGDLLLHLEKKHGEYDWGKVYDEAWERIDKKVEGLSKHIKLEEERRSEDAQSKAALTDWLRAKASFVIEGLKEADKDEFCRCELKLQKWYGDLRGKPFAIEAENSILDISGFSKQYNCAFIWQKDGVKKLNLYLIINYFKGGKLRFKKIKPEAFEANRFYTVINKKSGEIVPMEVNFNFDDPNLIILPLAFGKRQGREFIWNDLLSLETGSLKLANGRVIEKTLYNRRTRQDEPALFVALTFERREVLDSSNIKPMNLIGVDRGENIPAVIALTDPEGCPLSRFKDSLGNPTHILRIGESYKEKQRTIQAKKEVEQRRAGGYSRKYASKAKNLADDMVRNTARDLLYYAVTQDAMLIFENLSRGFGRQGKRTFMAERQYTRMEDWLTAKLAYEGLPSKTYLSKTLAQYTSKTCSNCGFTITSADYDRVLEKLKKTATGWMTTINGKELKVEGQITYYNRYKRQNVVKDLSVELDRLSEESVNNDISSWTKGRSGEALSLLKKRFSHRPVQEKFVCLNCGFETHADEQAALNIARSWLFLRSQEYKKYQTNKTTGNTDKRAFVETWQSFYRKKLKEVWKPAV

SEQ ID NO: 44457 - protein, 979 aa, synthetic construct
  REGION 1..979: note = engineered CasX variant
QEIKRINKIRRRLVKDSNTKKAGKTGPMKTLLVRVMTPDLRERLENLRKKPENIPQPISNTSRANLNKLLTDYTEMKKAILHVYWEEFQKDPVGLMSRVAQPASKKIDQNKLKPEMDEKGNLTTAGFACSQCGQPLFVYKLEQVSEKGKAYTNYFGRCNVAEHEKLILLAQLKPEKDSDEAVTYSLGKFGQRALDFYSIHVTKESTHPVKPLAQIAGNRYASHPVGKALSDACMGTIASFLSKYQDIIIEHQKVVKGNQKRLESLRELAGKENLEYPSVTLPPQPHTKEGVDAYNEVIARVRMWVNLNLWQKLKLSRDDAKPLLRLKGFPSFPLVERQANEVDWWDMVCNVKKLINEKKEDGKVFWQNLAGYKRQEALRPYLSSEEDRKKGKKFARTQLGDLLLHLEKKHGEYDWGKVYDEAWERIDKKVEGLSKHIKLEEERRSEDAQSKAALTDWLRAKASFVIEGLKEADKDEFCRCELKLQKWYGDLRGKPFAIEAENSILDISGFSKQYNCAFIWQKDGVKKLNLYLIINYFKGGKLRFKKIKPEAFEANRFYTVINKKSGEIVPMEVNFNFDDPNLIILPLAFGKRQGREFIWNDLLSLETGSLKLANGRVIEKTLYNRRTRQDEPALFVALTFERREVLDSSNIKPMNLIGVDRGENIPAVIALTDPEGCPLSRFKDSLGNPTHILRIGESYKEKQRTIQAKKEVEQRRAGGYSRKYASKAKNLADDMVRNTARDLLYYAVTQDAMLIFENLSRGFGRQGKRTFMAERQYTRMEDWLTAKLAYEGLPSKTYLSKTLAQYTSKTCSNCGFTITSADYDRVLEKLKKTATGWMTTINGKELKVEGQITYYNRYKRQNVVKDLSVELDRLSEESVNNDISSWTKGRSGEALSLLKKRFSHRPVQEKFVCLNCGFETHADEQAALNIARSWLFLRSQEYKKYQTNKTTGNTDKRAFVETWQSFYRKKLKEVWKPAV

SEQ ID NO: 44458 - protein, 979 aa, synthetic construct
  REGION 1..979: note = engineered CasX variant
QEIKRINKIRRRLVKDSNTKKAGKTGPMKTLLVRVMTPDLRERLENLRKKPENIPQPISNTSRANLNKLLTDYTEMKKAILHVYWEEFQKDPVGLMSRVAQPASKKIDQNKLKPEMDEKGNLTTAGFACSQCGQPLFVYKLEQVSEKGKAYTNYFGRCNVAEHEKLILLAQLKPEKDSDEAVTYSLGKFGQRALDFYSIHVTKESTHPVKPLAQIAGNRYASSPVGKALSDACMGTIASFLSKYQDIIIEHQKVVKGNQKRLESLRELAGKENLEYPSVTLPPQPHTKEGVDAYNEVIARVRMWVNLNLWQKLKLSRDDAKPLLRLKGFPSFPLVERQANEVDWWDMVCNVKKLINEKKEDGKVFWQNLAGYKRQEALRPYLSSEEDRKKGKKFARTQLGDLLLHLEKKHGEYDWGKVYDEAWERIDKKVEGLSKHIKLEEERRSEDAQSKAALTDWLRAKASFVIEGLKEADKDEFCRCELKLQKWYGDLRGKPFAIEAENSILDISGFSKQYNCAFIWQKDGVKKLNLYLIINYFKGGKLRFKKIKPEAFEANRFYTVINKKSGEIVPMEVNFNFDDPNLIILPLAFGKRQGREFIWNDLLSLETGSLKLANGRVIEKTLYNRRTRQDEPALFVALTFERREVLDSSNIKPMNLIGVDRGENIPAVIALTDPEGCPLSRFKDSLGNPTHILRIGESYKEKQRTIQAKKEVEQRRAGGYSRKYASKAKNLADDMVRNTARDLLYYAVTQDAMLIFENLSRGFGRQGKRTFMAERQYTRMEDWLTAKLAYEGLPSKTYLSKTLAQYTSKTCSNCGFTITSADYDRVLEKLKKTATGWMTTINGKELKVEGQITYYNRYKRQNVVKDLSVELDRLSEESVNNDISSWTKGRSGEALSLLKKRFSHRPVQEKFVCLNCGFETHADEQAALNIARSWLFLRSQEYKKYQTNKTTGNTDKRAFVETWQSFYRKKLKEVWKPAV

SEQ ID NO: 44459 - protein, 979 aa, synthetic construct
  REGION 1..979: note = engineered CasX variant
QEIKRINKIRRRLVKDSNTKKAGKTGPMKTLLVRVMTPDLRERLENLRKKPENIPQPISNTSRANLNKLLTDYTEMKKAILHVYWEEFQKDPVGLMSRVAQPASKKIDQNKLKPEMDEKGNLTTAGFACSQCGQPLFVYKLEQVSEKGKAYTNYFGRCNVAEHEKLILLAQLKPEKDSDEAVTYSLGKFGQRALDFYSIHVTKESTHPVKPLAQIAGNRYASTPVGKALSDACMGTIASFLSKYQDIIIEHQKVVKGNQKRLESLRELAGKENLEYPSVTLPPQPHTKEGVDAYNEVIARVRMWVNLNLWQKLKLSRDDAKPLLRLKGFPSFPLVERQANEVDWWDMVCNVKKLINEKKEDGKVFWQNLAGYKRQEALRPYLSSEEDRKKGKKFARTQLGDLLLHLEKKHGEYDWGKVYDEAWERIDKKVEGLSKHIKLEEERRSEDAQSKAALTDWLRAKASFVIEGLKEADKDEFCRCELKLQKWYGDLRGKPFAIEAENSILDISGFSKQYNCAFIWQKDGVKKLNLYLIINYFKGGKLRFKKIKPEAFEANRFYTVINKKSGEIVPMEVNFNFDDPNLIILPLAFGKRQGREFIWNDLLSLETGSLKLANGRVIEKTLYNRRTRQDEPALFVALTFERREVLDSSNIKPMNLIGVDRGENIPAVIALTDPEGCPLSRFKDSLGNPTHILRIGESYKEKQRTIQAKKEVEQRRAGGYSRKYASKAKNLADDMVRNTARDLLYYAVTQDAMLIFENLSRGFGRQGKRTFMAERQYTRMEDWLTAKLAYEGLPSKTYLSKTLAQYTSKTCSNCGFTITSADYDRVLEKLKKTATGWMTTINGKELKVEGQITYYNRYKRQNVVKDLSVELDRLSEESVNNDISSWTKGRSGEALSLLKKRFSHRPVQEKFVCLNCGFETHADEQAALNIARSWLFLRSQEYKKYQTNKTTGNTDKRAFVETWQSFYRKKLKEVWKPAV

SEQ ID NO: 44460 - protein, 979 aa, synthetic construct
  REGION 1..979: note = engineered CasX variant
QEIKRINKIRRRLVKDSNTKKAGKTGPMKTLLVRVMTPDLRERLENLRKKPENIPQPISNTSRANLNKLLTDYTEMKKAILHVYWEEFQKDPVGLMSRVAQPASKKIDQNKLKPEMDEKGNLTTAGFACSQCGQPLFVYKLEQVSEKGKAYTNYFGRCNVAEHEKLILLAQLKPEKDSDEAVTYSLGKFGQRALDFYSIHVTKESTHPVKPLAQIAGNRYASAPVGKALSDACMGTIASFLSKYQDIIIEHQKVVKGNQKRLESLRELAGKENLEYPSVTLPPQPHTKEGVDAYNEVIARVRMWVNLNLWQKLKLSRDDAKPLLRLKGFPSFPLVERQANEVDWWDMVCNVKKLINEKKEDGKVFWQNLAGYKRQEALRPYLSSEEDRKKGKKFARTQLGDLLLHLEKKHGEYDWGKVYDEAWERIDKKVEGLSKHIKLEEERRSEDAQSKAALTDWLRAKASFVIEGLKEADKDEFCRCELKLQKWYGDLRGKPFAIEAENSILDISGFSKQYNCAFIWQKDGVKKLNLYLIINYFKGGKLRFKKIKPEAFEANRFYTVINKKSGEIVPMEVNFNFDDPNLIILPLAFGKRQGREFIWNDLLSLETGSLKLANGRVIEKTLYNRRTRQDEPALFVALTFERREVLDSSNIKPMNLIGVDRGENIPAVIALTDPEGCPLSRFKDSLGNPTHILRIGESYKEKQRTIQAKKEVEQRRAGGYSRKYASKAKNLADDMVRNTARDLLYYAVTQDAMLIFENLSRGFGRQGKRTFMAERQYTRMEDWLTAKLAYEGLPSKTYLSKTLAQYTSKTCSNCGFTITSADYDRVLEKLKKTATGWMTTINGKELKVEGQITYYNRYKRQNVVKDLSVELDRLSEESVNNDISSWTKGRSGEALSLLKKRFSHRPVQEKFVCLNCGFETHADEQAALNIARSWLFLRSQEYKKYQTNKTTGNTDKRAFVETWQSFYRKKLKEVWKPAV

SEQ ID NO: 44461 - protein, 979 aa, synthetic construct
  REGION 1..979: note = engineered CasX variant
QEIKRINKIRRRLVKDSNTKKAGKTGPMKTLLVRVMTPDLRERLENLRKKPENIPQPISNTSRANLNKLLTDYTEMKKAILHVYWEEFQKDPVGLMSRVAQPASKKIDQNKLKPEMDEKGNLTTAGFACSQCGQPLFVYKLEQVSEKGKAYTNYFGRCNVAEHEKLILLAQLKPEKDSDEAVTYSLGKFGQRALDFYSIHVTKESTHPVKPLAQIAGNRYASVPVGKALSDACMGTIASFLSKYQDIIIEHQKVVKGNQKRLESLRELAGKENLEYPSVTLPPQPHTKEGVDAYNEVIARVRMWVNLNLWQKLKLSRDDAKPLLRLKGFPSFPLVERQANEVDWWDMVCNVKKLINEKKEDGKVFWQNLAGYKRQEALRPYLSSEEDRKKGKKFARTQLGDLLLHLEKKHGEYDWGKVYDEAWERIDKKVEGLSKHIKLEEERRSEDAQSKAALTDWLRAKASFVIEGLKEADKDEFCRCELKLQKWYGDLRGKPFAIEAENSILDISGFSKQYNCAFIWQKDGVKKLNLYLIINYFKGGKLRFKKIKPEAFEANRFYTVINKKSGEIVPMEVNFNFDDPNLIILPLAFGKRQGREFIWNDLLSLETGSLKLANGRVIEKTLYNRRTRQDEPALFVALTFERREVLDSSNIKPMNLIGVDRGENIPAVIALTDPEGCPLSRFKDSLGNPTHILRIGESYKEKQRTIQAKKEVEQRRAGGYSRKYASKAKNLADDMVRNTARDLLYYAVTQDAMLIFENLSRGFGRQGKRTFMAERQYTRMEDWLTAKLAYEGLPSKTYLSKTLAQYTSKTCSNCGFTITSADYDRVLEKLKKTATGWMTTINGKELKVEGQITYYNRYKRQNVVKDLSVELDRLSEESVNNDISSWTKGRSGEALSLLKKRFSHRPVQEKFVCLNCGFETHADEQAALNIARSWLFLRSQEYKKYQTNKTTGNTDKRAFVETWQSFYRKKLKEVWKPAV

SEQ ID NO: 44462 - protein, 979 aa, synthetic construct
  REGION 1..979: note = engineered CasX variant
QEIKRINKIRRRLVKDSNTKKAGKTGPMKTLLVRVMTPDLRERLENLRKKPENIPQPISNTSRANLNKLLTDYTEMKKAILHVYWEEFQKDPVGLMSRVAQPASKKIDQNKLKPEMDEKGNLTTAGFACSQCGQPLFVYKLEQVSEKGKAYTNYFGRCNVAEHEKLIKLAQLKPEKDSDEAVTYSLGKFGQRALDFYSIHVTKESTHPVKPLAQIAGNRYASGPVGKALSDACMGTIASFLSKYQDIIIEHQKVVKGNQKRLESLRELAGKENLEYPSVTLPPQPHTKEGVDAYNEVIARVRMWVNLNLWQKLKLSRDDAKPLLRLKGFPSFPLVERQANEVDWWDMVCNVKKLINEKKEDGKVFWQNLAGYKRQEALRPYLSSEEDRKKGKKFARTQLGDLLLHLEKKHGEYDWGKVYDEAWERIDKKVEGLSKHIKLEEERRSEDAQSKAALTDWLRAKASFVIEGLKEADKDEFCRCELKLQKWYGDLRGKPFAIEAENSILDISGFSKQYNCAFIWQKDGVKKLNLYLIINYFKGGKLRFKKIKPEAFEANRFYTVINKKSGEIVPMEVNFNFDDPNLIILPLAFGKRQGREFIWNDLLSLETGSLKLANGRVIEKTLYNRRTRQDEPALFVALTFERREVLDSSNIKPMNLIGVDRGENIPAVIALTDPEGCPLSRFKDSLGNPTHILRIGESYKEKQRTIQAKKEVEQRRAGGYSRKYASKAKNLADDMVRNTARDLLYYAVTQDAMLIFENLSRGFGRQGKRTFMAERQYTRMEDWLTAKLAYEGLPSKTYLSKTLAQYTSKTCSNCGFTITSADYDRVLEKLKKTATGWMTTINGKELKVEGQITYYNRYKRQNVVKDLSVELDRLSEESVNNDISSWTKGRSGEALSLLKKRFSHRPVQEKFVCLNCGFETHADEQAALNIARSWLFLRSQEYKKYQTNKTTGNTDKRAFVETWQSFYRKKLKEVWKPAV

SEQ ID NO: 44463 - protein, 978 aa, synthetic construct
  REGION 1..978: note = engineered CasX variant
QEIKRINKIRRRLVKDSNTKKAGKTGPMKTLLVRVMTPDLRERLENLRKKPENIPQPISNTSRANLNKLLTDYTEMKKAILHVYWEEFQKDPVGLMSRVAQPASKKIDQNKLKPEMDEKGNLTTAGFACSQCGQPLFVYKLEQVSEKGKAYTNYFGRCNVAEHEKLILLAQLKPEKDSDEAVTYSLGKFGQRALDFYSIHVTKESTHPVKPLAQIAGNRYASPVGKALSDACMGTIASFLSKYQDIIIEHQKVVKGNQKRLESLRELAGKENLEYPSVTLPPQPHTKEGVDAYNEVIARVRMWVNLNLWQKLKLSRDDAKPLLRLKGFPSFPLVERQANEVDWWDMVCNVKKLINEKKEDGKVFWQNLAGYKRQEALRPYLSSEEDRKKGKKFARTQLGDLLLHLEKKHGEYDWGKVYDEAWERIDKKVEGLSKHIKLEEERRSEDAQSKAALTDWLRAKASFVIEGLKEADKDEFCRCELKLQKWYGDLRGKPFAIEAENSILDISGFSKQYNCAFIWQKDGVKKLNLYLIINYFKGGKLRFKKIKPEAFEANRFYTVINKKSGEIVPMEVNFNFDDPNLIILPLAFGKRQGREFIWNDLLSLETGSLKLANGRVIEKTLYNRRTRQDEPALFVALTFERREVLDSSNIKPMNLIGVDRGENIPAVIALTDPEGCPLSRFKDSLGNPTHILRIGESYKEKQRTIQAKKEVEQRRAGGYSRKYASKAKNLADDMVRNTARDLLYYAVTQDAMLIFENLSRGFGRQGKRTFMAERQYTRMEDWLTAKLAYEGLPSKTYLSKTLAQYTSKTCSNCGFTITSADYDRVLEKLKKTATGWMTTINGKELKVEGQITYYNRYKRQNVVKDLSVELDRLSEESVNNDISSWTKGRSGEALSLLKKRFSHRPVQEKFVCLNCGFETHADEQAALNIARSWLFLRSQEYKKYQTNKTTGNTDKRAFVETWQSFYRKKLKEVWKPAV

SEQ ID NO: 44464 - protein, 978 aa, synthetic construct
  REGION 1..978: note = engineered CasX variant
QEIKRINKIRRRLVKDSNTKKAGKTGPMKTLLVRVMTPDLRERLENLRKKPENIPQPISNTSRANLNKLLTDYTEMKKAILHVYWEEFQKDPVGLMSRVAQPASKKIDQNKLKPEMDEKGNLTTAGFACSQCGQPLFVYKLEQVSEKGKAYTNYFGRCNVAEHEKLILLAQLKPEKDSDEAVTYSLGKFGQRALDFYSIHVTKESTHPVKPLAQIAGNRYASYPVGKALSDACMGTIASFLSKYQDIIIEHQKVVKGNQKRLESLRELAGKENLEYPSVTLPPQPHTKEGVDAYNEVIARVRMWVNLNLWQKLKLSRDDAKPLLRLKGFPSFPLVERQANEVDWWDMVCNVKKLINEKKEDGKVFWQNLAGYKRQEALRPYLSSEEDRKKGKKFARTQLGDLLLHLEKKHGEDWGDVYDEAWERIDKKVEGLSKHIKLEEERRSEDAQSKAALTDWLRAKASFVIEGLKEADKDEFCRCELKLQKWYGDLRGKPFAIEAENSILDISGFSKQYNCAFIWQKDGVKKLNLYLIINYFKGGKLRFKKIKPEAFEANRFYTVINKKSGEIVPMEVNFNFDDPNLIILPLAFGKRQGREFIWNDLLSLETGSLKLANGRVIEKTLYNRRTRQDEPALFVALTFERREVLDSSNIKPMNLIGVDRGENIPAVIALTDPEGCPLSRFKDSLGNPTHILRIGESYKEKQRTIQAKKEVEQRRAGGYSRKYASKAKNLADDMVRNTARDLLYYAVTQDAMLIFENLSRGFGRQGKRTFMAERQYTRMEDWLTAKLAYEGLPSKTYLSKTLAQYTSKTCSNCGFTITSADYDRVLEKLKKTATGWMTTINGKELKVEGQITYYNRYKRQNVVKDLSVELDRLSEESVNNDISSWTKGRSGEALSLLKKRFSHRPVQEKFVCLNCGFETHADEQAALNIARSWLFLRSQEYKKYQTNKTTGNTDKRAFVETWQSFYRKKLKEVWKPAV

SEQ ID NO: 44465 - protein, 978 aa, synthetic construct
  REGION 1..978: note = engineered CasX variant
QEIKRINKIRRRLVKDSNTKKAGKTGPMKTLLVRVMTPDLRERLENLRKKPENIPQPISNTSRANLNKLLTDYTEMKKAILHVYWEEFQKDPVGLMSRVAQPASKKIDQNKLKPEMDEKGNLTTAGFACSQCGQPLFVYKLEQVSEKGKAYTNYFGRCNVAEHEKLILLAQLKPEKDSDEAVTYSLGKFGQRALDFYSIHVTKESTHPVKPLAQIAGNRYASHPVGKALSDACMGTIASFLSKYQDIIIEHQKVVKGNQKRLESLRELAGKENLEYPSVTLPPQPHTKEGVDAYNEVIARVRMWVNLNLWQKLKLSRDDAKPLLRLKGFPSFPLVERQANEVDWWDMVCNVKKLINEKKEDGKVFWQNLAGYKRQEALRPYLSSEEDRKKGKKFARTQLGDLLLHLEKKHGEDWGDVYDEAWERIDKKVEGLSKHIKLEEERRSEDAQSKAALTDWLRAKASFVIEGLKEADKDEFCRCELKLQKWYGDLRGKPFAIEAENSILDISGFSKQYNCAFIWQKDGVKKLNLYLIINYFKGGKLRFKKIKPEAFEANRFYTVINKKSGEIVPMEVNFNFDDPNLIILPLAFGKRQGREFIWNDLLSLETGSLKLANGRVIEKTLYNRRTRQDEPALFVALTFERREVLDSSNIKPMNLIGVDRGENIPAVIALTDPEGCPLSRFKDSLGNPTHILRIGESYKEKQRTIQAKKEVEQRRAGGYSRKYASKAKNLADDMVRNTARDLLYYAVTQDAMLIFENLSRGFGRQGKRTFMAERQYTRMEDWLTAKLAYEGLPSKTYLSKTLAQYTSKTCSNCGFTITSADYDRVLEKLKKTATGWMTTINGKELKVEGQITYYNRYKRQNVVKDLSVELDRLSEESVNNDISSWTKGRSGEALSLLKKRFSHRPVQEKFVCLNCGFETHADEQAALNIARSWLFLRSQEYKKYQTNKTTGNTDKRAFVETWQSFYRKKLKEVWKPAV

SEQ ID NO: 44466 - protein, 978 aa, synthetic construct
  REGION 1..978: note = engineered CasX variant
QEIKRINKIRRRLVKDSNTKKAGKTGPMKTLLVRVMTPDLRERLENLRKKPENIPQPISNTSRANLNKLLTDYTEMKKAILHVYWEEFQKDPVGLMSRVAQPASKKIDQNKLKPEMDEKGNLTTAGFACSQCGQPLFVYKLEQVSEKGKAYTNYFGRCNVAEHEKLILLAQLKPEKDSDEAVTYSLGKFGQRALDFYSIHVTKESTHPVKPLAQIAGNRYASSPVGKALSDACMGTIASFLSKYQDIIIEHQKVVKGNQKRLESLRELAGKENLEYPSVTLPPQPHTKEGVDAYNEVIARVRMWVNLNLWQKLKLSRDDAKPLLRLKGFPSFPLVERQANEVDWWDMVCNVKKLINEKKEDGKVFWQNLAGYKRQEALRPYLSSEEDRKKGKKFARTQLGDLLLHLEKKHGEDWGDVYDEAWERIDKKVEGLSKHIKLEEERRSEDAQSKAALTDWLRAKASFVIEGLKEADKDEFCRCELKLQKWYGDLRGKPFAIEAENSILDISGFSKQYNCAFIWQKDGVKKLNLYLIINYFKGGKLRFKKIKPEAFEANRFYTVINKKSGEIVPMEVNFNFDDPNLIILPLAFGKRQGREFIWNDLLSLETGSLKLANGRVIEKTLYNRRTRQDEPALFVALTFERREVLDSSNIKPMNLIGVDRGENIPAVIALTDPEGCPLSRFKDSLGNPTHILRIGESYKEKQRTIQAKKEVEQRRAGGYSRKYASKAKNLADDMVRNTARDLLYYAVTQDAMLIFENLSRGFGRQGKRTFMAERQYTRMEDWLTAKLAYEGLPSKTYLSKTLAQYTSKTCSNCGFTITSADYDRVLEKLKKTATGWMTTINGKELKVEGQITYYNRYKRQNVVKDLSVELDRLSEESVNNDISSWTKGRSGEALSLLKKRFSHRPVQEKFVCLNCGFETHADEQAALNIARSWLFLRSQEYKKYQTNKTTGNTDKRAFVETWQSFYRKKLKEVWKPAV

SEQ ID NO: 44467 - protein, 978 aa, synthetic construct
  REGION 1..978: note = engineered CasX variant
QEIKRINKIRRRLVKDSNTKKAGKTGPMKTLLVRVMTPDLRERLENLRKKPENIPQPISNTSRANLNKLLTDYTEMKKAILHVYWEEFQKDPVGLMSRVAQPASKKIDQNKLKPEMDEKGNLTTAGFACSQCGQPLFVYKLEQVSEKGKAYTNYFGRCNVAEHEKLILLAQLKPEKDSDEAVTYSLGKFGQRALDFYSIHVTKESTHPVKPLAQIAGNRYASTPVGKALSDACMGTIASFLSKYQDIIIEHQKVVKGNQKRLESLRELAGKENLEYPSVTLPPQPHTKEGVDAYNEVIARVRMWVNLNLWQKLKLSRDDAKPLLRLKGFPSFPLVERQANEVDWWDMVCNVKKLINEKKEDGKVFWQNLAGYKRQEALRPYLSSEEDRKKGKKFARTQLGDLLLHLEKKHGEDWGDVYDEAWERIDKKVEGLSKHIKLEEERRSEDAQSKAALTDWLRAKASFVIEGLKEADKDEFCRCELKLQKWYGDLRGKPFAIEAENSILDISGFSKQYNCAFIWQKDGVKKLNLYLIINYFKGGKLRFKKIKPEAFEANRFYTVINKKSGEIVPMEVNFNFDDPNLIILPLAFGKRQGREFIWNDLLSLETGSLKLANGRVIEKTLYNRRTRQDEPALFVALTFERREVLDSSNIKPMNLIGVDRGENIPAVIALTDPEGCPLSRFKDSLGNPTHILRIGESYKEKQRTIQAKKEVEQRRAGGYSRKYASKAKNLADDMVRNTARDLLYYAVTQDAMLIFENLSRGFGRQGKRTFMAERQYTRMEDWLTAKLAYEGLPSKTYLSKTLAQYTSKTCSNCGFTITSADYDRVLEKLKKTATGWMTTINGKELKVEGQITYYNRYKRQNVVKDLSVELDRLSEESVNNDISSWTKGRSGEALSLLKKRFSHRPVQEKFVCLNCGFETHADEQAALNIARSWLFLRSQEYKKYQTNKTTGNTDKRAFVETWQSFYRKKLKEVWKPAV

SEQ ID NO: 44468 - protein, 978 aa, synthetic construct
  REGION 1..978: note = engineered CasX variant
QEIKRINKIRRRLVKDSNTKKAGKTGPMKTLLVRVMTPDLRERLENLRKKPENIPQPISNTSRANLNKLLTDYTEMKKAILHVYWEEFQKDPVGLMSRVAQPASKKIDQNKLKPEMDEKGNLTTAGFACSQCGQPLFVYKLEQVSEKGKAYTNYFGRCNVAEHEKLILLAQLKPEKDSDEAVTYSLGKFGQRALDFYSIHVTKESTHPVKPLAQIAGNRYASAPVGKALSDACMGTIASFLSKYQDIIIEHQKVVKGNQKRLESLRELAGKENLEYPSVTLPPQPHTKEGVDAYNEVIARVRMWVNLNLWQKLKLSRDDAKPLLRLKGFPSFPLVERQANEVDWWDMVCNVKKLINEKKEDGKVFWQNLAGYKRQEALRPYLSSEEDRKKGKKFARTQLGDLLLHLEKKHGEDWGDVYDEAWERIDKKVEGLSKHIKLEEERRSEDAQSKAALTDWLRAKASFVIEGLKEADKDEFCRCELKLQKWYGDLRGKPFAIEAENSILDISGFSKQYNCAFIWQKDGVKKLNLYLIINYFKGGKLRFKKIKPEAFEANRFYTVINKKSGEIVPMEVNFNFDDPNLIILPLAFGKRQGREFIWNDLLSLETGSLKLANGRVIEKTLYNRRTRQDEPALFVALTFERREVLDSSNIKPMNLIGVDRGENIPAVIALTDPEGCPLSRFKDSLGNPTHILRIGESYKEKQRTIQAKKEVEQRRAGGYSRKYASKAKNLADDMVRNTARDLLYYAVTQDAMLIFENLSRGFGRQGKRTFMAERQYTRMEDWLTAKLAYEGLPSKTYLSKTLAQYTSKTCSNCGFTITSADYDRVLEKLKKTATGWMTTINGKELKVEGQITYYNRYKRQNVVKDLSVELDRLSEESVNNDISSWTKGRSGEALSLLKKRFSHRPVQEKFVCLNCGFETHADEQAALNIARSWLFLRSQEYKKYQTNKTTGNTDKRAFVETWQSFYRKKLKEVWKPAV

SEQ ID NO: 44469 - protein, 978 aa, synthetic construct
  REGION 1..978: note = engineered CasX variant
QEIKRINKIRRRLVKDSNTKKAGKTGPMKTLLVRVMTPDLRERLENLRKKPENIPQPISNTSRANLNKLLTDYTEMKKAILHVYWEEFQKDPVGLMSRVAQPASKKIDQNKLKPEMDEKGNLTTAGFACSQCGQPLFVYKLEQVSEKGKAYTNYFGRCNVAEHEKLILLAQLKPEKDSDEAVTYSLGKFGQRALDFYSIHVTKESTHPVKPLAQIAGNRYASVPVGKALSDACMGTIASFLSKYQDIIIEHQKVVKGNQKRLESLRELAGKENLEYPSVTLPPQPHTKEGVDAYNEVIARVRMWVNLNLWQKLKLSRDDAKPLLRLKGFPSFPLVERQANEVDWWDMVCNVKKLINEKKEDGKVFWQNLAGYKRQEALRPYLSSEEDRKKGKKFARTQLGDLLLHLEKKHGEDWGDVYDEAWERIDKKVEGLSKHIKLEEERRSEDAQSKAALTDWLRAKASFVIEGLKEADKDEFCRCELKLQKWYGDLRGKPFAIEAENSILDISGFSKQYNCAFIWQKDGVKKLNLYLIINYFKGGKLRFKKIKPEAFEANRFYTVINKKSGEIVPMEVNFNFDDPNLIILPLAFGKRQGREFIWNDLLSLETGSLKLANGRVIEKTLYNRRTRQDEPALFVALTFERREVLDSSNIKPMNLIGVDRGENIPAVIALTDPEGCPLSRFKDSLGNPTHILRIGESYKEKQRTIQAKKEVEQRRAGGYSRKYASKAKNLADDMVRNTARDLLYYAVTQDAMLIFENLSRGFGRQGKRTFMAERQYTRMEDWLTAKLAYEGLPSKTYLSKTLAQYTSKTCSNCGFTITSADYDRVLEKLKKTATGWMTTINGKELKVEGQITYYNRYKRQNVVKDLSVELDRLSEESVNNDISSWTKGRSGEALSLLKKRFSHRPVQEKFVCLNCGFETHADEQAALNIARSWLFLRSQEYKKYQTNKTTGNTDKRAFVETWQSFYRKKLKEVWKPAV

SEQ ID NO: 44470 - protein, 978 aa, synthetic construct
  REGION 1..978: note = engineered CasX variant
QEIKRINKIRRRLVKDSNTKKAGKTGPMKTLLVRVMTPDLRERLENLRKKPENIPQPISNTSRANLNKLLTDYTEMKKAILHVYWEEFQKDPVGLMSRVAQPASKKIDQNKLKPEMDEKGNLTTAGFACSQCGQPLFVYKLEQVSEKGKAYTNYFGRCNVAEHEKLIKLAQLKPEKDSDEAVTYSLGKFGQRALDFYSIHVTKESTHPVKPLAQIAGNRYASGPVGKALSDACMGTIASFLSKYQDIIIEHQKVVKGNQKRLESLRELAGKENLEYPSVTLPPQPHTKEGVDAYNEVIARVRMWVNLNLWQKLKLSRDDAKPLLRLKGFPSFPLVERQANEVDWWDMVCNVKKLINEKKEDGKVFWQNLAGYKRQEALRPYLSSEEDRKKGKKFARTQLGDLLLHLEKKHGEDWGDVYDEAWERIDKKVEGLSKHIKLEEERRSEDAQSKAALTDWLRAKASFVIEGLKEADKDEFCRCELKLQKWYGDLRGKPFAIEAENSILDISGFSKQYNCAFIWQKDGVKKLNLYLIINYFKGGKLRFKKIKPEAFEANRFYTVINKKSGEIVPMEVNFNFDDPNLIILPLAFGKRQGREFIWNDLLSLETGSLKLANGRVIEKTLYNRRTRQDEPALFVALTFERREVLDSSNIKPMNLIGVDRGENIPAVIALTDPEGCPLSRFKDSLGNPTHILRIGESYKEKQRTIQAKKEVEQRRAGGYSRKYASKAKNLADDMVRNTARDLLYYAVTQDAMLIFENLSRGFGRQGKRTFMAERQYTRMEDWLTAKLAYEGLPSKTYLSKTLAQYTSKTCSNCGFTITSADYDRVLEKLKKTATGWMTTINGKELKVEGQITYYNRYKRQNVVKDLSVELDRLSEESVNNDISSWTKGRSGEALSLLKKRFSHRPVQEKFVCLNCGFETHADEQAALNIARSWLFLRSQEYKKYQTNKTTGNTDKRAFVETWQSFYRKKLKEVWKPAV

SEQ ID NO: 44471 - protein, 977 aa, synthetic construct
  REGION 1..977: note = engineered CasX variant
QEIKRINKIRRRLVKDSNTKKAGKTGPMKTLLVRVMTPDLRERLENLRKKPENIPQPISNTSRANLNKLLTDYTEMKKAILHVYWEEFQKDPVGLMSRVAQPASKKIDQNKLKPEMDEKGNLTTAGFACSQCGQPLFVYKLEQVSEKGKAYTNYFGRCNVAEHEKLILLAQLKPEKDSDEAVTYSLGKFGQRALDFYSIHVTKESTHPVKPLAQIAGNRYASPVGKALSDACMGTIASFLSKYQDIIIEHQKVVKGNQKRLESLRELAGKENLEYPSVTLPPQPHTKEGVDAYNEVIARVRMWVNLNLWQKLKLSRDDAKPLLRLKGFPSFPLVERQANEVDWWDMVCNVKKLINEKKEDGKVFWQNLAGYKRQEALRPYLSSEEDRKKGKKFARTQLGDLLLHLEKKHGEDWGDVYDEAWERIDKKVEGLSKHIKLEEERRSEDAQSKAALTDWLRAKASFVIEGLKEADKDEFCRCELKLQKWYGDLRGKPFAIEAENSILDISGFSKQYNCAFIWQKDGVKKLNLYLIINYFKGGKLRFKKIKPEAFEANRFYTVINKKSGEIVPMEVNFNFDDPNLIILPLAFGKRQGREFIWNDLLSLETGSLKLANGRVIEKTLYNRRTRQDEPALFVALTFERREVLDSSNIKPMNLIGVDRGENIPAVIALTDPEGCPLSRFKDSLGNPTHILRIGESYKEKQRTIQAKKEVEQRRAGGYSRKYASKAKNLADDMVRNTARDLLYYAVTQDAMLIFENLSRGFGRQGKRTFMAERQYTRMEDWLTAKLAYEGLPSKTYLSKTLAQYTSKTCSNCGFTITSADYDRVLEKLKKTATGWMTTINGKELKVEGQITYYNRYKRQNVVKDLSVELDRLSEESVNNDISSWTKGRSGEALSLLKKRFSHRPVQEKFVCLNCGFETHADEQAALNIARSWLFLRSQEYKKYQTNKTTGNTDKRAFVETWQSFYRKKLKEVWKPAV

SEQ ID NO: 44472 - protein, 978 aa, synthetic construct
  REGION 1..978: note = engineered CasX variant
QEIKRINKIRRRLVKDSNTKKAGKTGPMKTLLVRVMTPDLRERLENLRKKPENIPQPISNTSRANLNKLLTDYTEMKKAILHVYWEEFQKDPVGLMSRVAQPASKKIDQNKLKPEMDEKGNLTTAGFACSQCGQPLFVYKLEQVSEKGKAYTNYFGRCNVAEHEKLILLAQLKPEKDSDEAVTYSLGKFGQRALDFYSIHVTKESTHPVKPLAQIAGNRYASYPVGKALSDACMGTIASFLSKYQDIIIEHQKVVKGNQKRLESLRELAGKENLEYPSVTLPPQPHTKEGVDAYNEVIARVRMWVNLNLWQKLKLSRDDAKPLLRLKGFPSFPLVERQANEVDWWDMVCNVKKLINEKKEDGKVFWQNLAGYKRQEALRPYLSSEEDRKKGKKFARTQLGDLLLHLEKKHGEDWGKVYGEAWERIDKKVEGLSKHIKLEEERRSEDAQSKAALTDWLRAKASFVIEGLKEADKDEFCRCELKLQKWYGDLRGKPFAIEAENSILDISGFSKQYNCAFIWQKDGVKKLNLYLIINYFKGGKLRFKKIKPEAFEANRFYTVINKKSGEIVPMEVNFNFDDPNLIILPLAFGKRQGREFIWNDLLSLETGSLKLANGRVIEKTLYNRRTRQDEPALFVALTFERREVLDSSNIKPMNLIGVDRGENIPAVIALTDPEGCPLSRFKDSLGNPTHILRIGESYKEKQRTIQAKKEVEQRRAGGYSRKYASKAKNLADDMVRNTARDLLYYAVTQDAMLIFENLSRGFGRQGKRTFMAERQYTRMEDWLTAKLAYEGLPSKTYLSKTLAQYTSKTCSNCGFTITSADYDRVLEKLKKTATGWMTTINGKELKVEGQITYYNRYKRQNVVKDLSVELDRLSEESVNNDISSWTKGRSGEALSLLKKRFSHRPVQEKFVCLNCGFETHADEQAALNIARSWLFLRSQEYKKYQTNKTTGNTDKRAFVETWQSFYRKKLKEVWKPAV

SEQ ID NO: 44473 - protein, 978 aa, synthetic construct
  REGION 1..978: note = engineered CasX variant
QEIKRINKIRRRLVKDSNTKKAGKTGPMKTLLVRVMTPDLRERLENLRKKPENIPQPISNTSRANLNKLLTDYTEMKKAILHVYWEEFQKDPVGLMSRVAQPASKKIDQNKLKPEMDEKGNLTTAGFACSQCGQPLFVYKLEQVSEKGKAYTNYFGRCNVAEHEKLILLAQLKPEKDSDEAVTYSLGKFGQRALDFYSIHVTKESTHPVKPLAQIAGNRYASHPVGKALSDACMGTIASFLSKYQDIIIEHQKVVKGNQKRLESLRELAGKENLEYPSVTLPPQPHTKEGVDAYNEVIARVRMWVNLNLWQKLKLSRDDAKPLLRLKGFPSFPLVERQANEVDWWDMVCNVKKLINEKKEDGKVFWQNLAGYKRQEALRPYLSSEEDRKKGKKFARTQLGDLLLHLEKKHGEDWGKVYGEAWERIDKKVEGLSKHIKLEEERRSEDAQSKAALTDWLRAKASFVIEGLKEADKDEFCRCELKLQKWYGDLRGKPFAIEAENSILDISGFSKQYNCAFIWQKDGVKKLNLYLIINYFKGGKLRFKKIKPEAFEANRFYTVINKKSGEIVPMEVNFNFDDPNLIILPLAFGKRQGREFIWNDLLSLETGSLKLANGRVIEKTLYNRRTRQDEPALFVALTFERREVLDSSNIKPMNLIGVDRGENIPAVIALTDPEGCPLSRFKDSLGNPTHILRIGESYKEKQRTIQAKKEVEQRRAGGYSRKYASKAKNLADDMVRNTARDLLYYAVTQDAMLIFENLSRGFGRQGKRTFMAERQYTRMEDWLTAKLAYEGLPSKTYLSKTLAQYTSKTCSNCGFTITSADYDRVLEKLKKTATGWMTTINGKELKVEGQITYYNRYKRQNVVKDLSVELDRLSEESVNNDISSWTKGRSGEALSLLKKRFSHRPVQEKFVCLNCGFETHADEQAALNIARSWLFLRSQEYKKYQTNKTTGNTDKRAFVETWQSFYRKKLKEVWKPAV

SEQ ID NO: 44474 - protein, 978 aa, synthetic construct
  REGION 1..978: note = engineered CasX variant
QEIKRINKIRRRLVKDSNTKKAGKTGPMKTLLVRVMTPDLRERLENLRKKPENIPQPISNTSRANLNKLLTDYTEMKKAILHVYWEEFQKDPVGLMSRVAQPASKKIDQNKLKPEMDEKGNLTTAGFACSQCGQPLFVYKLEQVSEKGKAYTNYFGRCNVAEHEKLILLAQLKPEKDSDEAVTYSLGKFGQRALDFYSIHVTKESTHPVKPLAQIAGNRYASSPVGKALSDACMGTIASFLSKYQDIIIEHQKVVKGNQKRLESLRELAGKENLEYPSVTLPPQPHTKEGVDAYNEVIARVRMWVNLNLWQKLKLSRDDAKPLLRLKGFPSFPLVERQANEVDWWDMVCNVKKLINEKKEDGKVFWQNLAGYKRQEALRPYLSSEEDRKKGKKFARTQLGDLLLHLEKKHGEDWGKVYGEAWERIDKKVEGLSKHIKLEEERRSEDAQSKAALTDWLRAKASFVIEGLKEADKDEFCRCELKLQKWYGDLRGKPFAIEAENSILDISGFSKQYNCAFIWQKDGVKKLNLYLIINYFKGGKLRFKKIKPEAFEANRFYTVINKKSGEIVPMEVNFNFDDPNLIILPLAFGKRQGREFIWNDLLSLETGSLKLANGRVIEKTLYNRRTRQDEPALFVALTFERREVLDSSNIKPMNLIGVDRGENIPAVIALTDPEGCPLSRFKDSLGNPTHILRIGESYKEKQRTIQAKKEVEQRRAGGYSRKYASKAKNLADDMVRNTARDLLYYAVTQDAMLIFENLSRGFGRQGKRTFMAERQYTRMEDWLTAKLAYEGLPSKTYLSKTLAQYTSKTCSNCGFTITSADYDRVLEKLKKTATGWMTTINGKELKVEGQITYYNRYKRQNVVKDLSVELDRLSEESVNNDISSWTKGRSGEALSLLKKRFSHRPVQEKFVCLNCGFETHADEQAALNIARSWLFLRSQEYKKYQTNKTTGNTDKRAFVETWQSFYRKKLKEVWKPAV

SEQ ID NO: 44475 - protein, 978 aa, synthetic construct
  REGION 1..978: note = engineered CasX variant
QEIKRINKIRRRLVKDSNTKKAGKTGPMKTLLVRVMTPDLRERLENLRKKPENIPQPISNTSRANLNKLLTDYTEMKKAILHVYWEEFQKDPVGLMSRVAQPASKKIDQNKLKPEMDEKGNLTTAGFACSQCGQPLFVYKLEQVSEKGKAYTNYFGRCNVAEHEKLILLAQLKPEKDSDEAVTYSLGKFGQRALDFYSIHVTKESTHPVKPLAQIAGNRYASTPVGKALSDACMGTIASFLSKYQDIIIEHQKVVKGNQKRLESLRELAGKENLEYPSVTLPPQPHTKEGVDAYNEVIARVRMWVNLNLWQKLKLSRDDAKPLLRLKGFPSFPLVERQANEVDWWDMVCNVKKLINEKKEDGKVFWQNLAGYKRQEALRPYLSSEEDRKKGKKFARTQLGDLLLHLEKKHGEDWGKVYGEAWERIDKKVEGLSKHIKLEEERRSEDAQSKAALTDWLRAKASFVIEGLKEADKDEFCRCELKLQKWYGDLRGKPFAIEAENSILDISGFSKQYNCAFIWQKDGVKKLNLYLIINYFKGGKLRFKKIKPEAFEANRFYTVINKKSGEIVPMEVNFNFDDPNLIILPLAFGKRQGREFIWNDLLSLETGSLKLANGRVIEKTLYNRRTRQDEPALFVALTFERREVLDSSNIKPMNLIGVDRGENIPAVIALTDPEGCPLSRFKDSLGNPTHILRIGESYKEKQRTIQAKKEVEQRRAGGYSRKYASKAKNLADDMVRNTARDLLYYAVTQDAMLIFENLSRGFGRQGKRTFMAERQYTRMEDWLTAKLAYEGLPSKTYLSKTLAQYTSKTCSNCGFTITSADYDRVLEKLKKTATGWMTTINGKELKVEGQITYYNRYKRQNVVKDLSVELDRLSEESVNNDISSWTKGRSGEALSLLKKRFSHRPVQEKFVCLNCGFETHADEQAALNIARSWLFLRSQEYKKYQTNKTTGNTDKRAFVETWQSFYRKKLKEVWKPAV

SEQ ID NO: 44476 - protein, 978 aa, synthetic construct
  REGION 1..978: note = engineered CasX variant
QEIKRINKIRRRLVKDSNTKKAGKTGPMKTLLVRVMTPDLRERLENLRKKPENIPQPISNTSRANLNKLLTDYTEMKKAILHVYWEEFQKDPVGLMSRVAQPASKKIDQNKLKPEMDEKGNLTTAGFACSQCGQPLFVYKLEQVSEKGKAYTNYFGRCNVAEHEKLILLAQLKPEKDSDEAVTYSLGKFGQRALDFYSIHVTKESTHPVKPLAQIAGNRYASAPVGKALSDACMGTIASFLSKYQDIIIEHQKVVKGNQKRLESLRELAGKENLEYPSVTLPPQPHTKEGVDAYNEVIARVRMWVNLNLWQKLKLSRDDAKPLLRLKGFPSFPLVERQANEVDWWDMVCNVKKLINEKKEDGKVFWQNLAGYKRQEALRPYLSSEEDRKKGKKFARTQLGDLLLHLEKKHGEDWGKVYGEAWERIDKKVEGLSKHIKLEEERRSEDAQSKAALTDWLRAKASFVIEGLKEADKDEFCRCELKLQKWYGDLRGKPFAIEAENSILDISGFSKQYNCAFIWQKDGVKKLNLYLIINYFKGGKLRFKKIKPEAFEANRFYTVINKKSGEIVPMEVNFNFDDPNLIILPLAFGKRQGREFIWNDLLSLETGSLKLANGRVIEKTLYNRRTRQDEPALFVALTFERREVLDSSNIKPMNLIGVDRGENIPAVIALTDPEGCPLSRFKDSLGNPTHILRIGESYKEKQRTIQAKKEVEQRRAGGYSRKYASKAKNLADDMVRNTARDLLYYAVTQDAMLIFENLSRGFGRQGKRTFMAERQYTRMEDWLTAKLAYEGLPSKTYLSKTLAQYTSKTCSNCGFTITSADYDRVLEKLKKTATGWMTTINGKELKVEGQITYYNRYKRQNVVKDLSVELDRLSEESVNNDISSWTKGRSGEALSLLKKRFSHRPVQEKFVCLNCGFETHADEQAALNIARSWLFLRSQEYKKYQTNKTTGNTDKRAFVETWQSFYRKKLKEVWKPAV

SEQ ID NO: 44477 - protein, 978 aa, synthetic construct
  REGION 1..978: note = engineered CasX variant
QEIKRINKIRRRLVKDSNTKKAGKTGPMKTLLVRVMTPDLRERLENLRKKPENIPQPISNTSRANLNKLLTDYTEMKKAILHVYWEEFQKDPVGLMSRVAQPASKKIDQNKLKPEMDEKGNLTTAGFACSQCGQPLFVYKLEQVSEKGKAYTNYFGRCNVAEHEKLILLAQLKPEKDSDEAVTYSLGKFGQRALDFYSIHVTKESTHPVKPLAQIAGNRYASVPVGKALSDACMGTIASFLSKYQDIIIEHQKVVKGNQKRLESLRELAGKENLEYPSVTLPPQPHTKEGVDAYNEVIARVRMWVNLNLWQKLKLSRDDAKPLLRLKGFPSFPLVERQANEVDWWDMVCNVKKLINEKKEDGKVFWQNLAGYKRQEALRPYLSSEEDRKKGKKFARTQLGDLLLHLEKKHGEDWGKVYGEAWERIDKKVEGLSKHIKLEEERRSEDAQSKAALTDWLRAKASFVIEGLKEADKDEFCRCELKLQKWYGDLRGKPFAIEAENSILDISGFSKQYNCAFIWQKDGVKKLNLYLIINYFKGGKLRFKKIKPEAFEANRFYTVINKKSGEIVPMEVNFNFDDPNLIILPLAFGKRQGREFIWNDLLSLETGSLKLANGRVIEKTLYNRRTRQDEPALFVALTFERREVLDSSNIKPMNLIGVDRGENIPAVIALTDPEGCPLSRFKDSLGNPTHILRIGESYKEKQRTIQAKKEVEQRRAGGYSRKYASKAKNLADDMVRNTARDLLYYAVTQDAMLIFENLSRGFGRQGKRTFMAERQYTRMEDWLTAKLAYEGLPSKTYLSKTLAQYTSKTCSNCGFTITSADYDRVLEKLKKTATGWMTTINGKELKVEGQITYYNRYKRQNVVKDLSVELDRLSEESVNNDISSWTKGRSGEALSLLKKRFSHRPVQEKFVCLNCGFETHADEQAALNIARSWLFLRSQEYKKYQTNKTTGNTDKRAFVETWQSFYRKKLKEVWKPAV

SEQ ID NO: 44478 - protein, 978 aa, synthetic construct
  REGION 1..978: note = engineered CasX variant
QEIKRINKIRRRLVKDSNTKKAGKTGPMKTLLVRVMTPDLRERLENLRKKPENIPQPISNTSRANLNKLLTDYTEMKKAILHVYWEEFQKDPVGLMSRVAQPASKKIDQNKLKPEMDEKGNLTTAGFACSQCGQPLFVYKLEQVSEKGKAYTNYFGRCNVAEHEKLIKLAQLKPEKDSDEAVTYSLGKFGQRALDFYSIHVTKESTHPVKPLAQIAGNRYASGPVGKALSDACMGTIASFLSKYQDIIIEHQKVVKGNQKRLESLRELAGKENLEYPSVTLPPQPHTKEGVDAYNEVIARVRMWVNLNLWQKLKLSRDDAKPLLRLKGFPSFPLVERQANEVDWWDMVCNVKKLINEKKEDGKVFWQNLAGYKRQEALRPYLSSEEDRKKGKKFARTQLGDLLLHLEKKHGEDWGKVYGEAWERIDKKVEGLSKHIKLEEERRSEDAQSKAALTDWLRAKASFVIEGLKEADKDEFCRCELKLQKWYGDLRGKPFAIEAENSILDISGFSKQYNCAFIWQKDGVKKLNLYLIINYFKGGKLRFKKIKPEAFEANRFYTVINKKSGEIVPMEVNFNFDDPNLIILPLAFGKRQGREFIWNDLLSLETGSLKLANGRVIEKTLYNRRTRQDEPALFVALTFERREVLDSSNIKPMNLIGVDRGENIPAVIALTDPEGCPLSRFKDSLGNPTHILRIGESYKEKQRTIQAKKEVEQRRAGGYSRKYASKAKNLADDMVRNTARDLLYYAVTQDAMLIFENLSRGFGRQGKRTFMAERQYTRMEDWLTAKLAYEGLPSKTYLSKTLAQYTSKTCSNCGFTITSADYDRVLEKLKKTATGWMTTINGKELKVEGQITYYNRYKRQNVVKDLSVELDRLSEESVNNDISSWTKGRSGEALSLLKKRFSHRPVQEKFVCLNCGFETHADEQAALNIARSWLFLRSQEYKKYQTNKTTGNTDKRAFVETWQSFYRKKLKEVWKPAV

SEQ ID NO: 44479 - protein, 977 aa, synthetic construct
  REGION 1..977: note = engineered CasX variant
QEIKRINKIRRRLVKDSNTKKAGKTGPMKTLLVRVMTPDLRERLENLRKKPENIPQPISNTSRANLNKLLTDYTEMKKAILHVYWEEFQKDPVGLMSRVAQPASKKIDQNKLKPEMDEKGNLTTAGFACSQCGQPLFVYKLEQVSEKGKAYTNYFGRCNVAEHEKLILLAQLKPEKDSDEAVTYSLGKFGQRALDFYSIHVTKESTHPVKPLAQIAGNRYASPVGKALSDACMGTIASFLSKYQDIIIEHQKVVKGNQKRLESLRELAGKENLEYPSVTLPPQPHTKEGVDAYNEVIARVRMWVNLNLWQKLKLSRDDAKPLLRLKGFPSFPLVERQANEVDWWDMVCNVKKLINEKKEDGKVFWQNLAGYKRQEALRPYLSSEEDRKKGKKFARTQLGDLLLHLEKKHGEDWGKVYGEAWERIDKKVEGLSKHIKLEEERRSEDAQSKAALTDWLRAKASFVIEGLKEADKDEFCRCELKLQKWYGDLRGKPFAIEAENSILDISGFSKQYNCAFIWQKDGVKKLNLYLIINYFKGGKLRFKKIKPEAFEANRFYTVINKKSGEIVPMEVNFNFDDPNLIILPLAFGKRQGREFIWNDLLSLETGSLKLANGRVIEKTLYNRRTRQDEPALFVALTFERREVLDSSNIKPMNLIGVDRGENIPAVIALTDPEGCPLSRFKDSLGNPTHILRIGESYKEKQRTIQAKKEVEQRRAGGYSRKYASKAKNLADDMVRNTARDLLYYAVTQDAMLIFENLSRGFGRQGKRTFMAERQYTRMEDWLTAKLAYEGLPSKTYLSKTLAQYTSKTCSNCGFTITSADYDRVLEKLKKTATGWMTTINGKELKVEGQITYYNRYKRQNVVKDLSVELDRLSEESVNNDISSWTKGRSGEALSLLKKRFSHRPVQEKFVCLNCGFETHADEQAALNIARSWLFLRSQEYKKYQTNKTTGNTDKRAFVETWQSFYRKKLKEVWKPAV

SEQ ID NO: 44480 - protein, 978 aa, synthetic construct
  REGION 1..978: note = engineered CasX variant
QEIKRINKIRRRLVKDSNTKKAGKTGPMKTLLVRVMTPDLRERLENLRKKPENIPQPISNTSRANLNKLLTDYTEMKKAILHVYWEEFQKDPVGLMSRVAQPASKKIDQNKLKPEMDEKGNLTTAGFACSQCGQPLFVYKLEQVSEKGKAYTNYFGRCNVAEHEKLILLAQLKPEKDSDEAVTYSLGKFGQRALDFYSIHVTKESTHPVKPLAQIAGNRYASYPVGKALSDACMGTIASFLSKYQDIIIEHQKVVKGNQKRLESLRELAGKENLEYPSVTLPPQPHTKEGVDAYNEVIARVRMWVNLNLWQKLKLSRDDAKPLLRLKGFPSFPLVERQANEVDWWDMVCNVKKLINEKKEDGKVFWQNLAGYKRQEALRPYLSSEEDRKKGKKFARTQLGDLLLHLEKKHGEDWGKVYDEAWERIDKKVEGLSKHIKLEEERRSEDAQSKAALTDWLRAKASFVIEGKKEADKDEFCRCELKLQKWYGDLRGKPFAIEAENSILDISGFSKQYNCAFIWQKDGVKKLNLYLIINYFKGGKLRFKKIKPEAFEANRFYTVINKKSGEIVPMEVNFNFDDPNLIILPLAFGKRQGREFIWNDLLSLETGSLKLANGRVIEKTLYNRRTRQDEPALFVALTFERREVLDSSNIKPMNLIGVDRGENIPAVIALTDPEGCPLSRFKDSLGNPTHILRIGESYKEKQRTIQAKKEVEQRRAGGYSRKYASKAKNLADDMVRNTARDLLYYAVTQDAMLIFENLSRGFGRQGKRTFMAERQYTRMEDWLTAKLAYEGLPSKTYLSKTLAQYTSKTCSNCGFTITSADYDRVLEKLKKTATGWMTTINGKELKVEGQITYYNRYKRQNVVKDLSVELDRLSEESVNNDISSWTKGRSGEALSLLKKRFSHRPVQEKFVCLNCGFETHADEQAALNIARSWLFLRSQEYKKYQTNKTTGNTDKRAFVETWQSFYRKKLKEVWKPAV

SEQ ID NO: 44481 - protein, 978 aa, synthetic construct
  REGION 1..978: note = engineered CasX variant
QEIKRINKIRRRLVKDSNTKKAGKTGPMKTLLVRVMTPDLRERLENLRKKPENIPQPISNTSRANLNKLLTDYTEMKKAILHVYWEEFQKDPVGLMSRVAQPASKKIDQNKLKPEMDEKGNLTTAGFACSQCGQPLFVYKLEQVSEKGKAYTNYFGRCNVAEHEKLILLAQLKPEKDSDEAVTYSLGKFGQRALDFYSIHVTKESTHPVKPLAQIAGNRYASHPVGKALSDACMGTIASFLSKYQDIIIEHQKVVKGNQKRLESLRELAGKENLEYPSVTLPPQPHTKEGVDAYNEVIARVRMWVNLNLWQKLKLSRDDAKPLLRLKGFPSFPLVERQANEVDWWDMVCNVKKLINEKKEDGKVFWQNLAGYKRQEALRPYLSSEEDRKKGKKFARTQLGDLLLHLEKKHGEDWGKVYDEAWERIDKKVEGLSKHIKLEEERRSEDAQSKAALTDWLRAKASFVIEGKKEADKDEFCRCELKLQKWYGDLRGKPFAIEAENSILDISGFSKQYNCAFIWQKDGVKKLNLYLIINYFKGGKLRFKKIKPEAFEANRFYTVINKKSGEIVPMEVNFNFDDPNLIILPLAFGKRQGREFIWNDLLSLETGSLKLANGRVIEKTLYNRRTRQDEPALFVALTFERREVLDSSNIKPMNLIGVDRGENIPAVIALTDPEGCPLSRFKDSLGNPTHILRIGESYKEKQRTIQAKKEVEQRRAGGYSRKYASKAKNLADDMVRNTARDLLYYAVTQDAMLIFENLSRGFGRQGKRTFMAERQYTRMEDWLTAKLAYEGLPSKTYLSKTLAQYTSKTCSNCGFTITSADYDRVLEKLKKTATGWMTTINGKELKVEGQITYYNRYKRQNVVKDLSVELDRLSEESVNNDISSWTKGRSGEALSLLKKRFSHRPVQEKFVCLNCGFETHADEQAALNIARSWLFLRSQEYKKYQTNKTTGNTDKRAFVETWQSFYRKKLKEVWKPAV

SEQ ID NO: 44482 - protein, 978 aa, synthetic construct
  REGION 1..978: note = engineered CasX variant
QEIKRINKIRRRLVKDSNTKKAGKTGPMKTLLVRVMTPDLRERLENLRKKPENIPQPISNTSRANLNKLLTDYTEMKKAILHVYWEEFQKDPVGLMSRVAQPASKKIDQNKLKPEMDEKGNLTTAGFACSQCGQPLFVYKLEQVSEKGKAYTNYFGRCNVAEHEKLILLAQLKPEKDSDEAVTYSLGKFGQRALDFYSIHVTKESTHPVKPLAQIAGNRYASSPVGKALSDACMGTIASFLSKYQDIIIEHQKVVKGNQKRLESLRELAGKENLEYPSVTLPPQPHTKEGVDAYNEVIARVRMWVNLNLWQKLKLSRDDAKPLLRLKGFPSFPLVERQANEVDWWDMVCNVKKLINEKKEDGKVFWQNLAGYKRQEALRPYLSSEEDRKKGKKFARTQLGDLLLHLEKKHGEDWGKVYDEAWERIDKKVEGLSKHIKLEEERRSEDAQSKAALTDWLRAKASFVIEGKKEADKDEFCRCELKLQKWYGDLRGKPFAIEAENSILDISGFSKQYNCAFIWQKDGVKKLNLYLIINYFKGGKLRFKKIKPEAFEANRFYTVINKKSGEIVPMEVNFNFDDPNLIILPLAFGKRQGREFIWNDLLSLETGSLKLANGRVIEKTLYNRRTRQDEPALFVALTFERREVLDSSNIKPMNLIGVDRGENIPAVIALTDPEGCPLSRFKDSLGNPTHILRIGESYKEKQRTIQAKKEVEQRRAGGYSRKYASKAKNLADDMVRNTARDLLYYAVTQDAMLIFENLSRGFGRQGKRTFMAERQYTRMEDWLTAKLAYEGLPSKTYLSKTLAQYTSKTCSNCGFTITSADYDRVLEKLKKTATGWMTTINGKELKVEGQITYYNRYKRQNVVKDLSVELDRLSEESVNNDISSWTKGRSGEALSLLKKRFSHRPVQEKFVCLNCGFETHADEQAALNIARSWLFLRSQEYKKYQTNKTTGNTDKRAFVETWQSFYRKKLKEVWKPAV

SEQ ID NO: 44483 - protein, 978 aa, synthetic construct
  REGION 1..978: note = engineered CasX variant
QEIKRINKIRRRLVKDSNTKKAGKTGPMKTLLVRVMTPDLRERLENLRKKPENIPQPISNTSRANLNKLLTDYTEMKKAILHVYWEEFQKDPVGLMSRVAQPASKKIDQNKLKPEMDEKGNLTTAGFACSQCGQPLFVYKLEQVSEKGKAYTNYFGRCNVAEHEKLILLAQLKPEKDSDEAVTYSLGKFGQRALDFYSIHVTKESTHPVKPLAQIAGNRYASTPVGKALSDACMGTIASFLSKYQDIIIEHQKVVKGNQKRLESLRELAGKENLEYPSVTLPPQPHTKEGVDAYNEVIARVRMWVNLNLWQKLKLSRDDAKPLLRLKGFPSFPLVERQANEVDWWDMVCNVKKLINEKKEDGKVFWQNLAGYKRQEALRPYLSSEEDRKKGKKFARTQLGDLLLHLEKKHGEDWGKVYDEAWERIDKKVEGLSKHIKLEEERRSEDAQSKAALTDWLRAKASFVIEGKKEADKDEFCRCELKLQKWYGDLRGKPFAIEAENSILDISGFSKQYNCAFIWQKDGVKKLNLYLIINYFKGGKLRFKKIKPEAFEANRFYTVINKKSGEIVPMEVNFNFDDPNLIILPLAFGKRQGREFIWNDLLSLETGSLKLANGRVIEKTLYNRRTRQDEPALFVALTFERREVLDSSNIKPMNLIGVDRGENIPAVIALTDPEGCPLSRFKDSLGNPTHILRIGESYKEKQRTIQAKKEVEQRRAGGYSRKYASKAKNLADDMVRNTARDLLYYAVTQDAMLIFENLSRGFGRQGKRTFMAERQYTRMEDWLTAKLAYEGLPSKTYLSKTLAQYTSKTCSNCGFTITSADYDRVLEKLKKTATGWMTTINGKELKVEGQITYYNRYKRQNVVKDLSVELDRLSEESVNNDISSWTKGRSGEALSLLKKRFSHRPVQEKFVCLNCGFETHADEQAALNIARSWLFLRSQEYKKYQTNKTTGNTDKRAFVETWQSFYRKKLKEVWKPAV

SEQ ID NO: 44484 - protein, 978 aa, synthetic construct
  REGION 1..978: note = engineered CasX variant
QEIKRINKIRRRLVKDSNTKKAGKTGPMKTLLVRVMTPDLRERLENLRKKPENIPQPISNTSRANLNKLLTDYTEMKKAILHVYWEEFQKDPVGLMSRVAQPASKKIDQNKLKPEMDEKGNLTTAGFACSQCGQPLFVYKLEQVSEKGKAYTNYFGRCNVAEHEKLILLAQLKPEKDSDEAVTYSLGKFGQRALDFYSIHVTKESTHPVKPLAQIAGNRYASAPVGKALSDACMGTIASFLSKYQDIIIEHQKVVKGNQKRLESLRELAGKENLEYPSVTLPPQPHTKEGVDAYNEVIARVRMWVNLNLWQKLKLSRDDAKPLLRLKGFPSFPLVERQANEVDWWDMVCNVKKLINEKKEDGKVFWQNLAGYKRQEALRPYLSSEEDRKKGKKFARTQLGDLLLHLEKKHGEDWGKVYDEAWERIDKKVEGLSKHIKLEEERRSEDAQSKAALTDWLRAKASFVIEGKKEADKDEFCRCELKLQKWYGDLRGKPFAIEAENSILDISGFSKQYNCAFIWQKDGVKKLNLYLIINYFKGGKLRFKKIKPEAFEANRFYTVINKKSGEIVPMEVNFNFDDPNLIILPLAFGKRQGREFIWNDLLSLETGSLKLANGRVIEKTLYNRRTRQDEPALFVALTFERREVLDSSNIKPMNLIGVDRGENIPAVIALTDPEGCPLSRFKDSLGNPTHILRIGESYKEKQRTIQAKKEVEQRRAGGYSRKYASKAKNLADDMVRNTARDLLYYAVTQDAMLIFENLSRGFGRQGKRTFMAERQYTRMEDWLTAKLAYEGLPSKTYLSKTLAQYTSKTCSNCGFTITSADYDRVLEKLKKTATGWMTTINGKELKVEGQITYYNRYKRQNVVKDLSVELDRLSEESVNNDISSWTKGRSGEALSLLKKRFSHRPVQEKFVCLNCGFETHADEQAALNIARSWLFLRSQEYKKYQTNKTTGNTDKRAFVETWQSFYRKKLKEVWKPAV

SEQ ID NO: 44485 - protein, 978 aa, synthetic construct
  REGION 1..978: note = engineered CasX variant
QEIKRINKIRRRLVKDSNTKKAGKTGPMKTLLVRVMTPDLRERLENLRKKPENIPQPISNTSRANLNKLLTDYTEMKKAILHVYWEEFQKDPVGLMSRVAQPASKKIDQNKLKPEMDEKGNLTTAGFACSQCGQPLFVYKLEQVSEKGKAYTNYFGRCNVAEHEKLILLAQLKPEKDSDEAVTYSLGKFGQRALDFYSIHVTKESTHPVKPLAQIAGNRYASVPVGKALSDACMGTIASFLSKYQDIIIEHQKVVKGNQKRLESLRELAGKENLEYPSVTLPPQPHTKEGVDAYNEVIARVRMWVNLNLWQKLKLSRDDAKPLLRLKGFPSFPLVERQANEVDWWDMVCNVKKLINEKKEDGKVFWQNLAGYKRQEALRPYLSSEEDRKKGKKFARTQLGDLLLHLEKKHGEDWGKVYDEAWERIDKKVEGLSKHIKLEEERRSEDAQSKAALTDWLRAKASFVIEGKKEADKDEFCRCELKLQKWYGDLRGKPFAIEAENSILDISGFSKQYNCAFIWQKDGVKKLNLYLIINYFKGGKLRFKKIKPEAFEANRFYTVINKKSGEIVPMEVNFNFDDPNLIILPLAFGKRQGREFIWNDLLSLETGSLKLANGRVIEKTLYNRRTRQDEPALFVALTFERREVLDSSNIKPMNLIGVDRGENIPAVIALTDPEGCPLSRFKDSLGNPTHILRIGESYKEKQRTIQAKKEVEQRRAGGYSRKYASKAKNLADDMVRNTARDLLYYAVTQDAMLIFENLSRGFGRQGKRTFMAERQYTRMEDWLTAKLAYEGLPSKTYLSKTLAQYTSKTCSNCGFTITSADYDRVLEKLKKTATGWMTTINGKELKVEGQITYYNRYKRQNVVKDLSVELDRLSEESVNNDISSWTKGRSGEALSLLKKRFSHRPVQEKFVCLNCGFETHADEQAALNIARSWLFLRSQEYKKYQTNKTTGNTDKRAFVETWQSFYRKKLKEVWKPAV

SEQ ID NO: 44486 - protein, 978 aa, synthetic construct
  REGION 1..978: note = engineered CasX variant
QEIKRINKIRRRLVKDSNTKKAGKTGPMKTLLVRVMTPDLRERLENLRKKPENIPQPISNTSRANLNKLLTDYTEMKKAILHVYWEEFQKDPVGLMSRVAQPASKKIDQNKLKPEMDEKGNLTTAGFACSQCGQPLFVYKLEQVSEKGKAYTNYFGRCNVAEHEKLIKLAQLKPEKDSDEAVTYSLGKFGQRALDFYSIHVTKESTHPVKPLAQIAGNRYASGPVGKALSDACMGTIASFLSKYQDIIIEHQKVVKGNQKRLESLRELAGKENLEYPSVTLPPQPHTKEGVDAYNEVIARVRMWVNLNLWQKLKLSRDDAKPLLRLKGFPSFPLVERQANEVDWWDMVCNVKKLINEKKEDGKVFWQNLAGYKRQEALRPYLSSEEDRKKGKKFARTQLGDLLLHLEKKHGEDWGKVYDEAWERIDKKVEGLSKHIKLEEERRSEDAQSKAALTDWLRAKASFVIEGKKEADKDEFCRCELKLQKWYGDLRGKPFAIEAENSILDISGFSKQYNCAFIWQKDGVKKLNLYLIINYFKGGKLRFKKIKPEAFEANRFYTVINKKSGEIVPMEVNFNFDDPNLIILPLAFGKRQGREFIWNDLLSLETGSLKLANGRVIEKTLYNRRTRQDEPALFVALTFERREVLDSSNIKPMNLIGVDRGENIPAVIALTDPEGCPLSRFKDSLGNPTHILRIGESYKEKQRTIQAKKEVEQRRAGGYSRKYASKAKNLADDMVRNTARDLLYYAVTQDAMLIFENLSRGFGRQGKRTFMAERQYTRMEDWLTAKLAYEGLPSKTYLSKTLAQYTSKTCSNCGFTITSADYDRVLEKLKKTATGWMTTINGKELKVEGQITYYNRYKRQNVVKDLSVELDRLSEESVNNDISSWTKGRSGEALSLLKKRFSHRPVQEKFVCLNCGFETHADEQAALNIARSWLFLRSQEYKKYQTNKTTGNTDKRAFVETWQSFYRKKLKEVWKPAV

SEQ ID NO: 44487 - protein, 977 aa, synthetic construct
  REGION 1..977: note = engineered CasX variant
QEIKRINKIRRRLVKDSNTKKAGKTGPMKTLLVRVMTPDLRERLENLRKKPENIPQPISNTSRANLNKLLTDYTEMKKAILHVYWEEFQKDPVGLMSRVAQPASKKIDQNKLKPEMDEKGNLTTAGFACSQCGQPLFVYKLEQVSEKGKAYTNYFGRCNVAEHEKLILLAQLKPEKDSDEAVTYSLGKFGQRALDFYSIHVTKESTHPVKPLAQIAGNRYASPVGKALSDACMGTIASFLSKYQDIIIEHQKVVKGNQKRLESLRELAGKENLEYPSVTLPPQPHTKEGVDAYNEVIARVRMWVNLNLWQKLKLSRDDAKPLLRLKGFPSFPLVERQANEVDWWDMVCNVKKLINEKKEDGKVFWQNLAGYKRQEALRPYLSSEEDRKKGKKFARTQLGDLLLHLEKKHGEDWGKVYDEAWERIDKKVEGLSKHIKLEEERRSEDAQSKAALTDWLRAKASFVIEGKKEADKDEFCRCELKLQKWYGDLRGKPFAIEAENSILDISGFSKQYNCAFIWQKDGVKKLNLYLIINYFKGGKLRFKKIKPEAFEANRFYTVINKKSGEIVPMEVNFNFDDPNLIILPLAFGKRQGREFIWNDLLSLETGSLKLANGRVIEKTLYNRRTRQDEPALFVALTFERREVLDSSNIKPMNLIGVDRGENIPAVIALTDPEGCPLSRFKDSLGNPTHILRIGESYKEKQRTIQAKKEVEQRRAGGYSRKYASKAKNLADDMVRNTARDLLYYAVTQDAMLIFENLSRGFGRQGKRTFMAERQYTRMEDWLTAKLAYEGLPSKTYLSKTLAQYTSKTCSNCGFTITSADYDRVLEKLKKTATGWMTTINGKELKVEGQITYYNRYKRQNVVKDLSVELDRLSEESVNNDISSWTKGRSGEALSLLKKRFSHRPVQEKFVCLNCGFETHADEQAALNIARSWLFLRSQEYKKYQTNKTTGNTDKRAFVETWQSFYRKKLKEVWKPAV

SEQ ID NO: 44488 - protein, 978 aa, synthetic construct
  REGION 1..978: note = engineered CasX variant
QEIKRINKIRRRLVKDSNTKKAGKTGPMKTLLVRVMTPDLRERLENLRKKPENIPQPISNTSRANLNKLLTDYTEMKKAILHVYWEEFQKDPVGLMSRVAQPASKKIDQNKLKPEMDEKGNLTTAGFACSQCGQPLFVYKLEQVSEKGKAYTNYFGRCNVAEHEKLILLAQLKPEKDSDEAVTYSLGKFGQRALDFYSIHVTKESTHPVKPLAQIAGNRYASYPVGKALSDACMGTIASFLSKYQDIIIEHQKVVKGNQKRLESLRELAGKENLEYPSVTLPPQPHTKEGVDAYNEVIARVRMWVNLNLWQKLKLSRDDAKPLLRLKGFPSFPLVERQANEVDWWDMVCNVKKLINEKKEDGKVFWQNLAGYKRQEALRPYLSSEEDRKKGKKFARTQLGDLLLHLEKKHGEDWGKVYDEAWERIDKKVEGLSKHIKLEEERRSEDAQSKAALTDWLRAKASFVIEGSKEADKDEFCRCELKLQKWYGDLRGKPFAIEAENSILDISGFSKQYNCAFIWQKDGVKKLNLYLIINYFKGGKLRFKKIKPEAFEANRFYTVINKKSGEIVPMEVNFNFDDPNLIILPLAFGKRQGREFIWNDLLSLETGSLKLANGRVIEKTLYNRRTRQDEPALFVALTFERREVLDSSNIKPMNLIGVDRGENIPAVIALTDPEGCPLSRFKDSLGNPTHILRIGESYKEKQRTIQAKKEVEQRRAGGYSRKYASKAKNLADDMVRNTARDLLYYAVTQDAMLIFENLSRGFGRQGKRTFMAERQYTRMEDWLTAKLAYEGLPSKTYLSKTLAQYTSKTCSNCGFTITSADYDRVLEKLKKTATGWMTTINGKELKVEGQITYYNRYKRQNVVKDLSVELDRLSEESVNNDISSWTKGRSGEALSLLKKRFSHRPVQEKFVCLNCGFETHADEQAALNIARSWLFLRSQEYKKYQTNKTTGNTDKRAFVETWQSFYRKKLKEVWKPAV

SEQ ID NO: 44489 - protein, 978 aa, synthetic construct
  REGION 1..978: note = engineered CasX variant
QEIKRINKIRRRLVKDSNTKKAGKTGPMKTLLVRVMTPDLRERLENLRKKPENIPQPISNTSRANLNKLLTDYTEMKKAILHVYWEEFQKDPVGLMSRVAQPASKKIDQNKLKPEMDEKGNLTTAGFACSQCGQPLFVYKLEQVSEKGKAYTNYFGRCNVAEHEKLILLAQLKPEKDSDEAVTYSLGKFGQRALDFYSIHVTKESTHPVKPLAQIAGNRYASHPVGKALSDACMGTIASFLSKYQDIIIEHQKVVKGNQKRLESLRELAGKENLEYPSVTLPPQPHTKEGVDAYNEVIARVRMWVNLNLWQKLKLSRDDAKPLLRLKGFPSFPLVERQANEVDWWDMVCNVKKLINEKKEDGKVFWQNLAGYKRQEALRPYLSSEEDRKKGKKFARTQLGDLLLHLEKKHGEDWGKVYDEAWERIDKKVEGLSKHIKLEEERRSEDAQSKAALTDWLRAKASFVIEGSKEADKDEFCRCELKLQKWYGDLRGKPFAIEAENSILDISGFSKQYNCAFIWQKDGVKKLNLYLIINYFKGGKLRFKKIKPEAFEANRFYTVINKKSGEIVPMEVNFNFDDPNLIILPLAFGKRQGREFIWNDLLSLETGSLKLANGRVIEKTLYNRRTRQDEPALFVALTFERREVLDSSNIKPMNLIGVDRGENIPAVIALTDPEGCPLSRFKDSLGNPTHILRIGESYKEKQRTIQAKKEVEQRRAGGYSRKYASKAKNLADDMVRNTARDLLYYAVTQDAMLIFENLSRGFGRQGKRTFMAERQYTRMEDWLTAKLAYEGLPSKTYLSKTLAQYTSKTCSNCGFTITSADYDRVLEKLKKTATGWMTTINGKELKVEGQITYYNRYKRQNVVKDLSVELDRLSEESVNNDISSWTKGRSGEALSLLKKRFSHRPVQEKFVCLNCGFETHADEQAALNIARSWLFLRSQEYKKYQTNKTTGNTDKRAFVETWQSFYRKKLKEVWKPAV

SEQ ID NO: 44490 - protein, 978 aa, synthetic construct
  REGION 1..978: note = engineered CasX variant
QEIKRINKIRRRLVKDSNTKKAGKTGPMKTLLVRVMTPDLRERLENLRKKPENIPQPISNTSRANLNKLLTDYTEMKKAILHVYWEEFQKDPVGLMSRVAQPASKKIDQNKLKPEMDEKGNLTTAGFACSQCGQPLFVYKLEQVSEKGKAYTNYFGRCNVAEHEKLILLAQLKPEKDSDEAVTYSLGKFGQRALDFYSIHVTKESTHPVKPLAQIAGNRYASSPVGKALSDACMGTIASFLSKYQDIIIEHQKVVKGNQKRLESLRELAGKENLEYPSVTLPPQPHTKEGVDAYNEVIARVRMWVNLNLWQKLKLSRDDAKPLLRLKGFPSFPLVERQANEVDWWDMVCNVKKLINEKKEDGKVFWQNLAGYKRQEALRPYLSSEEDRKKGKKFARTQLGDLLLHLEKKHGEDWGKVYDEAWERIDKKVEGLSKHIKLEEERRSEDAQSKAALTDWLRAKASFVIEGSKEADKDEFCRCELKLQKWYGDLRGKPFAIEAENSILDISGFSKQYNCAFIWQKDGVKKLNLYLIINYFKGGKLRFKKIKPEAFEANRFYTVINKKSGEIVPMEVNFNFDDPNLIILPLAFGKRQGREFIWNDLLSLETGSLKLANGRVIEKTLYNRRTRQDEPALFVALTFERREVLDSSNIKPMNLIGVDRGENIPAVIALTDPEGCPLSRFKDSLGNPTHILRIGESYKEKQRTIQAKKEVEQRRAGGYSRKYASKAKNLADDMVRNTARDLLYYAVTQDAMLIFENLSRGFGRQGKRTFMAERQYTRMEDWLTAKLAYEGLPSKTYLSKTLAQYTSKTCSNCGFTITSADYDRVLEKLKKTATGWMTTINGKELKVEGQITYYNRYKRQNVVKDLSVELDRLSEESVNNDISSWTKGRSGEALSLLKKRFSHRPVQEKFVCLNCGFETHADEQAALNIARSWLFLRSQEYKKYQTNKTTGNTDKRAFVETWQSFYRKKLKEVWKPAV

SEQ ID NO: 44491 - protein, 978 aa, synthetic construct
  REGION 1..978: note = engineered CasX variant
QEIKRINKIRRRLVKDSNTKKAGKTGPMKTLLVRVMTPDLRERLENLRKKPENIPQPISNTSRANLNKLLTDYTEMKKAILHVYWEEFQKDPVGLMSRVAQPASKKIDQNKLKPEMDEKGNLTTAGFACSQCGQPLFVYKLEQVSEKGKAYTNYFGRCNVAEHEKLILLAQLKPEKDSDEAVTYSLGKFGQRALDFYSIHVTKESTHPVKPLAQIAGNRYASTPVGKALSDACMGTIASFLSKYQDIIIEHQKVVKGNQKRLESLRELAGKENLEYPSVTLPPQPHTKEGVDAYNEVIARVRMWVNLNLWQKLKLSRDDAKPLLRLKGFPSFPLVERQANEVDWWDMVCNVKKLINEKKEDGKVFWQNLAGYKRQEALRPYLSSEEDRKKGKKFARTQLGDLLLHLEKKHGEDWGKVYDEAWERIDKKVEGLSKHIKLEEERRSEDAQSKAALTDWLRAKASFVIEGSKEADKDEFCRCELKLQKWYGDLRGKPFAIEAENSILDISGFSKQYNCAFIWQKDGVKKLNLYLIINYFKGGKLRFKKIKPEAFEANRFYTVINKKSGEIVPMEVNFNFDDPNLIILPLAFGKRQGREFIWNDLLSLETGSLKLANGRVIEKTLYNRRTRQDEPALFVALTFERREVLDSSNIKPMNLIGVDRGENIPAVIALTDPEGCPLSRFKDSLGNPTHILRIGESYKEKQRTIQAKKEVEQRRAGGYSRKYASKAKNLADDMVRNTARDLLYYAVTQDAMLIFENLSRGFGRQGKRTFMAERQYTRMEDWLTAKLAYEGLPSKTYLSKTLAQYTSKTCSNCGFTITSADYDRVLEKLKKTATGWMTTINGKELKVEGQITYYNRYKRQNVVKDLSVELDRLSEESVNNDISSWTKGRSGEALSLLKKRFSHRPVQEKFVCLNCGFETHADEQAALNIARSWLFLRSQEYKKYQTNKTTGNTDKRAFVETWQSFYRKKLKEVWKPAV

SEQ ID NO: 44492 - protein, 978 aa, synthetic construct
  REGION 1..978: note = engineered CasX variant
QEIKRINKIRRRLVKDSNTKKAGKTGPMKTLLVRVMTPDLRERLENLRKKPENIPQPISNTSRANLNKLLTDYTEMKKAILHVYWEEFQKDPVGLMSRVAQPASKKIDQNKLKPEMDEKGNLTTAGFACSQCGQPLFVYKLEQVSEKGKAYTNYFGRCNVAEHEKLILLAQLKPEKDSDEAVTYSLGKFGQRALDFYSIHVTKESTHPVKPLAQIAGNRYASAPVGKALSDACMGTIASFLSKYQDIIIEHQKVVKGNQKRLESLRELAGKENLEYPSVTLPPQPHTKEGVDAYNEVIARVRMWVNLNLWQKLKLSRDDAKPLLRLKGFPSFPLVERQANEVDWWDMVCNVKKLINEKKEDGKVFWQNLAGYKRQEALRPYLSSEEDRKKGKKFARTQLGDLLLHLEKKHGEDWGKVYDEAWERIDKKVEGLSKHIKLEEERRSEDAQSKAALTDWLRAKASFVIEGSKEADKDEFCRCELKLQKWYGDLRGKPFAIEAENSILDISGFSKQYNCAFIWQKDGVKKLNLYLIINYFKGGKLRFKKIKPEAFEANRFYTVINKKSGEIVPMEVNFNFDDPNLIILPLAFGKRQGREFIWNDLLSLETGSLKLANGRVIEKTLYNRRTRQDEPALFVALTFERREVLDSSNIKPMNLIGVDRGENIPAVIALTDPEGCPLSRFKDSLGNPTHILRIGESYKEKQRTIQAKKEVEQRRAGGYSRKYASKAKNLADDMVRNTARDLLYYAVTQDAMLIFENLSRGFGRQGKRTFMAERQYTRMEDWLTAKLAYEGLPSKTYLSKTLAQYTSKTCSNCGFTITSADYDRVLEKLKKTATGWMTTINGKELKVEGQITYYNRYKRQNVVKDLSVELDRLSEESVNNDISSWTKGRSGEALSLLKKRFSHRPVQEKFVCLNCGFETHADEQAALNIARSWLFLRSQEYKKYQTNKTTGNTDKRAFVETWQSFYRKKLKEVWKPAV

SEQ ID NO: 44493 - protein, 978 aa, synthetic construct
  REGION 1..978: note = engineered CasX variant
QEIKRINKIRRRLVKDSNTKKAGKTGPMKTLLVRVMTPDLRERLENLRKKPENIPQPISNTSRANLNKLLTDYTEMKKAILHVYWEEFQKDPVGLMSRVAQPASKKIDQNKLKPEMDEKGNLTTAGFACSQCGQPLFVYKLEQVSEKGKAYTNYFGRCNVAEHEKLILLAQLKPEKDSDEAVTYSLGKFGQRALDFYSIHVTKESTHPVKPLAQIAGNRYASVPVGKALSDACMGTIASFLSKYQDIIIEHQKVVKGNQKRLESLRELAGKENLEYPSVTLPPQPHTKEGVDAYNEVIARVRMWVNLNLWQKLKLSRDDAKPLLRLKGFPSFPLVERQANEVDWWDMVCNVKKLINEKKEDGKVFWQNLAGYKRQEALRPYLSSEEDRKKGKKFARTQLGDLLLHLEKKHGEDWGKVYDEAWERIDKKVEGLSKHIKLEEERRSEDAQSKAALTDWLRAKASFVIEGSKEADKDEFCRCELKLQKWYGDLRGKPFAIEAENSILDISGFSKQYNCAFIWQKDGVKKLNLYLIINYFKGGKLRFKKIKPEAFEANRFYTVINKKSGEIVPMEVNFNFDDPNLIILPLAFGKRQGREFIWNDLLSLETGSLKLANGRVIEKTLYNRRTRQDEPALFVALTFERREVLDSSNIKPMNLIGVDRGENIPAVIALTDPEGCPLSRFKDSLGNPTHILRIGESYKEKQRTIQAKKEVEQRRAGGYSRKYASKAKNLADDMVRNTARDLLYYAVTQDAMLIFENLSRGFGRQGKRTFMAERQYTRMEDWLTAKLAYEGLPSKTYLSKTLAQYTSKTCSNCGFTITSADYDRVLEKLKKTATGWMTTINGKELKVEGQITYYNRYKRQNVVKDLSVELDRLSEESVNNDISSWTKGRSGEALSLLKKRFSHRPVQEKFVCLNCGFETHADEQAALNIARSWLFLRSQEYKKYQTNKTTGNTDKRAFVETWQSFYRKKLKEVWKPAV

SEQ ID NO: 44494 - protein, 978 aa, synthetic construct
  REGION 1..978: note = engineered CasX variant
QEIKRINKIRRRLVKDSNTKKAGKTGPMKTLLVRVMTPDLRERLENLRKKPENIPQPISNTSRANLNKLLTDYTEMKKAILHVYWEEFQKDPVGLMSRVAQPASKKIDQNKLKPEMDEKGNLTTAGFACSQCGQPLFVYKLEQVSEKGKAYTNYFGRCNVAEHEKLIKLAQLKPEKDSDEAVTYSLGKFGQRALDFYSIHVTKESTHPVKPLAQIAGNRYASGPVGKALSDACMGTIASFLSKYQDIIIEHQKVVKGNQKRLESLRELAGKENLEYPSVTLPPQPHTKEGVDAYNEVIARVRMWVNLNLWQKLKLSRDDAKPLLRLKGFPSFPLVERQANEVDWWDMVCNVKKLINEKKEDGKVFWQNLAGYKRQEALRPYLSSEEDRKKGKKFARTQLGDLLLHLEKKHGEDWGKVYDEAWERIDKKVEGLSKHIKLEEERRSEDAQSKAALTDWLRAKASFVIEGSKEADKDEFCRCELKLQKWYGDLRGKPFAIEAENSILDISGFSKQYNCAFIWQKDGVKKLNLYLIINYFKGGKLRFKKIKPEAFEANRFYTVINKKSGEIVPMEVNFNFDDPNLIILPLAFGKRQGREFIWNDLLSLETGSLKLANGRVIEKTLYNRRTRQDEPALFVALTFERREVLDSSNIKPMNLIGVDRGENIPAVIALTDPEGCPLSRFKDSLGNPTHILRIGESYKEKQRTIQAKKEVEQRRAGGYSRKYASKAKNLADDMVRNTARDLLYYAVTQDAMLIFENLSRGFGRQGKRTFMAERQYTRMEDWLTAKLAYEGLPSKTYLSKTLAQYTSKTCSNCGFTITSADYDRVLEKLKKTATGWMTTINGKELKVEGQITYYNRYKRQNVVKDLSVELDRLSEESVNNDISSWTKGRSGEALSLLKKRFSHRPVQEKFVCLNCGFETHADEQAALNIARSWLFLRSQEYKKYQTNKTTGNTDKRAFVETWQSFYRKKLKEVWKPAV

SEQ ID NO: 44495 - protein, 977 aa, synthetic construct
  REGION 1..977: note = engineered CasX variant
QEIKRINKIRRRLVKDSNTKKAGKTGPMKTLLVRVMTPDLRERLENLRKKPENIPQPISNTSRANLNKLLTDYTEMKKAILHVYWEEFQKDPVGLMSRVAQPASKKIDQNKLKPEMDEKGNLTTAGFACSQCGQPLFVYKLEQVSEKGKAYTNYFGRCNVAEHEKLILLAQLKPEKDSDEAVTYSLGKFGQRALDFYSIHVTKESTHPVKPLAQIAGNRYASPVGKALSDACMGTIASFLSKYQDIIIEHQKVVKGNQKRLESLRELAGKENLEYPSVTLPPQPHTKEGVDAYNEVIARVRMWVNLNLWQKLKLSRDDAKPLLRLKGFPSFPLVERQANEVDWWDMVCNVKKLINEKKEDGKVFWQNLAGYKRQEALRPYLSSEEDRKKGKKFARTQLGDLLLHLEKKHGEDWGKVYDEAWERIDKKVEGLSKHIKLEEERRSEDAQSKAALTDWLRAKASFVIEGSKEADKDEFCRCELKLQKWYGDLRGKPFAIEAENSILDISGFSKQYNCAFIWQKDGVKKLNLYLIINYFKGGKLRFKKIKPEAFEANRFYTVINKKSGEIVPMEVNFNFDDPNLIILPLAFGKRQGREFIWNDLLSLETGSLKLANGRVIEKTLYNRRTRQDEPALFVALTFERREVLDSSNIKPMNLIGVDRGENIPAVIALTDPEGCPLSRFKDSLGNPTHILRIGESYKEKQRTIQAKKEVEQRRAGGYSRKYASKAKNLADDMVRNTARDLLYYAVTQDAMLIFENLSRGFGRQGKRTFMAERQYTRMEDWLTAKLAYEGLPSKTYLSKTLAQYTSKTCSNCGFTITSADYDRVLEKLKKTATGWMTTINGKELKVEGQITYYNRYKRQNVVKDLSVELDRLSEESVNNDISSWTKGRSGEALSLLKKRFSHRPVQEKFVCLNCGFETHADEQAALNIARSWLFLRSQEYKKYQTNKTTGNTDKRAFVETWQSFYRKKLKEVWKPAV

SEQ ID NO: 44496 - protein, 979 aa, synthetic construct
  REGION 1..979: note = engineered CasX variant
QEIKRINKIRRRLVKDSNTKKAGKTGPMKTLLVRVMTPDLRERLENLRKKPENIPQPISNTSRANLNKLLTDYTEMKKAILHVYWEEFQKDPVGLMSRVAQPASKKIDQNKLKPEMDEKGNLTTAGFACSQCGQPLFVYKLEQVSEKGKAYTNYFGRCNVAEHEKLILLAQLKPEKDSDEAVTYSLGKFGQRALDFYSIHVTKESTHPVKPLAQIAGNRYASYPVGKALSDACMGTIASFLSKYQDIIIEHQKVVKGNQKRLESLRELAGKENLEYPSVTLPPQPHTKEGVDAYNEVIARVRMWVNLNLWQKLKLSRDDAKPLLRLKGFPSFPLVERQANEVDWWDMVCNVKKLINEKKEDGKVFWQNLAGYKRQEALRPYLSSEEDRKKGKKFARTQLGDLLLHLEKKHGEDWGKVYDEAWERIDKKVEGLSKHIKLEEERRSEDAQSKAALTDWLRAKASFVIEGLKEADDKDEFCRCELKLQKWYGDLRGKPFAIEAENSILDISGFSKQYNCAFIWQKDGVKKLNLYLIINYFKGGKLRFKKIKPEAFEANRFYTVINKKSGEIVPMEVNFNFDDPNLIILPLAFGKRQGREFIWNDLLSLETGSLKLANGRVIEKTLYNRRTRQDEPALFVALTFERREVLDSSNIKPMNLIGVDRGENIPAVIALTDPEGCPLSRFKDSLGNPTHILRIGESYKEKQRTIQAKKEVEQRRAGGYSRKYASKAKNLADDMVRNTARDLLYYAVTQDAMLIFENLSRGFGRQGKRTFMAERQYTRMEDWLTAKLAYEGLPSKTYLSKTLAQYTSKTCSNCGFTITSADYDRVLEKLKKTATGWMTTINGKELKVEGQITYYNRYKRQNVVKDLSVELDRLSEESVNNDISSWTKGRSGEALSLLKKRFSHRPVQEKFVCLNCGFETHADEQAALNIARSWLFLRSQEYKKYQTNKTTGNTDKRAFVETWQSFYRKKLKEVWKPAV

SEQ ID NO: 44497 - protein, 979 aa, synthetic construct
  REGION 1..979: note = engineered CasX variant
QEIKRINKIRRRLVKDSNTKKAGKTGPMKTLLVRVMTPDLRERLENLRKKPENIPQPISNTSRANLNKLLTDYTEMKKAILHVYWEEFQKDPVGLMSRVAQPASKKIDQNKLKPEMDEKGNLTTAGFACSQCGQPLFVYKLEQVSEKGKAYTNYFGRCNVAEHEKLILLAQLKPEKDSDEAVTYSLGKFGQRALDFYSIHVTKESTHPVKPLAQIAGNRYASHPVGKALSDACMGTIASFLSKYQDIIIEHQKVVKGNQKRLESLRELAGKENLEYPSVTLPPQPHTKEGVDAYNEVIARVRMWVNLNLWQKLKLSRDDAKPLLRLKGFPSFPLVERQANEVDWWDMVCNVKKLINEKKEDGKVFWQNLAGYKRQEALRPYLSSEEDRKKGKKFARTQLGDLLLHLEKKHGEDWGKVYDEAWERIDKKVEGLSKHIKLEEERRSEDAQSKAALTDWLRAKASFVIEGLKEADDKDEFCRCELKLQKWYGDLRGKPFAIEAENSILDISGFSKQYNCAFIWQKDGVKKLNLYLIINYFKGGKLRFKKIKPEAFEANRFYTVINKKSGEIVPMEVNFNFDDPNLIILPLAFGKRQGREFIWNDLLSLETGSLKLANGRVIEKTLYNRRTRQDEPALFVALTFERREVLDSSNIKPMNLIGVDRGENIPAVIALTDPEGCPLSRFKDSLGNPTHILRIGESYKEKQRTIQAKKEVEQRRAGGYSRKYASKAKNLADDMVRNTARDLLYYAVTQDAMLIFENLSRGFGRQGKRTFMAERQYTRMEDWLTAKLAYEGLPSKTYLSKTLAQYTSKTCSNCGFTITSADYDRVLEKLKKTATGWMTTINGKELKVEGQITYYNRYKRQNVVKDLSVELDRLSEESVNNDISSWTKGRSGEALSLLKKRFSHRPVQEKFVCLNCGFETHADEQAALNIARSWLFLRSQEYKKYQTNKTTGNTDKRAFVETWQSFYRKKLKEVWKPAV

SEQ ID NO: 44498 - protein, 979 aa, synthetic construct
  REGION 1..979: note = engineered CasX variant
QEIKRINKIRRRLVKDSNTKKAGKTGPMKTLLVRVMTPDLRERLENLRKKPENIPQPISNTSRANLNKLLTDYTEMKKAILHVYWEEFQKDPVGLMSRVAQPASKKIDQNKLKPEMDEKGNLTTAGFACSQCGQPLFVYKLEQVSEKGKAYTNYFGRCNVAEHEKLILLAQLKPEKDSDEAVTYSLGKFGQRALDFYSIHVTKESTHPVKPLAQIAGNRYASSPVGKALSDACMGTIASFLSKYQDIIIEHQKVVKGNQKRLESLRELAGKENLEYPSVTLPPQPHTKEGVDAYNEVIARVRMWVNLNLWQKLKLSRDDAKPLLRLKGFPSFPLVERQANEVDWWDMVCNVKKLINEKKEDGKVFWQNLAGYKRQEALRPYLSSEEDRKKGKKFARTQLGDLLLHLEKKHGEDWGKVYDEAWERIDKKVEGLSKHIKLEEERRSEDAQSKAALTDWLRAKASFVIEGLKEADDKDEFCRCELKLQKWYGDLRGKPFAIEAENSILDISGFSKQYNCAFIWQKDGVKKLNLYLIINYFKGGKLRFKKIKPEAFEANRFYTVINKKSGEIVPMEVNFNFDDPNLIILPLAFGKRQGREFIWNDLLSLETGSLKLANGRVIEKTLYNRRTRQDEPALFVALTFERREVLDSSNIKPMNLIGVDRGENIPAVIALTDPEGCPLSRFKDSLGNPTHILRIGESYKEKQRTIQAKKEVEQRRAGGYSRKYASKAKNLADDMVRNTARDLLYYAVTQDAMLIFENLSRGFGRQGKRTFMAERQYTRMEDWLTAKLAYEGLPSKTYLSKTLAQYTSKTCSNCGFTITSADYDRVLEKLKKTATGWMTTINGKELKVEGQITYYNRYKRQNVVKDLSVELDRLSEESVNNDISSWTKGRSGEALSLLKKRFSHRPVQEKFVCLNCGFETHADEQAALNIARSWLFLRSQEYKKYQTNKTTGNTDKRAFVETWQSFYRKKLKEVWKPAV

SEQ ID NO: 44499 - protein, 979 aa, synthetic construct
  REGION 1..979: note = engineered CasX variant
QEIKRINKIRRRLVKDSNTKKAGKTGPMKTLLVRVMTPDLRERLENLRKKPENIPQPISNTSRANLNKLLTDYTEMKKAILHVYWEEFQKDPVGLMSRVAQPASKKIDQNKLKPEMDEKGNLTTAGFACSQCGQPLFVYKLEQVSEKGKAYTNYFGRCNVAEHEKLILLAQLKPEKDSDEAVTYSLGKFGQRALDFYSIHVTKESTHPVKPLAQIAGNRYASTPVGKALSDACMGTIASFLSKYQDIIIEHQKVVKGNQKRLESLRELAGKENLEYPSVTLPPQPHTKEGVDAYNEVIARVRMWVNLNLWQKLKLSRDDAKPLLRLKGFPSFPLVERQANEVDWWDMVCNVKKLINEKKEDGKVFWQNLAGYKRQEALRPYLSSEEDRKKGKKFARTQLGDLLLHLEKKHGEDWGKVYDEAWERIDKKVEGLSKHIKLEEERRSEDAQSKAALTDWLRAKASFVIEGLKEADDKDEFCRCELKLQKWYGDLRGKPFAIEAENSILDISGFSKQYNCAFIWQKDGVKKLNLYLIINYFKGGKLRFKKIKPEAFEANRFYTVINKKSGEIVPMEVNFNFDDPNLIILPLAFGKRQGREFIWNDLLSLETGSLKLANGRVIEKTLYNRRTRQDEPALFVALTFERREVLDSSNIKPMNLIGVDRGENIPAVIALTDPEGCPLSRFKDSLGNPTHILRIGESYKEKQRTIQAKKEVEQRRAGGYSRKYASKAKNLADDMVRNTARDLLYYAVTQDAMLIFENLSRGFGRQGKRTFMAERQYTRMEDWLTAKLAYEGLPSKTYLSKTLAQYTSKTCSNCGFTITSADYDRVLEKLKKTATGWMTTINGKELKVEGQITYYNRYKRQNVVKDLSVELDRLSEESVNNDISSWTKGRSGEALSLLKKRFSHRPVQEKFVCLNCGFETHADEQAALNIARSWLFLRSQEYKKYQTNKTTGNTDKRAFVETWQSFYRKKLKEVWKPAV

SEQ ID NO: 44500 - protein, 979 aa, synthetic construct
  REGION 1..979: note = engineered CasX variant
QEIKRINKIRRRLVKDSNTKKAGKTGPMKTLLVRVMTPDLRERLENLRKKPENIPQPISNTSRANLNKLLTDYTEMKKAILHVYWEEFQKDPVGLMSRVAQPASKKIDQNKLKPEMDEKGNLTTAGFACSQCGQPLFVYKLEQVSEKGKAYTNYFGRCNVAEHEKLILLAQLKPEKDSDEAVTYSLGKFGQRALDFYSIHVTKESTHPVKPLAQIAGNRYASAPVGKALSDACMGTIASFLSKYQDIIIEHQKVVKGNQKRLESLRELAGKENLEYPSVTLPPQPHTKEGVDAYNEVIARVRMWVNLNLWQKLKLSRDDAKPLLRLKGFPSFPLVERQANEVDWWDMVCNVKKLINEKKEDGKVFWQNLAGYKRQEALRPYLSSEEDRKKGKKFARTQLGDLLLHLEKKHGEDWGKVYDEAWERIDKKVEGLSKHIKLEEERRSEDAQSKAALTDWLRAKASFVIEGLKEADDKDEFCRCELKLQKWYGDLRGKPFAIEAENSILDISGFSKQYNCAFIWQKDGVKKLNLYLIINYFKGGKLRFKKIKPEAFEANRFYTVINKKSGEIVPMEVNFNFDDPNLIILPLAFGKRQGREFIWNDLLSLETGSLKLANGRVIEKTLYNRRTRQDEPALFVALTFERREVLDSSNIKPMNLIGVDRGENIPAVIALTDPEGCPLSRFKDSLGNPTHILRIGESYKEKQRTIQAKKEVEQRRAGGYSRKYASKAKNLADDMVRNTARDLLYYAVTQDAMLIFENLSRGFGRQGKRTFMAERQYTRMEDWLTAKLAYEGLPSKTYLSKTLAQYTSKTCSNCGFTITSADYDRVLEKLKKTATGWMTTINGKELKVEGQITYYNRYKRQNVVKDLSVELDRLSEESVNNDISSWTKGRSGEALSLLKKRFSHRPVQEKFVCLNCGFETHADEQAALNIARSWLFLRSQEYKKYQTNKTTGNTDKRAFVETWQSFYRKKLKEVWKPAV

SEQ ID NO: 44501 - protein, 979 aa, synthetic construct
  REGION 1..979: note = engineered CasX variant
QEIKRINKIRRRLVKDSNTKKAGKTGPMKTLLVRVMTPDLRERLENLRKKPENIPQPISNTSRANLNKLLTDYTEMKKAILHVYWEEFQKDPVGLMSRVAQPASKKIDQNKLKPEMDEKGNLTTAGFACSQCGQPLFVYKLEQVSEKGKAYTNYFGRCNVAEHEKLILLAQLKPEKDSDEAVTYSLGKFGQRALDFYSIHVTKESTHPVKPLAQIAGNRYASVPVGKALSDACMGTIASFLSKYQDIIIEHQKVVKGNQKRLESLRELAGKENLEYPSVTLPPQPHTKEGVDAYNEVIARVRMWVNLNLWQKLKLSRDDAKPLLRLKGFPSFPLVERQANEVDWWDMVCNVKKLINEKKEDGKVFWQNLAGYKRQEALRPYLSSEEDRKKGKKFARTQLGDLLLHLEKKHGEDWGKVYDEAWERIDKKVEGLSKHIKLEEERRSEDAQSKAALTDWLRAKASFVIEGLKEADDKDEFCRCELKLQKWYGDLRGKPFAIEAENSILDISGFSKQYNCAFIWQKDGVKKLNLYLIINYFKGGKLRFKKIKPEAFEANRFYTVINKKSGEIVPMEVNFNFDDPNLIILPLAFGKRQGREFIWNDLLSLETGSLKLANGRVIEKTLYNRRTRQDEPALFVALTFERREVLDSSNIKPMNLIGVDRGENIPAVIALTDPEGCPLSRFKDSLGNPTHILRIGESYKEKQRTIQAKKEVEQRRAGGYSRKYASKAKNLADDMVRNTARDLLYYAVTQDAMLIFENLSRGFGRQGKRTFMAERQYTRMEDWLTAKLAYEGLPSKTYLSKTLAQYTSKTCSNCGFTITSADYDRVLEKLKKTATGWMTTINGKELKVEGQITYYNRYKRQNVVKDLSVELDRLSEESVNNDISSWTKGRSGEALSLLKKRFSHRPVQEKFVCLNCGFETHADEQAALNIARSWLFLRSQEYKKYQTNKTTGNTDKRAFVETWQSFYRKKLKEVWKPAV

SEQ ID NO: 44502 - protein, 979 aa, synthetic construct
  REGION 1..979: note = engineered CasX variant
QEIKRINKIRRRLVKDSNTKKAGKTGPMKTLLVRVMTPDLRERLENLRKKPENIPQPISNTSRANLNKLLTDYTEMKKAILHVYWEEFQKDPVGLMSRVAQPASKKIDQNKLKPEMDEKGNLTTAGFACSQCGQPLFVYKLEQVSEKGKAYTNYFGRCNVAEHEKLIKLAQLKPEKDSDEAVTYSLGKFGQRALDFYSIHVTKESTHPVKPLAQIAGNRYASGPVGKALSDACMGTIASFLSKYQDIIIEHQKVVKGNQKRLESLRELAGKENLEYPSVTLPPQPHTKEGVDAYNEVIARVRMWVNLNLWQKLKLSRDDAKPLLRLKGFPSFPLVERQANEVDWWDMVCNVKKLINEKKEDGKVFWQNLAGYKRQEALRPYLSSEEDRKKGKKFARTQLGDLLLHLEKKHGEDWGKVYDEAWERIDKKVEGLSKHIKLEEERRSEDAQSKAALTDWLRAKASFVIEGLKEADDKDEFCRCELKLQKWYGDLRGKPFAIEAENSILDISGFSKQYNCAFIWQKDGVKKLNLYLIINYFKGGKLRFKKIKPEAFEANRFYTVINKKSGEIVPMEVNFNFDDPNLIILPLAFGKRQGREFIWNDLLSLETGSLKLANGRVIEKTLYNRRTRQDEPALFVALTFERREVLDSSNIKPMNLIGVDRGENIPAVIALTDPEGCPLSRFKDSLGNPTHILRIGESYKEKQRTIQAKKEVEQRRAGGYSRKYASKAKNLADDMVRNTARDLLYYAVTQDAMLIFENLSRGFGRQGKRTFMAERQYTRMEDWLTAKLAYEGLPSKTYLSKTLAQYTSKTCSNCGFTITSADYDRVLEKLKKTATGWMTTINGKELKVEGQITYYNRYKRQNVVKDLSVELDRLSEESVNNDISSWTKGRSGEALSLLKKRFSHRPVQEKFVCLNCGFETHADEQAALNIARSWLFLRSQEYKKYQTNKTTGNTDKRAFVETWQSFYRKKLKEVWKPAV

SEQ ID NO: 44503 - protein, 978 aa, synthetic construct
  REGION 1..978: note = engineered CasX variant
QEIKRINKIRRRLVKDSNTKKAGKTGPMKTLLVRVMTPDLRERLENLRKKPENIPQPISNTSRANLNKLLTDYTEMKKAILHVYWEEFQKDPVGLMSRVAQPASKKIDQNKLKPEMDEKGNLTTAGFACSQCGQPLFVYKLEQVSEKGKAYTNYFGRCNVAEHEKLILLAQLKPEKDSDEAVTYSLGKFGQRALDFYSIHVTKESTHPVKPLAQIAGNRYASPVGKALSDACMGTIASFLSKYQDIIIEHQKVVKGNQKRLESLRELAGKENLEYPSVTLPPQPHTKEGVDAYNEVIARVRMWVNLNLWQKLKLSRDDAKPLLRLKGFPSFPLVERQANEVDWWDMVCNVKKLINEKKEDGKVFWQNLAGYKRQEALRPYLSSEEDRKKGKKFARTQLGDLLLHLEKKHGEDWGKVYDEAWERIDKKVEGLSKHIKLEEERRSEDAQSKAALTDWLRAKASFVIEGLKEADDKDEFCRCELKLQKWYGDLRGKPFAIEAENSILDISGFSKQYNCAFIWQKDGVKKLNLYLIINYFKGGKLRFKKIKPEAFEANRFYTVINKKSGEIVPMEVNFNFDDPNLIILPLAFGKRQGREFIWNDLLSLETGSLKLANGRVIEKTLYNRRTRQDEPALFVALTFERREVLDSSNIKPMNLIGVDRGENIPAVIALTDPEGCPLSRFKDSLGNPTHILRIGESYKEKQRTIQAKKEVEQRRAGGYSRKYASKAKNLADDMVRNTARDLLYYAVTQDAMLIFENLSRGFGRQGKRTFMAERQYTRMEDWLTAKLAYEGLPSKTYLSKTLAQYTSKTCSNCGFTITSADYDRVLEKLKKTATGWMTTINGKELKVEGQITYYNRYKRQNVVKDLSVELDRLSEESVNNDISSWTKGRSGEALSLLKKRFSHRPVQEKFVCLNCGFETHADEQAALNIARSWLFLRSQEYKKYQTNKTTGNTDKRAFVETWQSFYRKKLKEVWKPAV

SEQ ID NO: 44504 - protein, 979 aa, synthetic construct
  REGION 1..979: note = engineered CasX variant
QEIKRINKIRRRLVKDSNTKKAGKTGPMKTLLVRVMTPDLRERLENLRKKPENIPQPISNTSRANLNKLLTDYTEMKKAILHVYWEEFQKDPVGLMSRVAQPASKKIDQNKLKPEMDEKGNLTTAGFACSQCGQPLFVYKLEQVSEKGKAYTNYFGRCNVAEHEKLILLAQLKPEKDSDEAVTYSLGKFGQRALDFYSIHVTKESTHPVKPLAQIAGNRYASYPVGKALSDACMGTIASFLSKYQDIIIEHQKVVKGNQKRLESLRELAGKENLEYPSVTLPPQPHTKEGVDAYNEVIARVRMWVNLNLWQKLKLSRDDAKPLLRLKGFPSFPLVERQANEVDWWDMVCNVKKLINEKKEDGKVFWQNLAGYKRQEALRPYLSSEEDRKKGKKFARTQLGDLLLHLEKKHGEDWGKVYDEAWERIDKKVEGLSKHIKLEEERRSEDAQSKAALTDWLRAKASFVIEGLKEADKDEFCRCELKLQKWYGDLRGKPFAIEAENSILDISGFSKQYNCAFIWQKDGVKKLNLYLIINYFKGGKLRFKKIKPEAFEANRFYTVINKKSGEIVPMEVNFNFDDPNLIILPLAFGKRQGREFIWNDLLSLETGSLKLANGRVIEKTLYNRRTRQDEPALFVALTFERREVLDSSNIKPMNLIGVDRGENIPAVIALTDPEGCPLSRFKDSLGNPTHILRIGESYKEKQRTIQAKKEVEQRRAGGYSRKYASKAKNLADDMVRNTARDLLYYAVTQDAMLIFENLSRGFGRQGKRTFMAERQYTRMEDWLTAKLAYEGLPSKTYLSKTLAQYTSKTCSNCGFTITSADYDRVLEKLKKTATGWMTTINGKELKVEGQITYYNRYKRQNVVKDLSVELDRLSEESVNNDISSWTKGRSGNEALSLLKKRFSHRPVQEKFVCLNCGFETHADEQAALNIARSWLFLRSQEYKKYQTNKTTGNTDKRAFVETWQSFYRKKLKEVWKPAV

SEQ ID NO: 44505 - protein, 979 aa, synthetic construct
  REGION 1..979: note = engineered CasX variant
QEIKRINKIRRRLVKDSNTKKAGKTGPMKTLLVRVMTPDLRERLENLRKKPENIPQPISNTSRANLNKLLTDYTEMKKAILHVYWEEFQKDPVGLMSRVAQPASKKIDQNKLKPEMDEKGNLTTAGFACSQCGQPLFVYKLEQVSEKGKAYTNYFGRCNVAEHEKLILLAQLKPEKDSDEAVTYSLGKFGQRALDFYSIHVTKESTHPVKPLAQIAGNRYASHPVGKALSDACMGTIASFLSKYQDIIIEHQKVVKGNQKRLESLRELAGKENLEYPSVTLPPQPHTKEGVDAYNEVIARVRMWVNLNLWQKLKLSRDDAKPLLRLKGFPSFPLVERQANEVDWWDMVCNVKKLINEKKEDGKVFWQNLAGYKRQEALRPYLSSEEDRKKGKKFARTQLGDLLLHLEKKHGEDWGKVYDEAWERIDKKVEGLSKHIKLEEERRSEDAQSKAALTDWLRAKASFVIEGLKEADKDEFCRCELKLQKWYGDLRGKPFAIEAENSILDISGFSKQYNCAFIWQKDGVKKLNLYLIINYFKGGKLRFKKIKPEAFEANRFYTVINKKSGEIVPMEVNFNFDDPNLIILPLAFGKRQGREFIWNDLLSLETGSLKLANGRVIEKTLYNRRTRQDEPALFVALTFERREVLDSSNIKPMNLIGVDRGENIPAVIALTDPEGCPLSRFKDSLGNPTHILRIGESYKEKQRTIQAKKEVEQRRAGGYSRKYASKAKNLADDMVRNTARDLLYYAVTQDAMLIFENLSRGFGRQGKRTFMAERQYTRMEDWLTAKLAYEGLPSKTYLSKTLAQYTSKTCSNCGFTITSADYDRVLEKLKKTATGWMTTINGKELKVEGQITYYNRYKRQNVVKDLSVELDRLSEESVNNDISSWTKGRSGNEALSLLKKRFSHRPVQEKFVCLNCGFETHADEQAALNIARSWLFLRSQEYKKYQTNKTTGNTDKRAFVETWQSFYRKKLKEVWKPAV

SEQ ID NO: 44506 - protein, 979 aa, synthetic construct
  REGION 1..979: note = engineered CasX variant
QEIKRINKIRRRLVKDSNTKKAGKTGPMKTLLVRVMTPDLRERLENLRKKPENIPQPISNTSRANLNKLLTDYTEMKKAILHVYWEEFQKDPVGLMSRVAQPASKKIDQNKLKPEMDEKGNLTTAGFACSQCGQPLFVYKLEQVSEKGKAYTNYFGRCNVAEHEKLILLAQLKPEKDSDEAVTYSLGKFGQRALDFYSIHVTKESTHPVKPLAQIAGNRYASSPVGKALSDACMGTIASFLSKYQDIIIEHQKVVKGNQKRLESLRELAGKENLEYPSVTLPPQPHTKEGVDAYNEVIARVRMWVNLNLWQKLKLSRDDAKPLLRLKGFPSFPLVERQANEVDWWDMVCNVKKLINEKKEDGKVFWQNLAGYKRQEALRPYLSSEEDRKKGKKFARTQLGDLLLHLEKKHGEDWGKVYDEAWERIDKKVEGLSKHIKLEEERRSEDAQSKAALTDWLRAKASFVIEGLKEADKDEFCRCELKLQKWYGDLRGKPFAIEAENSILDISGFSKQYNCAFIWQKDGVKKLNLYLIINYFKGGKLRFKKIKPEAFEANRFYTVINKKSGEIVPMEVNFNFDDPNLIILPLAFGKRQGREFIWNDLLSLETGSLKLANGRVIEKTLYNRRTRQDEPALFVALTFERREVLDSSNIKPMNLIGVDRGENIPAVIALTDPEGCPLSRFKDSLGNPTHILRIGESYKEKQRTIQAKKEVEQRRAGGYSRKYASKAKNLADDMVRNTARDLLYYAVTQDAMLIFENLSRGFGRQGKRTFMAERQYTRMEDWLTAKLAYEGLPSKTYLSKTLAQYTSKTCSNCGFTITSADYDRVLEKLKKTATGWMTTINGKELKVEGQITYYNRYKRQNVVKDLSVELDRLSEESVNNDISSWTKGRSGNEALSLLKKRFSHRPVQEKFVCLNCGFETHADEQAALNIARSWLFLRSQEYKKYQTNKTTGNTDKRAFVETWQSFYRKKLKEVWKPAV

SEQ ID NO: 44507 - protein, 979 aa, synthetic construct
  REGION 1..979: note = engineered CasX variant
QEIKRINKIRRRLVKDSNTKKAGKTGPMKTLLVRVMTPDLRERLENLRKKPENIPQPISNTSRANLNKLLTDYTEMKKAILHVYWEEFQKDPVGLMSRVAQPASKKIDQNKLKPEMDEKGNLTTAGFACSQCGQPLFVYKLEQVSEKGKAYTNYFGRCNVAEHEKLILLAQLKPEKDSDEAVTYSLGKFGQRALDFYSIHVTKESTHPVKPLAQIAGNRYASTPVGKALSDACMGTIASFLSKYQDIIIEHQKVVKGNQKRLESLRELAGKENLEYPSVTLPPQPHTKEGVDAYNEVIARVRMWVNLNLWQKLKLSRDDAKPLLRLKGFPSFPLVERQANEVDWWDMVCNVKKLINEKKEDGKVFWQNLAGYKRQEALRPYLSSEEDRKKGKKFARTQLGDLLLHLEKKHGEDWGKVYDEAWERIDKKVEGLSKHIKLEEERRSEDAQSKAALTDWLRAKASFVIEGLKEADKDEFCRCELKLQKWYGDLRGKPFAIEAENSILDISGFSKQYNCAFIWQKDGVKKLNLYLIINYFKGGKLRFKKIKPEAFEANRFYTVINKKSGEIVPMEVNFNFDDPNLIILPLAFGKRQGREFIWNDLLSLETGSLKLANGRVIEKTLYNRRTRQDEPALFVALTFERREVLDSSNIKPMNLIGVDRGENIPAVIALTDPEGCPLSRFKDSLGNPTHILRIGESYKEKQRTIQAKKEVEQRRAGGYSRKYASKAKNLADDMVRNTARDLLYYAVTQDAMLIFENLSRGFGRQGKRTFMAERQYTRMEDWLTAKLAYEGLPSKTYLSKTLAQYTSKTCSNCGFTITSADYDRVLEKLKKTATGWMTTINGKELKVEGQITYYNRYKRQNVVKDLSVELDRLSEESVNNDISSWTKGRSGNEALSLLKKRFSHRPVQEKFVCLNCGFETHADEQAALNIARSWLFLRSQEYKKYQTNKTTGNTDKRAFVETWQSFYRKKLKEVWKPAV

SEQ ID NO: 44508 - protein, 979 aa, synthetic construct
  REGION 1..979: note = engineered CasX variant
QEIKRINKIRRRLVKDSNTKKAGKTGPMKTLLVRVMTPDLRERLENLRKKPENIPQPISNTSRANLNKLLTDYTEMKKAILHVYWEEFQKDPVGLMSRVAQPASKKIDQNKLKPEMDEKGNLTTAGFACSQCGQPLFVYKLEQVSEKGKAYTNYFGRCNVAEHEKLILLAQLKPEKDSDEAVTYSLGKFGQRALDFYSIHVTKESTHPVKPLAQIAGNRYASAPVGKALSDACMGTIASFLSKYQDIIIEHQKVVKGNQKRLESLRELAGKENLEYPSVTLPPQPHTKEGVDAYNEVIARVRMWVNLNLWQKLKLSRDDAKPLLRLKGFPSFPLVERQANEVDWWDMVCNVKKLINEKKEDGKVFWQNLAGYKRQEALRPYLSSEEDRKKGKKFARTQLGDLLLHLEKKHGEDWGKVYDEAWERIDKKVEGLSKHIKLEEERRSEDAQSKAALTDWLRAKASFVIEGLKEADKDEFCRCELKLQKWYGDLRGKPFAIEAENSILDISGFSKQYNCAFIWQKDGVKKLNLYLIINYFKGGKLRFKKIKPEAFEANRFYTVINKKSGEIVPMEVNFNFDDPNLIILPLAFGKRQGREFIWNDLLSLETGSLKLANGRVIEKTLYNRRTRQDEPALFVALTFERREVLDSSNIKPMNLIGVDRGENIPAVIALTDPEGCPLSRFKDSLGNPTHILRIGESYKEKQRTIQAKKEVEQRRAGGYSRKYASKAKNLADDMVRNTARDLLYYAVTQDAMLIFENLSRGFGRQGKRTFMAERQYTRMEDWLTAKLAYEGLPSKTYLSKTLAQYTSKTCSNCGFTITSADYDRVLEKLKKTATGWMTTINGKELKVEGQITYYNRYKRQNVVKDLSVELDRLSEESVNNDISSWTKGRSGNEALSLLKKRFSHRPVQEKFVCLNCGFETHADEQAALNIARSWLFLRSQEYKKYQTNKTTGNTDKRAFVETWQSFYRKKLKEVWKPAV

SEQ ID NO: 44509 - protein, 979 aa, synthetic construct
  REGION 1..979: note = engineered CasX variant
QEIKRINKIRRRLVKDSNTKKAGKTGPMKTLLVRVMTPDLRERLENLRKKPENIPQPISNTSRANLNKLLTDYTEMKKAILHVYWEEFQKDPVGLMSRVAQPASKKIDQNKLKPEMDEKGNLTTAGFACSQCGQPLFVYKLEQVSEKGKAYTNYFGRCNVAEHEKLILLAQLKPEKDSDEAVTYSLGKFGQRALDFYSIHVTKESTHPVKPLAQIAGNRYASVPVGKALSDACMGTIASFLSKYQDIIIEHQKVVKGNQKRLESLRELAGKENLEYPSVTLPPQPHTKEGVDAYNEVIARVRMWVNLNLWQKLKLSRDDAKPLLRLKGFPSFPLVERQANEVDWWDMVCNVKKLINEKKEDGKVFWQNLAGYKRQEALRPYLSSEEDRKKGKKFARTQLGDLLLHLEKKHGEDWGKVYDEAWERIDKKVEGLSKHIKLEEERRSEDAQSKAALTDWLRAKASFVIEGLKEADKDEFCRCELKLQKWYGDLRGKPFAIEAENSILDISGFSKQYNCAFIWQKDGVKKLNLYLIINYFKGGKLRFKKIKPEAFEANRFYTVINKKSGEIVPMEVNFNFDDPNLIILPLAFGKRQGREFIWNDLLSLETGSLKLANGRVIEKTLYNRRTRQDEPALFVALTFERREVLDSSNIKPMNLIGVDRGENIPAVIALTDPEGCPLSRFKDSLGNPTHILRIGESYKEKQRTIQAKKEVEQRRAGGYSRKYASKAKNLADDMVRNTARDLLYYAVTQDAMLIFENLSRGFGRQGKRTFMAERQYTRMEDWLTAKLAYEGLPSKTYLSKTLAQYTSKTCSNCGFTITSADYDRVLEKLKKTATGWMTTINGKELKVEGQITYYNRYKRQNVVKDLSVELDRLSEESVNNDISSWTKGRSGNEALSLLKKRFSHRPVQEKFVCLNCGFETHADEQAALNIARSWLFLRSQEYKKYQTNKTTGNTDKRAFVETWQSFYRKKLKEVWKPAV

SEQ ID NO: 44510 - protein, 979 aa, synthetic construct
  REGION 1..979: note = engineered CasX variant
QEIKRINKIRRRLVKDSNTKKAGKTGPMKTLLVRVMTPDLRERLENLRKKPENIPQPISNTSRANLNKLLTDYTEMKKAILHVYWEEFQKDPVGLMSRVAQPASKKIDQNKLKPEMDEKGNLTTAGFACSQCGQPLFVYKLEQVSEKGKAYTNYFGRCNVAEHEKLIKLAQLKPEKDSDEAVTYSLGKFGQRALDFYSIHVTKESTHPVKPLAQIAGNRYASGPVGKALSDACMGTIASFLSKYQDIIIEHQKVVKGNQKRLESLRELAGKENLEYPSVTLPPQPHTKEGVDAYNEVIARVRMWVNLNLWQKLKLSRDDAKPLLRLKGFPSFPLVERQANEVDWWDMVCNVKKLINEKKEDGKVFWQNLAGYKRQEALRPYLSSEEDRKKGKKFARTQLGDLLLHLEKKHGEDWGKVYDEAWERIDKKVEGLSKHIKLEEERRSEDAQSKAALTDWLRAKASFVIEGLKEADKDEFCRCELKLQKWYGDLRGKPFAIEAENSILDISGFSKQYNCAFIWQKDGVKKLNLYLIINYFKGGKLRFKKIKPEAFEANRFYTVINKKSGEIVPMEVNFNFDDPNLIILPLAFGKRQGREFIWNDLLSLETGSLKLANGRVIEKTLYNRRTRQDEPALFVALTFERREVLDSSNIKPMNLIGVDRGENIPAVIALTDPEGCPLSRFKDSLGNPTHILRIGESYKEKQRTIQAKKEVEQRRAGGYSRKYASKAKNLADDMVRNTARDLLYYAVTQDAMLIFENLSRGFGRQGKRTFMAERQYTRMEDWLTAKLAYEGLPSKTYLSKTLAQYTSKTCSNCGFTITSADYDRVLEKLKKTATGWMTTINGKELKVEGQITYYNRYKRQNVVKDLSVELDRLSEESVNNDISSWTKGRSGNEALSLLKKRFSHRPVQEKFVCLNCGFETHADEQAALNIARSWLFLRSQEYKKYQTNKTTGNTDKRAFVETWQSFYRKKLKEVWKPAV

SEQ ID NO: 44511 - protein, 978 aa, synthetic construct
  REGION 1..978: note = engineered CasX variant
QEIKRINKIRRRLVKDSNTKKAGKTGPMKTLLVRVMTPDLRERLENLRKKPENIPQPISNTSRANLNKLLTDYTEMKKAILHVYWEEFQKDPVGLMSRVAQPASKKIDQNKLKPEMDEKGNLTTAGFACSQCGQPLFVYKLEQVSEKGKAYTNYFGRCNVAEHEKLILLAQLKPEKDSDEAVTYSLGKFGQRALDFYSIHVTKESTHPVKPLAQIAGNRYASPVGKALSDACMGTIASFLSKYQDIIIEHQKVVKGNQKRLESLRELAGKENLEYPSVTLPPQPHTKEGVDAYNEVIARVRMWVNLNLWQKLKLSRDDAKPLLRLKGFPSFPLVERQANEVDWWDMVCNVKKLINEKKEDGKVFWQNLAGYKRQEALRPYLSSEEDRKKGKKFARTQLGDLLLHLEKKHGEDWGKVYDEAWERIDKKVEGLSKHIKLEEERRSEDAQSKAALTDWLRAKASFVIEGLKEADKDEFCRCELKLQKWYGDLRGKPFAIEAENSILDISGFSKQYNCAFIWQKDGVKKLNLYLIINYFKGGKLRFKKIKPEAFEANRFYTVINKKSGEIVPMEVNFNFDDPNLIILPLAFGKRQGREFIWNDLLSLETGSLKLANGRVIEKTLYNRRTRQDEPALFVALTFERREVLDSSNIKPMNLIGVDRGENIPAVIALTDPEGCPLSRFKDSLGNPTHILRIGESYKEKQRTIQAKKEVEQRRAGGYSRKYASKAKNLADDMVRNTARDLLYYAVTQDAMLIFENLSRGFGRQGKRTFMAERQYTRMEDWLTAKLAYEGLPSKTYLSKTLAQYTSKTCSNCGFTITSADYDRVLEKLKKTATGWMTTINGKELKVEGQITYYNRYKRQNVVKDLSVELDRLSEESVNNDISSWTKGRSGNEALSLLKKRFSHRPVQEKFVCLNCGFETHADEQAALNIARSWLFLRSQEYKKYQTNKTTGNTDKRAFVETWQSFYRKKLKEVWKPAV

SEQ ID NO: 44512 - protein, 978 aa, synthetic construct
  REGION 1..978: note = engineered CasX variant
QEIKRINKIRRRLVKDSNTKKAGKTGPMKTLLVRVMTPDLRERLENLRKKPENIPQPISNTSRANLNKLLTDYTEMKKAILHVYWEEFQKDPVGLMSRVAQPASKKIDQNKLKPEMDEKGNLTTAGFACSQCGQPLFVYKLEQVSEKGKAYTNYFGRCNVAEHEKLILLAQLKPEKDSDEAVTYSLGKFGQRALDFYSIHVTKESTHPVKPLAQIAGNRYASYPVGKALSDACMGTIASFLSKYQDIIIEHQKVVKGNQKRLESLRELAGKENLEYPSVTLPPQPHTKEGVDAYNEVIARVRMWVNLNLWQKLKLSRDDAKPLLRLKGFPSFPLVERQANEVDWWDMVCNVKKLINEKKEDGKVFWQNLAGYKRQEALRPYLSSEEDRQKGKKFARTQLGDLLLHLEKKHGEDWGKVYDEAWERIDKKVEGLSKHIKLEEERRSEDAQSKAALTDWLRAKASFVIEGLKEADKDEFCRCELKLQKWYGDLRGKPFAIEAENSILDISGFSKQYNCAFIWQKDGVKKLNLYLIINYFKGGKLRFKKIKPEAFEANRFYTVINKKSGEIVPMEVNFNFDDPNLIILPLAFGKRQGREFIWNDLLSLETGSLKLANGRVIEKTLYNRRTRQDEPALFVALTFERREVLDSSNIKPMNLIGVDRGENIPAVIALTDPEGCPLSRFKDSLGNPTHILRIGESYKEKQRTIQAKKEVEQRRAGGYSRKYASKAKNLADDMVRNTARDLLYYAVTQDAMLIFENLSRGFGRQGKRTFMAERQYTRMEDWLTAKLAYEGLPSKTYLSKTLAQYTSKTCSNCGFTITSADYDRVLEKLKKTATGWMTTINGKELKVEGQITYYNRYKRQNVVKDLSVELDRLSEESVNNDISSWTKGRSGEALSLLKKRFSHRPVQEKFVCLNCGFETHADEQAALNIARSWLFLRSQEYKKYQTNKTTGNTDKRAFVETWQSFYRKKLKEVWKPAV

SEQ ID NO: 44513 - protein, 978 aa, synthetic construct
  REGION 1..978: note = engineered CasX variant
QEIKRINKIRRRLVKDSNTKKAGKTGPMKTLLVRVMTPDLRERLENLRKKPENIPQPISNTSRANLNKLLTDYTEMKKAILHVYWEEFQKDPVGLMSRVAQPASKKIDQNKLKPEMDEKGNLTTAGFACSQCGQPLFVYKLEQVSEKGKAYTNYFGRCNVAEHEKLILLAQLKPEKDSDEAVTYSLGKFGQRALDFYSIHVTKESTHPVKPLAQIAGNRYASHPVGKALSDACMGTIASFLSKYQDIIIEHQKVVKGNQKRLESLRELAGKENLEYPSVTLPPQPHTKEGVDAYNEVIARVRMWVNLNLWQKLKLSRDDAKPLLRLKGFPSFPLVERQANEVDWWDMVCNVKKLINEKKEDGKVFWQNLAGYKRQEALRPYLSSEEDRQKGKKFARTQLGDLLLHLEKKHGEDWGKVYDEAWERIDKKVEGLSKHIKLEEERRSEDAQSKAALTDWLRAKASFVIEGLKEADKDEFCRCELKLQKWYGDLRGKPFAIEAENSILDISGFSKQYNCAFIWQKDGVKKLNLYLIINYFKGGKLRFKKIKPEAFEANRFYTVINKKSGEIVPMEVNFNFDDPNLIILPLAFGKRQGREFIWNDLLSLETGSLKLANGRVIEKTLYNRRTRQDEPALFVALTFERREVLDSSNIKPMNLIGVDRGENIPAVIALTDPEGCPLSRFKDSLGNPTHILRIGESYKEKQRTIQAKKEVEQRRAGGYSRKYASKAKNLADDMVRNTARDLLYYAVTQDAMLIFENLSRGFGRQGKRTFMAERQYTRMEDWLTAKLAYEGLPSKTYLSKTLAQYTSKTCSNCGFTITSADYDRVLEKLKKTATGWMTTINGKELKVEGQITYYNRYKRQNVVKDLSVELDRLSEESVNNDISSWTKGRSGEALSLLKKRFSHRPVQEKFVCLNCGFETHADEQAALNIARSWLFLRSQEYKKYQTNKTTGNTDKRAFVETWQSFYRKKLKEVWKPAV

SEQ ID NO: 44514 - protein, 978 aa, synthetic construct
  REGION 1..978: note = engineered CasX variant
QEIKRINKIRRRLVKDSNTKKAGKTGPMKTLLVRVMTPDLRERLENLRKKPENIPQPISNTSRANLNKLLTDYTEMKKAILHVYWEEFQKDPVGLMSRVAQPASKKIDQNKLKPEMDEKGNLTTAGFACSQCGQPLFVYKLEQVSEKGKAYTNYFGRCNVAEHEKLILLAQLKPEKDSDEAVTYSLGKFGQRALDFYSIHVTKESTHPVKPLAQIAGNRYASSPVGKALSDACMGTIASFLSKYQDIIIEHQKVVKGNQKRLESLRELAGKENLEYPSVTLPPQPHTKEGVDAYNEVIARVRMWVNLNLWQKLKLSRDDAKPLLRLKGFPSFPLVERQANEVDWWDMVCNVKKLINEKKEDGKVFWQNLAGYKRQEALRPYLSSEEDRQKGKKFARTQLGDLLLHLEKKHGEDWGKVYDEAWERIDKKVEGLSKHIKLEEERRSEDAQSKAALTDWLRAKASFVIEGLKEADKDEFCRCELKLQKWYGDLRGKPFAIEAENSILDISGFSKQYNCAFIWQKDGVKKLNLYLIINYFKGGKLRFKKIKPEAFEANRFYTVINKKSGEIVPMEVNFNFDDPNLIILPLAFGKRQGREFIWNDLLSLETGSLKLANGRVIEKTLYNRRTRQDEPALFVALTFERREVLDSSNIKPMNLIGVDRGENIPAVIALTDPEGCPLSRFKDSLGNPTHILRIGESYKEKQRTIQAKKEVEQRRAGGYSRKYASKAKNLADDMVRNTARDLLYYAVTQDAMLIFENLSRGFGRQGKRTFMAERQYTRMEDWLTAKLAYEGLPSKTYLSKTLAQYTSKTCSNCGFTITSADYDRVLEKLKKTATGWMTTINGKELKVEGQITYYNRYKRQNVVKDLSVELDRLSEESVNNDISSWTKGRSGEALSLLKKRFSHRPVQEKFVCLNCGFETHADEQAALNIARSWLFLRSQEYKKYQTNKTTGNTDKRAFVETWQSFYRKKLKEVWKPAV

SEQ ID NO: 44515 - protein, 978 aa, synthetic construct
  REGION 1..978: note = engineered CasX variant
QEIKRINKIRRRLVKDSNTKKAGKTGPMKTLLVRVMTPDLRERLENLRKKPENIPQPISNTSRANLNKLLTDYTEMKKAILHVYWEEFQKDPVGLMSRVAQPASKKIDQNKLKPEMDEKGNLTTAGFACSQCGQPLFVYKLEQVSEKGKAYTNYFGRCNVAEHEKLILLAQLKPEKDSDEAVTYSLGKFGQRALDFYSIHVTKESTHPVKPLAQIAGNRYASTPVGKALSDACMGTIASFLSKYQDIIIEHQKVVKGNQKRLESLRELAGKENLEYPSVTLPPQPHTKEGVDAYNEVIARVRMWVNLNLWQKLKLSRDDAKPLLRLKGFPSFPLVERQANEVDWWDMVCNVKKLINEKKEDGKVFWQNLAGYKRQEALRPYLSSEEDRQKGKKFARTQLGDLLLHLEKKHGEDWGKVYDEAWERIDKKVEGLSKHIKLEEERRSEDAQSKAALTDWLRAKASFVIEGLKEADKDEFCRCELKLQKWYGDLRGKPFAIEAENSILDISGFSKQYNCAFIWQKDGVKKLNLYLIINYFKGGKLRFKKIKPEAFEANRFYTVINKKSGEIVPMEVNFNFDDPNLIILPLAFGKRQGREFIWNDLLSLETGSLKLANGRVIEKTLYNRRTRQDEPALFVALTFERREVLDSSNIKPMNLIGVDRGENIPAVIALTDPEGCPLSRFKDSLGNPTHILRIGESYKEKQRTIQAKKEVEQRRAGGYSRKYASKAKNLADDMVRNTARDLLYYAVTQDAMLIFENLSRGFGRQGKRTFMAERQYTRMEDWLTAKLAYEGLPSKTYLSKTLAQYTSKTCSNCGFTITSADYDRVLEKLKKTATGWMTTINGKELKVEGQITYYNRYKRQNVVKDLSVELDRLSEESVNNDISSWTKGRSGEALSLLKKRFSHRPVQEKFVCLNCGFETHADEQAALNIARSWLFLRSQEYKKYQTNKTTGNTDKRAFVETWQSFYRKKLKEVWKPAV

SEQ ID NO: 44516 - protein, 978 aa, synthetic construct
  REGION 1..978: note = engineered CasX variant
QEIKRINKIRRRLVKDSNTKKAGKTGPMKTLLVRVMTPDLRERLENLRKKPENIPQPISNTSRANLNKLLTDYTEMKKAILHVYWEEFQKDPVGLMSRVAQPASKKIDQNKLKPEMDEKGNLTTAGFACSQCGQPLFVYKLEQVSEKGKAYTNYFGRCNVAEHEKLILLAQLKPEKDSDEAVTYSLGKFGQRALDFYSIHVTKESTHPVKPLAQIAGNRYASAPVGKALSDACMGTIASFLSKYQDIIIEHQKVVKGNQKRLESLRELAGKENLEYPSVTLPPQPHTKEGVDAYNEVIARVRMWVNLNLWQKLKLSRDDAKPLLRLKGFPSFPLVERQANEVDWWDMVCNVKKLINEKKEDGKVFWQNLAGYKRQEALRPYLSSEEDRQKGKKFARTQLGDLLLHLEKKHGEDWGKVYDEAWERIDKKVEGLSKHIKLEEERRSEDAQSKAALTDWLRAKASFVIEGLKEADKDEFCRCELKLQKWYGDLRGKPFAIEAENSILDISGFSKQYNCAFIWQKDGVKKLNLYLIINYFKGGKLRFKKIKPEAFEANRFYTVINKKSGEIVPMEVNFNFDDPNLIILPLAFGKRQGREFIWNDLLSLETGSLKLANGRVIEKTLYNRRTRQDEPALFVALTFERREVLDSSNIKPMNLIGVDRGENIPAVIALTDPEGCPLSRFKDSLGNPTHILRIGESYKEKQRTIQAKKEVEQRRAGGYSRKYASKAKNLADDMVRNTARDLLYYAVTQDAMLIFENLSRGFGRQGKRTFMAERQYTRMEDWLTAKLAYEGLPSKTYLSKTLAQYTSKTCSNCGFTITSADYDRVLEKLKKTATGWMTTINGKELKVEGQITYYNRYKRQNVVKDLSVELDRLSEESVNNDISSWTKGRSGEALSLLKKRFSHRPVQEKFVCLNCGFETHADEQAALNIARSWLFLRSQEYKKYQTNKTTGNTDKRAFVETWQSFYRKKLKEVWKPAV

SEQ ID NO: 44517 - protein, 978 aa, synthetic construct
  REGION 1..978: note = engineered CasX variant
QEIKRINKIRRRLVKDSNTKKAGKTGPMKTLLVRVMTPDLRERLENLRKKPENIPQPISNTSRANLNKLLTDYTEMKKAILHVYWEEFQKDPVGLMSRVAQPASKKIDQNKLKPEMDEKGNLTTAGFACSQCGQPLFVYKLEQVSEKGKAYTNYFGRCNVAEHEKLILLAQLKPEKDSDEAVTYSLGKFGQRALDFYSIHVTKESTHPVKPLAQIAGNRYASVPVGKALSDACMGTIASFLSKYQDIIIEHQKVVKGNQKRLESLRELAGKENLEYPSVTLPPQPHTKEGVDAYNEVIARVRMWVNLNLWQKLKLSRDDAKPLLRLKGFPSFPLVERQANEVDWWDMVCNVKKLINEKKEDGKVFWQNLAGYKRQEALRPYLSSEEDRQKGKKFARTQLGDLLLHLEKKHGEDWGKVYDEAWERIDKKVEGLSKHIKLEEERRSEDAQSKAALTDWLRAKASFVIEGLKEADKDEFCRCELKLQKWYGDLRGKPFAIEAENSILDISGFSKQYNCAFIWQKDGVKKLNLYLIINYFKGGKLRFKKIKPEAFEANRFYTVINKKSGEIVPMEVNFNFDDPNLIILPLAFGKRQGREFIWNDLLSLETGSLKLANGRVIEKTLYNRRTRQDEPALFVALTFERREVLDSSNIKPMNLIGVDRGENIPAVIALTDPEGCPLSRFKDSLGNPTHILRIGESYKEKQRTIQAKKEVEQRRAGGYSRKYASKAKNLADDMVRNTARDLLYYAVTQDAMLIFENLSRGFGRQGKRTFMAERQYTRMEDWLTAKLAYEGLPSKTYLSKTLAQYTSKTCSNCGFTITSADYDRVLEKLKKTATGWMTTINGKELKVEGQITYYNRYKRQNVVKDLSVELDRLSEESVNNDISSWTKGRSGEALSLLKKRFSHRPVQEKFVCLNCGFETHADEQAALNIARSWLFLRSQEYKKYQTNKTTGNTDKRAFVETWQSFYRKKLKEVWKPAV

SEQ ID NO: 44518 - protein, 978 aa, synthetic construct
  REGION 1..978: note = engineered CasX variant
QEIKRINKIRRRLVKDSNTKKAGKTGPMKTLLVRVMTPDLRERLENLRKKPENIPQPISNTSRANLNKLLTDYTEMKKAILHVYWEEFQKDPVGLMSRVAQPASKKIDQNKLKPEMDEKGNLTTAGFACSQCGQPLFVYKLEQVSEKGKAYTNYFGRCNVAEHEKLIKLAQLKPEKDSDEAVTYSLGKFGQRALDFYSIHVTKESTHPVKPLAQIAGNRYASGPVGKALSDACMGTIASFLSKYQDIIIEHQKVVKGNQKRLESLRELAGKENLEYPSVTLPPQPHTKEGVDAYNEVIARVRMWVNLNLWQKLKLSRDDAKPLLRLKGFPSFPLVERQANEVDWWDMVCNVKKLINEKKEDGKVFWQNLAGYKRQEALRPYLSSEEDRQKGKKFARTQLGDLLLHLEKKHGEDWGKVYDEAWERIDKKVEGLSKHIKLEEERRSEDAQSKAALTDWLRAKASFVIEGLKEADKDEFCRCELKLQKWYGDLRGKPFAIEAENSILDISGFSKQYNCAFIWQKDGVKKLNLYLIINYFKGGKLRFKKIKPEAFEANRFYTVINKKSGEIVPMEVNFNFDDPNLIILPLAFGKRQGREFIWNDLLSLETGSLKLANGRVIEKTLYNRRTRQDEPALFVALTFERREVLDSSNIKPMNLIGVDRGENIPAVIALTDPEGCPLSRFKDSLGNPTHILRIGESYKEKQRTIQAKKEVEQRRAGGYSRKYASKAKNLADDMVRNTARDLLYYAVTQDAMLIFENLSRGFGRQGKRTFMAERQYTRMEDWLTAKLAYEGLPSKTYLSKTLAQYTSKTCSNCGFTITSADYDRVLEKLKKTATGWMTTINGKELKVEGQITYYNRYKRQNVVKDLSVELDRLSEESVNNDISSWTKGRSGEALSLLKKRFSHRPVQEKFVCLNCGFETHADEQAALNIARSWLFLRSQEYKKYQTNKTTGNTDKRAFVETWQSFYRKKLKEVWKPAV

SEQ ID NO: 44519 - protein, 977 aa, synthetic construct
  REGION 1..977: note = engineered CasX variant
QEIKRINKIRRRLVKDSNTKKAGKTGPMKTLLVRVMTPDLRERLENLRKKPENIPQPISNTSRANLNKLLTDYTEMKKAILHVYWEEFQKDPVGLMSRVAQPASKKIDQNKLKPEMDEKGNLTTAGFACSQCGQPLFVYKLEQVSEKGKAYTNYFGRCNVAEHEKLILLAQLKPEKDSDEAVTYSLGKFGQRALDFYSIHVTKESTHPVKPLAQIAGNRYASPVGKALSDACMGTIASFLSKYQDIIIEHQKVVKGNQKRLESLRELAGKENLEYPSVTLPPQPHTKEGVDAYNEVIARVRMWVNLNLWQKLKLSRDDAKPLLRLKGFPSFPLVERQANEVDWWDMVCNVKKLINEKKEDGKVFWQNLAGYKRQEALRPYLSSEEDRQKGKKFARTQLGDLLLHLEKKHGEDWGKVYDEAWERIDKKVEGLSKHIKLEEERRSEDAQSKAALTDWLRAKASFVIEGLKEADKDEFCRCELKLQKWYGDLRGKPFAIEAENSILDISGFSKQYNCAFIWQKDGVKKLNLYLIINYFKGGKLRFKKIKPEAFEANRFYTVINKKSGEIVPMEVNFNFDDPNLIILPLAFGKRQGREFIWNDLLSLETGSLKLANGRVIEKTLYNRRTRQDEPALFVALTFERREVLDSSNIKPMNLIGVDRGENIPAVIALTDPEGCPLSRFKDSLGNPTHILRIGESYKEKQRTIQAKKEVEQRRAGGYSRKYASKAKNLADDMVRNTARDLLYYAVTQDAMLIFENLSRGFGRQGKRTFMAERQYTRMEDWLTAKLAYEGLPSKTYLSKTLAQYTSKTCSNCGFTITSADYDRVLEKLKKTATGWMTTINGKELKVEGQITYYNRYKRQNVVKDLSVELDRLSEESVNNDISSWTKGRSGEALSLLKKRFSHRPVQEKFVCLNCGFETHADEQAALNIARSWLFLRSQEYKKYQTNKTTGNTDKRAFVETWQSFYRKKLKEVWKPAV

SEQ ID NO: 44520 - protein, 978 aa, synthetic construct
  REGION 1..978: note = engineered CasX variant
QEIKRINKIRRRLVKDSNTKKAGKTGPMKTLLVRVMTPDLRERLENLRKKPENIPQPISNTSRANLNKLLTDYTEMKKAILHVYWEEFQKDPVGLMSRVAQPASKKIDQNKLKPEMDEKGNLTTAGFACSQCGQPLFVYKLEQVSEKGKAYTNYFGRCNVAEHEKLILLAQLKPEKDSDEAVTYSLGKFGQRALDFYSIHVTKESTHPVKPLAQIAGNRYASYPVGKALSDACMGTIASFLSKYQDIIIEHQKVVKGNQKRLESLRELAGKENLEYPSVTLPPQPHTKEGVDAYNEVIARVRMWVNLNLWQKLKLSRDDAKPLLRLKGFPSFPLVERQANEVDWWDMVCNVKKLINEKKEDGKVFWQNLAGYKRQEALRPYLSSEEDRKKGKKFARTQLGDLLLHLEKKHGEDWGKVYDEAWERIDKKVEGLSKHIKLEEERRSEDAQSKAALTDWLRAKASFVIEGLKEADKDEFCRCELKLQKWYGDLRGKPFAIEAENSILDISGFSKQYNCAFIWQKDGVKKLNLYLIINYFKGGKLRFKKIKPEAFEANRFYTVINKKSGEIVPMEVNFNFDDPNLIILPLAFGKRQGREFIWNDLLSLETGSLKLANGRVIEKTLYNRRTRQDEPALFVALTFERREVLDSSNIKPMNLIGVDRGENIPAVIALTDPEGCPLSRFKDSLGNPTHILRIGESYKEKQRTIQAKKEVEQRRAGGYSRKYASKAKNLADDMVRNTARDLLYYAVTQDAMLIFENLSRGFGRQGKRTFMAERQYTRMEDWLTAKLAYEGLPSQTYLSKTLAQYTSKTCSNCGFTITSADYDRVLEKLKKTATGWMTTINGKELKVEGQITYYNRYKRQNVVKDLSVELDRLSEESVNNDISSWTKGRSGEALSLLKKRFSHRPVQEKFVCLNCGFETHADEQAALNIARSWLFLRSQEYKKYQTNKTTGNTDKRAFVETWQSFYRKKLKEVWKPAV

SEQ ID NO: 44521 - protein, 978 aa, synthetic construct
  REGION 1..978: note = engineered CasX variant
QEIKRINKIRRRLVKDSNTKKAGKTGPMKTLLVRVMTPDLRERLENLRKKPENIPQPISNTSRANLNKLLTDYTEMKKAILHVYWEEFQKDPVGLMSRVAQPASKKIDQNKLKPEMDEKGNLTTAGFACSQCGQPLFVYKLEQVSEKGKAYTNYFGRCNVAEHEKLILLAQLKPEKDSDEAVTYSLGKFGQRALDFYSIHVTKESTHPVKPLAQIAGNRYASHPVGKALSDACMGTIASFLSKYQDIIIEHQKVVKGNQKRLESLRELAGKENLEYPSVTLPPQPHTKEGVDAYNEVIARVRMWVNLNLWQKLKLSRDDAKPLLRLKGFPSFPLVERQANEVDWWDMVCNVKKLINEKKEDGKVFWQNLAGYKRQEALRPYLSSEEDRKKGKKFARTQLGDLLLHLEKKHGEDWGKVYDEAWERIDKKVEGLSKHIKLEEERRSEDAQSKAALTDWLRAKASFVIEGLKEADKDEFCRCELKLQKWYGDLRGKPFAIEAENSILDISGFSKQYNCAFIWQKDGVKKLNLYLIINYFKGGKLRFKKIKPEAFEANRFYTVINKKSGEIVPMEVNFNFDDPNLIILPLAFGKRQGREFIWNDLLSLETGSLKLANGRVIEKTLYNRRTRQDEPALFVALTFERREVLDSSNIKPMNLIGVDRGENIPAVIALTDPEGCPLSRFKDSLGNPTHILRIGESYKEKQRTIQAKKEVEQRRAGGYSRKYASKAKNLADDMVRNTARDLLYYAVTQDAMLIFENLSRGFGRQGKRTFMAERQYTRMEDWLTAKLAYEGLPSQTYLSKTLAQYTSKTCSNCGFTITSADYDRVLEKLKKTATGWMTTINGKELKVEGQITYYNRYKRQNVVKDLSVELDRLSEESVNNDISSWTKGRSGEALSLLKKRFSHRPVQEKFVCLNCGFETHADEQAALNIARSWLFLRSQEYKKYQTNKTTGNTDKRAFVETWQSFYRKKLKEVWKPAV

SEQ ID NO: 44522 - protein, 978 aa, synthetic construct
  REGION 1..978: note = engineered CasX variant
QEIKRINKIRRRLVKDSNTKKAGKTGPMKTLLVRVMTPDLRERLENLRKKPENIPQPISNTSRANLNKLLTDYTEMKKAILHVYWEEFQKDPVGLMSRVAQPASKKIDQNKLKPEMDEKGNLTTAGFACSQCGQPLFVYKLEQVSEKGKAYTNYFGRCNVAEHEKLILLAQLKPEKDSDEAVTYSLGKFGQRALDFYSIHVTKESTHPVKPLAQIAGNRYASSPVGKALSDACMGTIASFLSKYQDIIIEHQKVVKGNQKRLESLRELAGKENLEYPSVTLPPQPHTKEGVDAYNEVIARVRMWVNLNLWQKLKLSRDDAKPLLRLKGFPSFPLVERQANEVDWWDMVCNVKKLINEKKEDGKVFWQNLAGYKRQEALRPYLSSEEDRKKGKKFARTQLGDLLLHLEKKHGEDWGKVYDEAWERIDKKVEGLSKHIKLEEERRSEDAQSKAALTDWLRAKASFVIEGLKEADKDEFCRCELKLQKWYGDLRGKPFAIEAENSILDISGFSKQYNCAFIWQKDGVKKLNLYLIINYFKGGKLRFKKIKPEAFEANRFYTVINKKSGEIVPMEVNFNFDDPNLIILPLAFGKRQGREFIWNDLLSLETGSLKLANGRVIEKTLYNRRTRQDEPALFVALTFERREVLDSSNIKPMNLIGVDRGENIPAVIALTDPEGCPLSRFKDSLGNPTHILRIGESYKEKQRTIQAKKEVEQRRAGGYSRKYASKAKNLADDMVRNTARDLLYYAVTQDAMLIFENLSRGFGRQGKRTFMAERQYTRMEDWLTAKLAYEGLPSQTYLSKTLAQYTSKTCSNCGFTITSADYDRVLEKLKKTATGWMTTINGKELKVEGQITYYNRYKRQNVVKDLSVELDRLSEESVNNDISSWTKGRSGEALSLLKKRFSHRPVQEKFVCLNCGFETHADEQAALNIARSWLFLRSQEYKKYQTNKTTGNTDKRAFVETWQSFYRKKLKEVWKPAV

SEQ ID NO: 44523 - protein, 978 aa, synthetic construct
  REGION 1..978: note = engineered CasX variant
QEIKRINKIRRRLVKDSNTKKAGKTGPMKTLLVRVMTPDLRERLENLRKKPENIPQPISNTSRANLNKLLTDYTEMKKAILHVYWEEFQKDPVGLMSRVAQPASKKIDQNKLKPEMDEKGNLTTAGFACSQCGQPLFVYKLEQVSEKGKAYTNYFGRCNVAEHEKLILLAQLKPEKDSDEAVTYSLGKFGQRALDFYSIHVTKESTHPVKPLAQIAGNRYASTPVGKALSDACMGTIASFLSKYQDIIIEHQKVVKGNQKRLESLRELAGKENLEYPSVTLPPQPHTKEGVDAYNEVIARVRMWVNLNLWQKLKLSRDDAKPLLRLKGFPSFPLVERQANEVDWWDMVCNVKKLINEKKEDGKVFWQNLAGYKRQEALRPYLSSEEDRKKGKKFARTQLGDLLLHLEKKHGEDWGKVYDEAWERIDKKVEGLSKHIKLEEERRSEDAQSKAALTDWLRAKASFVIEGLKEADKDEFCRCELKLQKWYGDLRGKPFAIEAENSILDISGFSKQYNCAFIWQKDGVKKLNLYLIINYFKGGKLRFKKIKPEAFEANRFYTVINKKSGEIVPMEVNFNFDDPNLIILPLAFGKRQGREFIWNDLLSLETGSLKLANGRVIEKTLYNRRTRQDEPALFVALTFERREVLDSSNIKPMNLIGVDRGENIPAVIALTDPEGCPLSRFKDSLGNPTHILRIGESYKEKQRTIQAKKEVEQRRAGGYSRKYASKAKNLADDMVRNTARDLLYYAVTQDAMLIFENLSRGFGRQGKRTFMAERQYTRMEDWLTAKLAYEGLPSQTYLSKTLAQYTSKTCSNCGFTITSADYDRVLEKLKKTATGWMTTINGKELKVEGQITYYNRYKRQNVVKDLSVELDRLSEESVNNDISSWTKGRSGEALSLLKKRFSHRPVQEKFVCLNCGFETHADEQAALNIARSWLFLRSQEYKKYQTNKTTGNTDKRAFVETWQSFYRKKLKEVWKPAV

SEQ ID NO: 44524 - protein, 978 aa, synthetic construct
  REGION 1..978: note = engineered CasX variant
QEIKRINKIRRRLVKDSNTKKAGKTGPMKTLLVRVMTPDLRERLENLRKKPENIPQPISNTSRANLNKLLTDYTEMKKAILHVYWEEFQKDPVGLMSRVAQPASKKIDQNKLKPEMDEKGNLTTAGFACSQCGQPLFVYKLEQVSEKGKAYTNYFGRCNVAEHEKLILLAQLKPEKDSDEAVTYSLGKFGQRALDFYSIHVTKESTHPVKPLAQIAGNRYASAPVGKALSDACMGTIASFLSKYQDIIIEHQKVVKGNQKRLESLRELAGKENLEYPSVTLPPQPHTKEGVDAYNEVIARVRMWVNLNLWQKLKLSRDDAKPLLRLKGFPSFPLVERQANEVDWWDMVCNVKKLINEKKEDGKVFWQNLAGYKRQEALRPYLSSEEDRKKGKKFARTQLGDLLLHLEKKHGEDWGKVYDEAWERIDKKVEGLSKHIKLEEERRSEDAQSKAALTDWLRAKASFVIEGLKEADKDEFCRCELKLQKWYGDLRGKPFAIEAENSILDISGFSKQYNCAFIWQKDGVKKLNLYLIINYFKGGKLRFKKIKPEAFEANRFYTVINKKSGEIVPMEVNFNFDDPNLIILPLAFGKRQGREFIWNDLLSLETGSLKLANGRVIEKTLYNRRTRQDEPALFVALTFERREVLDSSNIKPMNLIGVDRGENIPAVIALTDPEGCPLSRFKDSLGNPTHILRIGESYKEKQRTIQAKKEVEQRRAGGYSRKYASKAKNLADDMVRNTARDLLYYAVTQDAMLIFENLSRGFGRQGKRTFMAERQYTRMEDWLTAKLAYEGLPSQTYLSKTLAQYTSKTCSNCGFTITSADYDRVLEKLKKTATGWMTTINGKELKVEGQITYYNRYKRQNVVKDLSVELDRLSEESVNNDISSWTKGRSGEALSLLKKRFSHRPVQEKFVCLNCGFETHADEQAALNIARSWLFLRSQEYKKYQTNKTTGNTDKRAFVETWQSFYRKKLKEVWKPAV

SEQ ID NO: 44525 - protein, 978 aa, synthetic construct
  REGION 1..978: note = engineered CasX variant
QEIKRINKIRRRLVKDSNTKKAGKTGPMKTLLVRVMTPDLRERLENLRKKPENIPQPISNTSRANLNKLLTDYTEMKKAILHVYWEEFQKDPVGLMSRVAQPASKKIDQNKLKPEMDEKGNLTTAGFACSQCGQPLFVYKLEQVSEKGKAYTNYFGRCNVAEHEKLILLAQLKPEKDSDEAVTYSLGKFGQRALDFYSIHVTKESTHPVKPLAQIAGNRYASVPVGKALSDACMGTIASFLSKYQDIIIEHQKVVKGNQKRLESLRELAGKENLEYPSVTLPPQPHTKEGVDAYNEVIARVRMWVNLNLWQKLKLSRDDAKPLLRLKGFPSFPLVERQANEVDWWDMVCNVKKLINEKKEDGKVFWQNLAGYKRQEALRPYLSSEEDRKKGKKFARTQLGDLLLHLEKKHGEDWGKVYDEAWERIDKKVEGLSKHIKLEEERRSEDAQSKAALTDWLRAKASFVIEGLKEADKDEFCRCELKLQKWYGDLRGKPFAIEAENSILDISGFSKQYNCAFIWQKDGVKKLNLYLIINYFKGGKLRFKKIKPEAFEANRFYTVINKKSGEIVPMEVNFNFDDPNLIILPLAFGKRQGREFIWNDLLSLETGSLKLANGRVIEKTLYNRRTRQDEPALFVALTFERREVLDSSNIKPMNLIGVDRGENIPAVIALTDPEGCPLSRFKDSLGNPTHILRIGESYKEKQRTIQAKKEVEQRRAGGYSRKYASKAKNLADDMVRNTARDLLYYAVTQDAMLIFENLSRGFGRQGKRTFMAERQYTRMEDWLTAKLAYEGLPSQTYLSKTLAQYTSKTCSNCGFTITSADYDRVLEKLKKTATGWMTTINGKELKVEGQITYYNRYKRQNVVKDLSVELDRLSEESVNNDISSWTKGRSGEALSLLKKRFSHRPVQEKFVCLNCGFETHADEQAALNIARSWLFLRSQEYKKYQTNKTTGNTDKRAFVETWQSFYRKKLKEVWKPAV

SEQ ID NO: 44526 - protein, 978 aa, synthetic construct
  REGION 1..978: note = engineered CasX variant
QEIKRINKIRRRLVKDSNTKKAGKTGPMKTLLVRVMTPDLRERLENLRKKPENIPQPISNTSRANLNKLLTDYTEMKKAILHVYWEEFQKDPVGLMSRVAQPASKKIDQNKLKPEMDEKGNLTTAGFACSQCGQPLFVYKLEQVSEKGKAYTNYFGRCNVAEHEKLIKLAQLKPEKDSDEAVTYSLGKFGQRALDFYSIHVTKESTHPVKPLAQIAGNRYASGPVGKALSDACMGTIASFLSKYQDIIIEHQKVVKGNQKRLESLRELAGKENLEYPSVTLPPQPHTKEGVDAYNEVIARVRMWVNLNLWQKLKLSRDDAKPLLRLKGFPSFPLVERQANEVDWWDMVCNVKKLINEKKEDGKVFWQNLAGYKRQEALRPYLSSEEDRKKGKKFARTQLGDLLLHLEKKHGEDWGKVYDEAWERIDKKVEGLSKHIKLEEERRSEDAQSKAALTDWLRAKASFVIEGLKEADKDEFCRCELKLQKWYGDLRGKPFAIEAENSILDISGFSKQYNCAFIWQKDGVKKLNLYLIINYFKGGKLRFKKIKPEAFEANRFYTVINKKSGEIVPMEVNFNFDDPNLIILPLAFGKRQGREFIWNDLLSLETGSLKLANGRVIEKTLYNRRTRQDEPALFVALTFERREVLDSSNIKPMNLIGVDRGENIPAVIALTDPEGCPLSRFKDSLGNPTHILRIGESYKEKQRTIQAKKEVEQRRAGGYSRKYASKAKNLADDMVRNTARDLLYYAVTQDAMLIFENLSRGFGRQGKRTFMAERQYTRMEDWLTAKLAYEGLPSQTYLSKTLAQYTSKTCSNCGFTITSADYDRVLEKLKKTATGWMTTINGKELKVEGQITYYNRYKRQNVVKDLSVELDRLSEESVNNDISSWTKGRSGEALSLLKKRFSHRPVQEKFVCLNCGFETHADEQAALNIARSWLFLRSQEYKKYQTNKTTGNTDKRAFVETWQSFYRKKLKEVWKPAV

SEQ ID NO: 44527 - protein, 977 aa, synthetic construct
  REGION 1..977: note = engineered CasX variant
QEIKRINKIRRRLVKDSNTKKAGKTGPMKTLLVRVMTPDLRERLENLRKKPENIPQPISNTSRANLNKLLTDYTEMKKAILHVYWEEFQKDPVGLMSRVAQPASKKIDQNKLKPEMDEKGNLTTAGFACSQCGQPLFVYKLEQVSEKGKAYTNYFGRCNVAEHEKLILLAQLKPEKDSDEAVTYSLGKFGQRALDFYSIHVTKESTHPVKPLAQIAGNRYASPVGKALSDACMGTIASFLSKYQDIIIEHQKVVKGNQKRLESLRELAGKENLEYPSVTLPPQPHTKEGVDAYNEVIARVRMWVNLNLWQKLKLSRDDAKPLLRLKGFPSFPLVERQANEVDWWDMVCNVKKLINEKKEDGKVFWQNLAGYKRQEALRPYLSSEEDRKKGKKFARTQLGDLLLHLEKKHGEDWGKVYDEAWERIDKKVEGLSKHIKLEEERRSEDAQSKAALTDWLRAKASFVIEGLKEADKDEFCRCELKLQKWYGDLRGKPFAIEAENSILDISGFSKQYNCAFIWQKDGVKKLNLYLIINYFKGGKLRFKKIKPEAFEANRFYTVINKKSGEIVPMEVNFNFDDPNLIILPLAFGKRQGREFIWNDLLSLETGSLKLANGRVIEKTLYNRRTRQDEPALFVALTFERREVLDSSNIKPMNLIGVDRGENIPAVIALTDPEGCPLSRFKDSLGNPTHILRIGESYKEKQRTIQAKKEVEQRRAGGYSRKYASKAKNLADDMVRNTARDLLYYAVTQDAMLIFENLSRGFGRQGKRTFMAERQYTRMEDWLTAKLAYEGLPSQTYLSKTLAQYTSKTCSNCGFTITSADYDRVLEKLKKTATGWMTTINGKELKVEGQITYYNRYKRQNVVKDLSVELDRLSEESVNNDISSWTKGRSGEALSLLKKRFSHRPVQEKFVCLNCGFETHADEQAALNIARSWLFLRSQEYKKYQTNKTTGNTDKRAFVETWQSFYRKKLKEVWKPAV

SEQ ID NO: 44528 - protein, 978 aa, synthetic construct
  REGION 1..978: note = engineered CasX variant
QEIKRINKIRRRLVKDSNTKKAGKTGPMKTLLVRVMTPDLRERLENLRKKPENIPQPISNTSRANLNKLLTDYTEMKKAILHVYWEEFQKDPVGLMSRVAQPASKKIDQNKLKPEMDEKGNLTTAGFACSQCGQPLFVYKLEQVSEKGKAYTNYFGRCNVAEHEKLILLAQLKPEKDSDEAVTYSLGKFGQRALDFYSIHVTKESTHPVKPLAQIAGNRYASYPVGKALSDACMGTIASFLSKYQDIIIEHQKVVKGNQKRLESLRELAGKENLEYPSVTLPPQPHTKEGVDAYNEVIARVRMWVNLNLWQKLKLSRDDAKPLLRLKGFPSFPLVERQANEVDWWDMVCNVKKLINEKKEDGKVFWQNLAGYKRQEALRPYLSSEEDRKKGKKFARTQLGDLLLHLEKKHGEDWGKVYDEAWERIDKKVEGLSKHIKLEEERRSEDAQSKAALTDWLRAKASFVIEGLKEADKDEFCRCELKLQKWYGDLRGKPFAIEAENSILDISGFSKQYNCAFIWQKDGVKKLNLYLIINYFKGGKLRFKKIKPEAFEANRFYTVINKKSGEIVPMEVNFNFDDPNLIILPLAFGKRQGREFIWNDLLSLETGSLKLANGRVIEKTLYNRRTRQDEPALFVALTFERREVLDSSNIKPMNLIGVDRGENIPAVIALTDPEGCPLSRFKDSLGNPTHILRIGESYKEKQRTIQAKKEVEQRRAGGYSRKYASKAKNLADDMVRNTARDLLYYAVTQDAMLIFENLSRGFGRQGKRTFMAERQYTRMEDWLTAKLAYNGLPSKTYLSKTLAQYTSKTCSNCGFTITSADYDRVLEKLKKTATGWMTTINGKELKVEGQITYYNRYKRQNVVKDLSVELDRLSEESVNNDISSWTKGRSGEALSLLKKRFSHRPVQEKFVCLNCGFETHADEQAALNIARSWLFLRSQEYKKYQTNKTTGNTDKRAFVETWQSFYRKKLKEVWKPAV

SEQ ID NO: 44529 - protein, 978 aa, synthetic construct
  REGION 1..978: note = engineered CasX variant
QEIKRINKIRRRLVKDSNTKKAGKTGPMKTLLVRVMTPDLRERLENLRKKPENIPQPISNTSRANLNKLLTDYTEMKKAILHVYWEEFQKDPVGLMSRVAQPASKKIDQNKLKPEMDEKGNLTTAGFACSQCGQPLFVYKLEQVSEKGKAYTNYFGRCNVAEHEKLILLAQLKPEKDSDEAVTYSLGKFGQRALDFYSIHVTKESTHPVKPLAQIAGNRYASHPVGKALSDACMGTIASFLSKYQDIIIEHQKVVKGNQKRLESLRELAGKENLEYPSVTLPPQPHTKEGVDAYNEVIARVRMWVNLNLWQKLKLSRDDAKPLLRLKGFPSFPLVERQANEVDWWDMVCNVKKLINEKKEDGKVFWQNLAGYKRQEALRPYLSSEEDRKKGKKFARTQLGDLLLHLEKKHGEDWGKVYDEAWERIDKKVEGLSKHIKLEEERRSEDAQSKAALTDWLRAKASFVIEGLKEADKDEFCRCELKLQKWYGDLRGKPFAIEAENSILDISGFSKQYNCAFIWQKDGVKKLNLYLIINYFKGGKLRFKKIKPEAFEANRFYTVINKKSGEIVPMEVNFNFDDPNLIILPLAFGKRQGREFIWNDLLSLETGSLKLANGRVIEKTLYNRRTRQDEPALFVALTFERREVLDSSNIKPMNLIGVDRGENIPAVIALTDPEGCPLSRFKDSLGNPTHILRIGESYKEKQRTIQAKKEVEQRRAGGYSRKYASKAKNLADDMVRNTARDLLYYAVTQDAMLIFENLSRGFGRQGKRTFMAERQYTRMEDWLTAKLAYNGLPSKTYLSKTLAQYTSKTCSNCGFTITSADYDRVLEKLKKTATGWMTTINGKELKVEGQITYYNRYKRQNVVKDLSVELDRLSEESVNNDISSWTKGRSGEALSLLKKRFSHRPVQEKFVCLNCGFETHADEQAALNIARSWLFLRSQEYKKYQTNKTTGNTDKRAFVETWQSFYRKKLKEVWKPAV

SEQ ID NO: 44530 - protein, 978 aa, synthetic construct
  REGION 1..978: note = engineered CasX variant
QEIKRINKIRRRLVKDSNTKKAGKTGPMKTLLVRVMTPDLRERLENLRKKPENIPQPISNTSRANLNKLLTDYTEMKKAILHVYWEEFQKDPVGLMSRVAQPASKKIDQNKLKPEMDEKGNLTTAGFACSQCGQPLFVYKLEQVSEKGKAYTNYFGRCNVAEHEKLILLAQLKPEKDSDEAVTYSLGKFGQRALDFYSIHVTKESTHPVKPLAQIAGNRYASSPVGKALSDACMGTIASFLSKYQDIIIEHQKVVKGNQKRLESLRELAGKENLEYPSVTLPPQPHTKEGVDAYNEVIARVRMWVNLNLWQKLKLSRDDAKPLLRLKGFPSFPLVERQANEVDWWDMVCNVKKLINEKKEDGKVFWQNLAGYKRQEALRPYLSSEEDRKKGKKFARTQLGDLLLHLEKKHGEDWGKVYDEAWERIDKKVEGLSKHIKLEEERRSEDAQSKAALTDWLRAKASFVIEGLKEADKDEFCRCELKLQKWYGDLRGKPFAIEAENSILDISGFSKQYNCAFIWQKDGVKKLNLYLIINYFKGGKLRFKKIKPEAFEANRFYTVINKKSGEIVPMEVNFNFDDPNLIILPLAFGKRQGREFIWNDLLSLETGSLKLANGRVIEKTLYNRRTRQDEPALFVALTFERREVLDSSNIKPMNLIGVDRGENIPAVIALTDPEGCPLSRFKDSLGNPTHILRIGESYKEKQRTIQAKKEVEQRRAGGYSRKYASKAKNLADDMVRNTARDLLYYAVTQDAMLIFENLSRGFGRQGKRTFMAERQYTRMEDWLTAKLAYNGLPSKTYLSKTLAQYTSKTCSNCGFTITSADYDRVLEKLKKTATGWMTTINGKELKVEGQITYYNRYKRQNVVKDLSVELDRLSEESVNNDISSWTKGRSGEALSLLKKRFSHRPVQEKFVCLNCGFETHADEQAALNIARSWLFLRSQEYKKYQTNKTTGNTDKRAFVETWQSFYRKKLKEVWKPAV

SEQ ID NO: 44531 - protein, 978 aa, synthetic construct
  REGION 1..978: note = engineered CasX variant
QEIKRINKIRRRLVKDSNTKKAGKTGPMKTLLVRVMTPDLRERLENLRKKPENIPQPISNTSRANLNKLLTDYTEMKKAILHVYWEEFQKDPVGLMSRVAQPASKKIDQNKLKPEMDEKGNLTTAGFACSQCGQPLFVYKLEQVSEKGKAYTNYFGRCNVAEHEKLILLAQLKPEKDSDEAVTYSLGKFGQRALDFYSIHVTKESTHPVKPLAQIAGNRYASTPVGKALSDACMGTIASFLSKYQDIIIEHQKVVKGNQKRLESLRELAGKENLEYPSVTLPPQPHTKEGVDAYNEVIARVRMWVNLNLWQKLKLSRDDAKPLLRLKGFPSFPLVERQANEVDWWDMVCNVKKLINEKKEDGKVFWQNLAGYKRQEALRPYLSSEEDRKKGKKFARTQLGDLLLHLEKKHGEDWGKVYDEAWERIDKKVEGLSKHIKLEEERRSEDAQSKAALTDWLRAKASFVIEGLKEADKDEFCRCELKLQKWYGDLRGKPFAIEAENSILDISGFSKQYNCAFIWQKDGVKKLNLYLIINYFKGGKLRFKKIKPEAFEANRFYTVINKKSGEIVPMEVNFNFDDPNLIILPLAFGKRQGREFIWNDLLSLETGSLKLANGRVIEKTLYNRRTRQDEPALFVALTFERREVLDSSNIKPMNLIGVDRGENIPAVIALTDPEGCPLSRFKDSLGNPTHILRIGESYKEKQRTIQAKKEVEQRRAGGYSRKYASKAKNLADDMVRNTARDLLYYAVTQDAMLIFENLSRGFGRQGKRTFMAERQYTRMEDWLTAKLAYNGLPSKTYLSKTLAQYTSKTCSNCGFTITSADYDRVLEKLKKTATGWMTTINGKELKVEGQITYYNRYKRQNVVKDLSVELDRLSEESVNNDISSWTKGRSGEALSLLKKRFSHRPVQEKFVCLNCGFETHADEQAALNIARSWLFLRSQEYKKYQTNKTTGNTDKRAFVETWQSFYRKKLKEVWKPAV

SEQ ID NO: 44532 - protein, 978 aa, synthetic construct
  REGION 1..978: note = engineered CasX variant
QEIKRINKIRRRLVKDSNTKKAGKTGPMKTLLVRVMTPDLRERLENLRKKPENIPQPISNTSRANLNKLLTDYTEMKKAILHVYWEEFQKDPVGLMSRVAQPASKKIDQNKLKPEMDEKGNLTTAGFACSQCGQPLFVYKLEQVSEKGKAYTNYFGRCNVAEHEKLILLAQLKPEKDSDEAVTYSLGKFGQRALDFYSIHVTKESTHPVKPLAQIAGNRYASAPVGKALSDACMGTIASFLSKYQDIIIEHQKVVKGNQKRLESLRELAGKENLEYPSVTLPPQPHTKEGVDAYNEVIARVRMWVNLNLWQKLKLSRDDAKPLLRLKGFPSFPLVERQANEVDWWDMVCNVKKLINEKKEDGKVFWQNLAGYKRQEALRPYLSSEEDRKKGKKFARTQLGDLLLHLEKKHGEDWGKVYDEAWERIDKKVEGLSKHIKLEEERRSEDAQSKAALTDWLRAKASFVIEGLKEADKDEFCRCELKLQKWYGDLRGKPFAIEAENSILDISGFSKQYNCAFIWQKDGVKKLNLYLIINYFKGGKLRFKKIKPEAFEANRFYTVINKKSGEIVPMEVNFNFDDPNLIILPLAFGKRQGREFIWNDLLSLETGSLKLANGRVIEKTLYNRRTRQDEPALFVALTFERREVLDSSNIKPMNLIGVDRGENIPAVIALTDPEGCPLSRFKDSLGNPTHILRIGESYKEKQRTIQAKKEVEQRRAGGYSRKYASKAKNLADDMVRNTARDLLYYAVTQDAMLIFENLSRGFGRQGKRTFMAERQYTRMEDWLTAKLAYNGLPSKTYLSKTLAQYTSKTCSNCGFTITSADYDRVLEKLKKTATGWMTTINGKELKVEGQITYYNRYKRQNVVKDLSVELDRLSEESVNNDISSWTKGRSGEALSLLKKRFSHRPVQEKFVCLNCGFETHADEQAALNIARSWLFLRSQEYKKYQTNKTTGNTDKRAFVETWQSFYRKKLKEVWKPAV

SEQ ID NO: 44533 - protein, 978 aa, synthetic construct
  REGION 1..978: note = engineered CasX variant
QEIKRINKIRRRLVKDSNTKKAGKTGPMKTLLVRVMTPDLRERLENLRKKPENIPQPISNTSRANLNKLLTDYTEMKKAILHVYWEEFQKDPVGLMSRVAQPASKKIDQNKLKPEMDEKGNLTTAGFACSQCGQPLFVYKLEQVSEKGKAYTNYFGRCNVAEHEKLILLAQLKPEKDSDEAVTYSLGKFGQRALDFYSIHVTKESTHPVKPLAQIAGNRYASVPVGKALSDACMGTIASFLSKYQDIIIEHQKVVKGNQKRLESLRELAGKENLEYPSVTLPPQPHTKEGVDAYNEVIARVRMWVNLNLWQKLKLSRDDAKPLLRLKGFPSFPLVERQANEVDWWDMVCNVKKLINEKKEDGKVFWQNLAGYKRQEALRPYLSSEEDRKKGKKFARTQLGDLLLHLEKKHGEDWGKVYDEAWERIDKKVEGLSKHIKLEEERRSEDAQSKAALTDWLRAKASFVIEGLKEADKDEFCRCELKLQKWYGDLRGKPFAIEAENSILDISGFSKQYNCAFIWQKDGVKKLNLYLIINYFKGGKLRFKKIKPEAFEANRFYTVINKKSGEIVPMEVNFNFDDPNLIILPLAFGKRQGREFIWNDLLSLETGSLKLANGRVIEKTLYNRRTRQDEPALFVALTFERREVLDSSNIKPMNLIGVDRGENIPAVIALTDPEGCPLSRFKDSLGNPTHILRIGESYKEKQRTIQAKKEVEQRRAGGYSRKYASKAKNLADDMVRNTARDLLYYAVTQDAMLIFENLSRGFGRQGKRTFMAERQYTRMEDWLTAKLAYNGLPSKTYLSKTLAQYTSKTCSNCGFTITSADYDRVLEKLKKTATGWMTTINGKELKVEGQITYYNRYKRQNVVKDLSVELDRLSEESVNNDISSWTKGRSGEALSLLKKRFSHRPVQEKFVCLNCGFETHADEQAALNIARSWLFLRSQEYKKYQTNKTTGNTDKRAFVETWQSFYRKKLKEVWKPAV

SEQ ID NO: 44534 - protein, 978 aa, synthetic construct
  REGION 1..978: note = engineered CasX variant
QEIKRINKIRRRLVKDSNTKKAGKTGPMKTLLVRVMTPDLRERLENLRKKPENIPQPISNTSRANLNKLLTDYTEMKKAILHVYWEEFQKDPVGLMSRVAQPASKKIDQNKLKPEMDEKGNLTTAGFACSQCGQPLFVYKLEQVSEKGKAYTNYFGRCNVAEHEKLIKLAQLKPEKDSDEAVTYSLGKFGQRALDFYSIHVTKESTHPVKPLAQIAGNRYASGPVGKALSDACMGTIASFLSKYQDIIIEHQKVVKGNQKRLESLRELAGKENLEYPSVTLPPQPHTKEGVDAYNEVIARVRMWVNLNLWQKLKLSRDDAKPLLRLKGFPSFPLVERQANEVDWWDMVCNVKKLINEKKEDGKVFWQNLAGYKRQEALRPYLSSEEDRKKGKKFARTQLGDLLLHLEKKHGEDWGKVYDEAWERIDKKVEGLSKHIKLEEERRSEDAQSKAALTDWLRAKASFVIEGLKEADKDEFCRCELKLQKWYGDLRGKPFAIEAENSILDISGFSKQYNCAFIWQKDGVKKLNLYLIINYFKGGKLRFKKIKPEAFEANRFYTVINKKSGEIVPMEVNFNFDDPNLIILPLAFGKRQGREFIWNDLLSLETGSLKLANGRVIEKTLYNRRTRQDEPALFVALTFERREVLDSSNIKPMNLIGVDRGENIPAVIALTDPEGCPLSRFKDSLGNPTHILRIGESYKEKQRTIQAKKEVEQRRAGGYSRKYASKAKNLADDMVRNTARDLLYYAVTQDAMLIFENLSRGFGRQGKRTFMAERQYTRMEDWLTAKLAYNGLPSKTYLSKTLAQYTSKTCSNCGFTITSADYDRVLEKLKKTATGWMTTINGKELKVEGQITYYNRYKRQNVVKDLSVELDRLSEESVNNDISSWTKGRSGEALSLLKKRFSHRPVQEKFVCLNCGFETHADEQAALNIARSWLFLRSQEYKKYQTNKTTGNTDKRAFVETWQSFYRKKLKEVWKPAV

SEQ ID NO: 44535 - protein, 977 aa, synthetic construct
  REGION 1..977: note = engineered CasX variant
QEIKRINKIRRRLVKDSNTKKAGKTGPMKTLLVRVMTPDLRERLENLRKKPENIPQPISNTSRANLNKLLTDYTEMKKAILHVYWEEFQKDPVGLMSRVAQPASKKIDQNKLKPEMDEKGNLTTAGFACSQCGQPLFVYKLEQVSEKGKAYTNYFGRCNVAEHEKLILLAQLKPEKDSDEAVTYSLGKFGQRALDFYSIHVTKESTHPVKPLAQIAGNRYASPVGKALSDACMGTIASFLSKYQDIIIEHQKVVKGNQKRLESLRELAGKENLEYPSVTLPPQPHTKEGVDAYNEVIARVRMWVNLNLWQKLKLSRDDAKPLLRLKGFPSFPLVERQANEVDWWDMVCNVKKLINEKKEDGKVFWQNLAGYKRQEALRPYLSSEEDRKKGKKFARTQLGDLLLHLEKKHGEDWGKVYDEAWERIDKKVEGLSKHIKLEEERRSEDAQSKAALTDWLRAKASFVIEGLKEADKDEFCRCELKLQKWYGDLRGKPFAIEAENSILDISGFSKQYNCAFIWQKDGVKKLNLYLIINYFKGGKLRFKKIKPEAFEANRFYTVINKKSGEIVPMEVNFNFDDPNLIILPLAFGKRQGREFIWNDLLSLETGSLKLANGRVIEKTLYNRRTRQDEPALFVALTFERREVLDSSNIKPMNLIGVDRGENIPAVIALTDPEGCPLSRFKDSLGNPTHILRIGESYKEKQRTIQAKKEVEQRRAGGYSRKYASKAKNLADDMVRNTARDLLYYAVTQDAMLIFENLSRGFGRQGKRTFMAERQYTRMEDWLTAKLAYNGLPSKTYLSKTLAQYTSKTCSNCGFTITSADYDRVLEKLKKTATGWMTTINGKELKVEGQITYYNRYKRQNVVKDLSVELDRLSEESVNNDISSWTKGRSGEALSLLKKRFSHRPVQEKFVCLNCGFETHADEQAALNIARSWLFLRSQEYKKYQTNKTTGNTDKRAFVETWQSFYRKKLKEVWKPAV

SEQ ID NO: 44536 - protein, 978 aa, synthetic construct
  REGION 1..978: note = engineered CasX variant
QEIKRINKIRRRLVKDSNTKKAGKTGPMKTLLVRVMTPDLRERLENLRKKPENIPQPISNTSRANLNKLLTDYTEMKKAILHVYWEEFQKDPVGLMSRVAQPASKKIDQNKLKPEMDEKGNLTTAGFACSQCGQPLFVYKLEQVSEKGKAYTNYFGRCNVAEHEKLIQLAQLKPEKDSDEAVTYSLGKFGQRALDFYSIHVTKESTHPVKPLAQIAGNRYASYPVGKALSDACMGTIASFLSKYQDIIIEHQKVVKGNQKRLESLRELAGKENLEYPSVTLPPQPHTKEGVDAYNEVIARVRMWVNLNLWQKLKLSRDDAKPLLRLKGFPSFPLVERQANEVDWWDMVCNVKKLINEKKEDGKVFWQNLAGYKRQEALRPYLSSEEDRKKGKKFARTQLGDLLLHLEKKHGEDWGKVYDEAWERIDKKVEGLSKHIKLEEERRSEDAQSKAALTDWLRAKASFVIEGLKEADKDEFCRCELKLQKWYGDLRGKPFAIEAENSILDISGFSKQYNCAFIWQKDGVKKLNLYLIINYFKGGKLRFKKIKPEAFEANRFYTVINKKSGEIVPMEVNFNFDDPNLIILPLAFGKRQGREFIWNDLLSLETGSLKLANGRVIEKTLYNRRTRQDEPALFVALTFERREVLDSSNIKPMNLIGVDRGENIPAVIALTDPEGCPLSRFKDSLGNPTHILRIGESYKEKQRTIQAKKEVEQRRAGGYSRKYASKAKNLADDMVRNTARDLLYYAVTQDAMLIFENLSRGFGRQGKRTFMAERQYTRMEDWLTAKLAYEGLPSKTYLSKTLAQYTSKTCSNCGFTITSADYDRVLEKLKKTATGWMTTINGKELKVEGQITYYNRYKRQNVVKDLSVELDRLSEESVNNDISSWTKGRSGEALSLLKKRFSHRPVQEKFVCLNCGFETHADEQAALNIARSWLFLRSQEYKKYQTNKTTGNTDKRAFVETWQSFYRKKLKEVWKPAV

SEQ ID NO: 44537 - protein, 978 aa, synthetic construct
  REGION 1..978: note = engineered CasX variant
QEIKRINKIRRRLVKDSNTKKAGKTGPMKTLLVRVMTPDLRERLENLRKKPENIPQPISNTSRANLNKLLTDYTEMKKAILHVYWEEFQKDPVGLMSRVAQPASKKIDQNKLKPEMDEKGNLTTAGFACSQCGQPLFVYKLEQVSEKGKAYTNYFGRCNVAEHEKLIQLAQLKPEKDSDEAVTYSLGKFGQRALDFYSIHVTKESTHPVKPLAQIAGNRYASHPVGKALSDACMGTIASFLSKYQDIIIEHQKVVKGNQKRLESLRELAGKENLEYPSVTLPPQPHTKEGVDAYNEVIARVRMWVNLNLWQKLKLSRDDAKPLLRLKGFPSFPLVERQANEVDWWDMVCNVKKLINEKKEDGKVFWQNLAGYKRQEALRPYLSSEEDRKKGKKFARTQLGDLLLHLEKKHGEDWGKVYDEAWERIDKKVEGLSKHIKLEEERRSEDAQSKAALTDWLRAKASFVIEGLKEADKDEFCRCELKLQKWYGDLRGKPFAIEAENSILDISGFSKQYNCAFIWQKDGVKKLNLYLIINYFKGGKLRFKKIKPEAFEANRFYTVINKKSGEIVPMEVNFNFDDPNLIILPLAFGKRQGREFIWNDLLSLETGSLKLANGRVIEKTLYNRRTRQDEPALFVALTFERREVLDSSNIKPMNLIGVDRGENIPAVIALTDPEGCPLSRFKDSLGNPTHILRIGESYKEKQRTIQAKKEVEQRRAGGYSRKYASKAKNLADDMVRNTARDLLYYAVTQDAMLIFENLSRGFGRQGKRTFMAERQYTRMEDWLTAKLAYEGLPSKTYLSKTLAQYTSKTCSNCGFTITSADYDRVLEKLKKTATGWMTTINGKELKVEGQITYYNRYKRQNVVKDLSVELDRLSEESVNNDISSWTKGRSGEALSLLKKRFSHRPVQEKFVCLNCGFETHADEQAALNIARSWLFLRSQEYKKYQTNKTTGNTDKRAFVETWQSFYRKKLKEVWKPAV

SEQ ID NO: 44538 - protein, 978 aa, synthetic construct
  REGION 1..978: note = engineered CasX variant
QEIKRINKIRRRLVKDSNTKKAGKTGPMKTLLVRVMTPDLRERLENLRKKPENIPQPISNTSRANLNKLLTDYTEMKKAILHVYWEEFQKDPVGLMSRVAQPASKKIDQNKLKPEMDEKGNLTTAGFACSQCGQPLFVYKLEQVSEKGKAYTNYFGRCNVAEHEKLIQLAQLKPEKDSDEAVTYSLGKFGQRALDFYSIHVTKESTHPVKPLAQIAGNRYASSPVGKALSDACMGTIASFLSKYQDIIIEHQKVVKGNQKRLESLRELAGKENLEYPSVTLPPQPHTKEGVDAYNEVIARVRMWVNLNLWQKLKLSRDDAKPLLRLKGFPSFPLVERQANEVDWWDMVCNVKKLINEKKEDGKVFWQNLAGYKRQEALRPYLSSEEDRKKGKKFARTQLGDLLLHLEKKHGEDWGKVYDEAWERIDKKVEGLSKHIKLEEERRSEDAQSKAALTDWLRAKASFVIEGLKEADKDEFCRCELKLQKWYGDLRGKPFAIEAENSILDISGFSKQYNCAFIWQKDGVKKLNLYLIINYFKGGKLRFKKIKPEAFEANRFYTVINKKSGEIVPMEVNFNFDDPNLIILPLAFGKRQGREFIWNDLLSLETGSLKLANGRVIEKTLYNRRTRQDEPALFVALTFERREVLDSSNIKPMNLIGVDRGENIPAVIALTDPEGCPLSRFKDSLGNPTHILRIGESYKEKQRTIQAKKEVEQRRAGGYSRKYASKAKNLADDMVRNTARDLLYYAVTQDAMLIFENLSRGFGRQGKRTFMAERQYTRMEDWLTAKLAYEGLPSKTYLSKTLAQYTSKTCSNCGFTITSADYDRVLEKLKKTATGWMTTINGKELKVEGQITYYNRYKRQNVVKDLSVELDRLSEESVNNDISSWTKGRSGEALSLLKKRFSHRPVQEKFVCLNCGFETHADEQAALNIARSWLFLRSQEYKKYQTNKTTGNTDKRAFVETWQSFYRKKLKEVWKPAV

SEQ ID NO: 44539 - protein, 978 aa, synthetic construct
  REGION 1..978: note = engineered CasX variant
QEIKRINKIRRRLVKDSNTKKAGKTGPMKTLLVRVMTPDLRERLENLRKKPENIPQPISNTSRANLNKLLTDYTEMKKAILHVYWEEFQKDPVGLMSRVAQPASKKIDQNKLKPEMDEKGNLTTAGFACSQCGQPLFVYKLEQVSEKGKAYTNYFGRCNVAEHEKLIQLAQLKPEKDSDEAVTYSLGKFGQRALDFYSIHVTKESTHPVKPLAQIAGNRYASTPVGKALSDACMGTIASFLSKYQDIIIEHQKVVKGNQKRLESLRELAGKENLEYPSVTLPPQPHTKEGVDAYNEVIARVRMWVNLNLWQKLKLSRDDAKPLLRLKGFPSFPLVERQANEVDWWDMVCNVKKLINEKKEDGKVFWQNLAGYKRQEALRPYLSSEEDRKKGKKFARTQLGDLLLHLEKKHGEDWGKVYDEAWERIDKKVEGLSKHIKLEEERRSEDAQSKAALTDWLRAKASFVIEGLKEADKDEFCRCELKLQKWYGDLRGKPFAIEAENSILDISGFSKQYNCAFIWQKDGVKKLNLYLIINYFKGGKLRFKKIKPEAFEANRFYTVINKKSGEIVPMEVNFNFDDPNLIILPLAFGKRQGREFIWNDLLSLETGSLKLANGRVIEKTLYNRRTRQDEPALFVALTFERREVLDSSNIKPMNLIGVDRGENIPAVIALTDPEGCPLSRFKDSLGNPTHILRIGESYKEKQRTIQAKKEVEQRRAGGYSRKYASKAKNLADDMVRNTARDLLYYAVTQDAMLIFENLSRGFGRQGKRTFMAERQYTRMEDWLTAKLAYEGLPSKTYLSKTLAQYTSKTCSNCGFTITSADYDRVLEKLKKTATGWMTTINGKELKVEGQITYYNRYKRQNVVKDLSVELDRLSEESVNNDISSWTKGRSGEALSLLKKRFSHRPVQEKFVCLNCGFETHADEQAALNIARSWLFLRSQEYKKYQTNKTTGNTDKRAFVETWQSFYRKKLKEVWKPAV

SEQ ID NO: 44540 - protein, 978 aa, synthetic construct
  REGION 1..978: note = engineered CasX variant
QEIKRINKIRRRLVKDSNTKKAGKTGPMKTLLVRVMTPDLRERLENLRKKPENIPQPISNTSRANLNKLLTDYTEMKKAILHVYWEEFQKDPVGLMSRVAQPASKKIDQNKLKPEMDEKGNLTTAGFACSQCGQPLFVYKLEQVSEKGKAYTNYFGRCNVAEHEKLIQLAQLKPEKDSDEAVTYSLGKFGQRALDFYSIHVTKESTHPVKPLAQIAGNRYASAPVGKALSDACMGTIASFLSKYQDIIIEHQKVVKGNQKRLESLRELAGKENLEYPSVTLPPQPHTKEGVDAYNEVIARVRMWVNLNLWQKLKLSRDDAKPLLRLKGFPSFPLVERQANEVDWWDMVCNVKKLINEKKEDGKVFWQNLAGYKRQEALRPYLSSEEDRKKGKKFARTQLGDLLLHLEKKHGEDWGKVYDEAWERIDKKVEGLSKHIKLEEERRSEDAQSKAALTDWLRAKASFVIEGLKEADKDEFCRCELKLQKWYGDLRGKPFAIEAENSILDISGFSKQYNCAFIWQKDGVKKLNLYLIINYFKGGKLRFKKIKPEAFEANRFYTVINKKSGEIVPMEVNFNFDDPNLIILPLAFGKRQGREFIWNDLLSLETGSLKLANGRVIEKTLYNRRTRQDEPALFVALTFERREVLDSSNIKPMNLIGVDRGENIPAVIALTDPEGCPLSRFKDSLGNPTHILRIGESYKEKQRTIQAKKEVEQRRAGGYSRKYASKAKNLADDMVRNTARDLLYYAVTQDAMLIFENLSRGFGRQGKRTFMAERQYTRMEDWLTAKLAYEGLPSKTYLSKTLAQYTSKTCSNCGFTITSADYDRVLEKLKKTATGWMTTINGKELKVEGQITYYNRYKRQNVVKDLSVELDRLSEESVNNDISSWTKGRSGEALSLLKKRFSHRPVQEKFVCLNCGFETHADEQAALNIARSWLFLRSQEYKKYQTNKTTGNTDKRAFVETWQSFYRKKLKEVWKPAV

SEQ ID NO: 44541 - protein, 978 aa, synthetic construct
  REGION 1..978: note = engineered CasX variant
QEIKRINKIRRRLVKDSNTKKAGKTGPMKTLLVRVMTPDLRERLENLRKKPENIPQPISNTSRANLNKLLTDYTEMKKAILHVYWEEFQKDPVGLMSRVAQPASKKIDQNKLKPEMDEKGNLTTAGFACSQCGQPLFVYKLEQVSEKGKAYTNYFGRCNVAEHEKLIQLAQLKPEKDSDEAVTYSLGKFGQRALDFYSIHVTKESTHPVKPLAQIAGNRYASVPVGKALSDACMGTIASFLSKYQDIIIEHQKVVKGNQKRLESLRELAGKENLEYPSVTLPPQPHTKEGVDAYNEVIARVRMWVNLNLWQKLKLSRDDAKPLLRLKGFPSFPLVERQANEVDWWDMVCNVKKLINEKKEDGKVFWQNLAGYKRQEALRPYLSSEEDRKKGKKFARTQLGDLLLHLEKKHGEDWGKVYDEAWERIDKKVEGLSKHIKLEEERRSEDAQSKAALTDWLRAKASFVIEGLKEADKDEFCRCELKLQKWYGDLRGKPFAIEAENSILDISGFSKQYNCAFIWQKDGVKKLNLYLIINYFKGGKLRFKKIKPEAFEANRFYTVINKKSGEIVPMEVNFNFDDPNLIILPLAFGKRQGREFIWNDLLSLETGSLKLANGRVIEKTLYNRRTRQDEPALFVALTFERREVLDSSNIKPMNLIGVDRGENIPAVIALTDPEGCPLSRFKDSLGNPTHILRIGESYKEKQRTIQAKKEVEQRRAGGYSRKYASKAKNLADDMVRNTARDLLYYAVTQDAMLIFENLSRGFGRQGKRTFMAERQYTRMEDWLTAKLAYEGLPSKTYLSKTLAQYTSKTCSNCGFTITSADYDRVLEKLKKTATGWMTTINGKELKVEGQITYYNRYKRQNVVKDLSVELDRLSEESVNNDISSWTKGRSGEALSLLKKRFSHRPVQEKFVCLNCGFETHADEQAALNIARSWLFLRSQEYKKYQTNKTTGNTDKRAFVETWQSFYRKKLKEVWKPAV

SEQ ID NO: 44542 - protein, 979 aa, synthetic construct
  REGION 1..979: note = engineered CasX variant
QEIKRINKIRRRLVKDSNTKKAGKTGPMKTLLVRVMTPDLRERLENLRKKPENIPQPISNTSRANLNKLLTDYTEMKKAILHVYWEEFQKDPVGLMSRVAQPASKKIDQNKLKPEMDEKGNLTTAGFACSQCGQPLFVYKLEQVSEKGKAYTNYFGRCNVAEHEKLIQKLAQLKPEKDSDEAVTYSLGKFGQRALDFYSIHVTKESTHPVKPLAQIAGNRYASGPVGKALSDACMGTIASFLSKYQDIIIEHQKVVKGNQKRLESLRELAGKENLEYPSVTLPPQPHTKEGVDAYNEVIARVRMWVNLNLWQKLKLSRDDAKPLLRLKGFPSFPLVERQANEVDWWDMVCNVKKLINEKKEDGKVFWQNLAGYKRQEALRPYLSSEEDRKKGKKFARTQLGDLLLHLEKKHGEDWGKVYDEAWERIDKKVEGLSKHIKLEEERRSEDAQSKAALTDWLRAKASFVIEGLKEADKDEFCRCELKLQKWYGDLRGKPFAIEAENSILDISGFSKQYNCAFIWQKDGVKKLNLYLIINYFKGGKLRFKKIKPEAFEANRFYTVINKKSGEIVPMEVNFNFDDPNLIILPLAFGKRQGREFIWNDLLSLETGSLKLANGRVIEKTLYNRRTRQDEPALFVALTFERREVLDSSNIKPMNLIGVDRGENIPAVIALTDPEGCPLSRFKDSLGNPTHILRIGESYKEKQRTIQAKKEVEQRRAGGYSRKYASKAKNLADDMVRNTARDLLYYAVTQDAMLIFENLSRGFGRQGKRTFMAERQYTRMEDWLTAKLAYEGLPSKTYLSKTLAQYTSKTCSNCGFTITSADYDRVLEKLKKTATGWMTTINGKELKVEGQITYYNRYKRQNVVKDLSVELDRLSEESVNNDISSWTKGRSGEALSLLKKRFSHRPVQEKFVCLNCGFETHADEQAALNIARSWLFLRSQEYKKYQTNKTTGNTDKRAFVETWQSFYRKKLKEVWKPAV

SEQ ID NO: 44543 - protein, 977 aa, synthetic construct
  REGION 1..977: note = engineered CasX variant
QEIKRINKIRRRLVKDSNTKKAGKTGPMKTLLVRVMTPDLRERLENLRKKPENIPQPISNTSRANLNKLLTDYTEMKKAILHVYWEEFQKDPVGLMSRVAQPASKKIDQNKLKPEMDEKGNLTTAGFACSQCGQPLFVYKLEQVSEKGKAYTNYFGRCNVAEHEKLIQLAQLKPEKDSDEAVTYSLGKFGQRALDFYSIHVTKESTHPVKPLAQIAGNRYASPVGKALSDACMGTIASFLSKYQDIIIEHQKVVKGNQKRLESLRELAGKENLEYPSVTLPPQPHTKEGVDAYNEVIARVRMWVNLNLWQKLKLSRDDAKPLLRLKGFPSFPLVERQANEVDWWDMVCNVKKLINEKKEDGKVFWQNLAGYKRQEALRPYLSSEEDRKKGKKFARTQLGDLLLHLEKKHGEDWGKVYDEAWERIDKKVEGLSKHIKLEEERRSEDAQSKAALTDWLRAKASFVIEGLKEADKDEFCRCELKLQKWYGDLRGKPFAIEAENSILDISGFSKQYNCAFIWQKDGVKKLNLYLIINYFKGGKLRFKKIKPEAFEANRFYTVINKKSGEIVPMEVNFNFDDPNLIILPLAFGKRQGREFIWNDLLSLETGSLKLANGRVIEKTLYNRRTRQDEPALFVALTFERREVLDSSNIKPMNLIGVDRGENIPAVIALTDPEGCPLSRFKDSLGNPTHILRIGESYKEKQRTIQAKKEVEQRRAGGYSRKYASKAKNLADDMVRNTARDLLYYAVTQDAMLIFENLSRGFGRQGKRTFMAERQYTRMEDWLTAKLAYEGLPSKTYLSKTLAQYTSKTCSNCGFTITSADYDRVLEKLKKTATGWMTTINGKELKVEGQITYYNRYKRQNVVKDLSVELDRLSEESVNNDISSWTKGRSGEALSLLKKRFSHRPVQEKFVCLNCGFETHADEQAALNIARSWLFLRSQEYKKYQTNKTTGNTDKRAFVETWQSFYRKKLKEVWKPAV

SEQ ID NO: 44544 - protein, 978 aa, synthetic construct
  REGION 1..978: note = engineered CasX variant
QEIKRINKIRRRLVKDSNTKKAGKTGPMKTLLVRVMTPDLRERLENLRKKPENIPQPISNTSRANLNKLLTDYTEMKKAILHVYWEEFQKDPVGLMSRVAQPASKKIDQNKLKPEMDEKGNLTTAGFACSQCGQPLFVYKLEQVSEKGKAYTNYFGRCNVAEHEKLILLAQLKPEKDSDEAVTYSLGKFGQRALDFYSIHVTKESTHPVKPLAQIAGNRYASYPVGKALSDACMGTIASFLSKYQDIIIEHQKVVKGNQKRLESLRELAGKENLEYPSVTLPPQPHTKEGVDAYNEVIARVRMWVNLNLWQKLKLSRDDAKPLLRLKGFPSFPLVERQANEVDWWDMVCNVKKLINEKKEDGKVFWQNLAIYKRQEALRPYLSSEEDRKKGKKFARTQLGDLLLHLEKKHGEDWGKVYDEAWERIDKKVEGLSKHIKLEEERRSEDAQSKAALTDWLRAKASFVIEGLKEADKDEFCRCELKLQKWYGDLRGKPFAIEAENSILDISGFSKQYNCAFIWQKDGVKKLNLYLIINYFKGGKLRFKKIKPEAFEANRFYTVINKKSGEIVPMEVNFNFDDPNLIILPLAFGKRQGREFIWNDLLSLETGSLKLANGRVIEKTLYNRRTRQDEPALFVALTFERREVLDSSNIKPMNLIGVDRGENIPAVIALTDPEGCPLSRFKDSLGNPTHILRIGESYKEKQRTIQAKKEVEQRRAGGYSRKYASKAKNLADDMVRNTARDLLYYAVTQDAMLIFENLSRGFGRQGKRTFMAERQYTRMEDWLTAKLAYEGLPSKTYLSKTLAQYTSKTCSNCGFTITSADYDRVLEKLKKTATGWMTTINGKELKVEGQITYYNRYKRQNVVKDLSVELDRLSEESVNNDISSWTKGRSGEALSLLKKRFSHRPVQEKFVCLNCGFETHADEQAALNIARSWLFLRSQEYKKYQTNKTTGNTDKRAFVETWQSFYRKKLKEVWKPAV

SEQ ID NO: 44545 - protein, 978 aa, synthetic construct
  REGION 1..978: note = engineered CasX variant
QEIKRINKIRRRLVKDSNTKKAGKTGPMKTLLVRVMTPDLRERLENLRKKPENIPQPISNTSRANLNKLLTDYTEMKKAILHVYWEEFQKDPVGLMSRVAQPASKKIDQNKLKPEMDEKGNLTTAGFACSQCGQPLFVYKLEQVSEKGKAYTNYFGRCNVAEHEKLILLAQLKPEKDSDEAVTYSLGKFGQRALDFYSIHVTKESTHPVKPLAQIAGNRYASHPVGKALSDACMGTIASFLSKYQDIIIEHQKVVKGNQKRLESLRELAGKENLEYPSVTLPPQPHTKEGVDAYNEVIARVRMWVNLNLWQKLKLSRDDAKPLLRLKGFPSFPLVERQANEVDWWDMVCNVKKLINEKKEDGKVFWQNLAIYKRQEALRPYLSSEEDRKKGKKFARTQLGDLLLHLEKKHGEDWGKVYDEAWERIDKKVEGLSKHIKLEEERRSEDAQSKAALTDWLRAKASFVIEGLKEADKDEFCRCELKLQKWYGDLRGKPFAIEAENSILDISGFSKQYNCAFIWQKDGVKKLNLYLIINYFKGGKLRFKKIKPEAFEANRFYTVINKKSGEIVPMEVNFNFDDPNLIILPLAFGKRQGREFIWNDLLSLETGSLKLANGRVIEKTLYNRRTRQDEPALFVALTFERREVLDSSNIKPMNLIGVDRGENIPAVIALTDPEGCPLSRFKDSLGNPTHILRIGESYKEKQRTIQAKKEVEQRRAGGYSRKYASKAKNLADDMVRNTARDLLYYAVTQDAMLIFENLSRGFGRQGKRTFMAERQYTRMEDWLTAKLAYEGLPSKTYLSKTLAQYTSKTCSNCGFTITSADYDRVLEKLKKTATGWMTTINGKELKVEGQITYYNRYKRQNVVKDLSVELDRLSEESVNNDISSWTKGRSGEALSLLKKRFSHRPVQEKFVCLNCGFETHADEQAALNIARSWLFLRSQEYKKYQTNKTTGNTDKRAFVETWQSFYRKKLKEVWKPAV

SEQ ID NO: 44546 - protein, 978 aa, synthetic construct
  REGION 1..978: note = engineered CasX variant
QEIKRINKIRRRLVKDSNTKKAGKTGPMKTLLVRVMTPDLRERLENLRKKPENIPQPISNTSRANLNKLLTDYTEMKKAILHVYWEEFQKDPVGLMSRVAQPASKKIDQNKLKPEMDEKGNLTTAGFACSQCGQPLFVYKLEQVSEKGKAYTNYFGRCNVAEHEKLILLAQLKPEKDSDEAVTYSLGKFGQRALDFYSIHVTKESTHPVKPLAQIAGNRYASSPVGKALSDACMGTIASFLSKYQDIIIEHQKVVKGNQKRLESLRELAGKENLEYPSVTLPPQPHTKEGVDAYNEVIARVRMWVNLNLWQKLKLSRDDAKPLLRLKGFPSFPLVERQANEVDWWDMVCNVKKLINEKKEDGKVFWQNLAIYKRQEALRPYLSSEEDRKKGKKFARTQLGDLLLHLEKKHGEDWGKVYDEAWERIDKKVEGLSKHIKLEEERRSEDAQSKAALTDWLRAKASFVIEGLKEADKDEFCRCELKLQKWYGDLRGKPFAIEAENSILDISGFSKQYNCAFIWQKDGVKKLNLYLIINYFKGGKLRFKKIKPEAFEANRFYTVINKKSGEIVPMEVNFNFDDPNLIILPLAFGKRQGREFIWNDLLSLETGSLKLANGRVIEKTLYNRRTRQDEPALFVALTFERREVLDSSNIKPMNLIGVDRGENIPAVIALTDPEGCPLSRFKDSLGNPTHILRIGESYKEKQRTIQAKKEVEQRRAGGYSRKYASKAKNLADDMVRNTARDLLYYAVTQDAMLIFENLSRGFGRQGKRTFMAERQYTRMEDWLTAKLAYEGLPSKTYLSKTLAQYTSKTCSNCGFTITSADYDRVLEKLKKTATGWMTTINGKELKVEGQITYYNRYKRQNVVKDLSVELDRLSEESVNNDISSWTKGRSGEALSLLKKRFSHRPVQEKFVCLNCGFETHADEQAALNIARSWLFLRSQEYKKYQTNKTTGNTDKRAFVETWQSFYRKKLKEVWKPAV

SEQ ID NO: 44547 - protein, 978 aa, synthetic construct
  REGION 1..978: note = engineered CasX variant
QEIKRINKIRRRLVKDSNTKKAGKTGPMKTLLVRVMTPDLRERLENLRKKPENIPQPISNTSRANLNKLLTDYTEMKKAILHVYWEEFQKDPVGLMSRVAQPASKKIDQNKLKPEMDEKGNLTTAGFACSQCGQPLFVYKLEQVSEKGKAYTNYFGRCNVAEHEKLILLAQLKPEKDSDEAVTYSLGKFGQRALDFYSIHVTKESTHPVKPLAQIAGNRYASTPVGKALSDACMGTIASFLSKYQDIIIEHQKVVKGNQKRLESLRELAGKENLEYPSVTLPPQPHTKEGVDAYNEVIARVRMWVNLNLWQKLKLSRDDAKPLLRLKGFPSFPLVERQANEVDWWDMVCNVKKLINEKKEDGKVFWQNLAIYKRQEALRPYLSSEEDRKKGKKFARTQLGDLLLHLEKKHGEDWGKVYDEAWERIDKKVEGLSKHIKLEEERRSEDAQSKAALTDWLRAKASFVIEGLKEADKDEFCRCELKLQKWYGDLRGKPFAIEAENSILDISGFSKQYNCAFIWQKDGVKKLNLYLIINYFKGGKLRFKKIKPEAFEANRFYTVINKKSGEIVPMEVNFNFDDPNLIILPLAFGKRQGREFIWNDLLSLETGSLKLANGRVIEKTLYNRRTRQDEPALFVALTFERREVLDSSNIKPMNLIGVDRGENIPAVIALTDPEGCPLSRFKDSLGNPTHILRIGESYKEKQRTIQAKKEVEQRRAGGYSRKYASKAKNLADDMVRNTARDLLYYAVTQDAMLIFENLSRGFGRQGKRTFMAERQYTRMEDWLTAKLAYEGLPSKTYLSKTLAQYTSKTCSNCGFTITSADYDRVLEKLKKTATGWMTTINGKELKVEGQITYYNRYKRQNVVKDLSVELDRLSEESVNNDISSWTKGRSGEALSLLKKRFSHRPVQEKFVCLNCGFETHADEQAALNIARSWLFLRSQEYKKYQTNKTTGNTDKRAFVETWQSFYRKKLKEVWKPAV

SEQ ID NO: 44548 - protein, 978 aa, synthetic construct
  REGION 1..978: note = engineered CasX variant
QEIKRINKIRRRLVKDSNTKKAGKTGPMKTLLVRVMTPDLRERLENLRKKPENIPQPISNTSRANLNKLLTDYTEMKKAILHVYWEEFQKDPVGLMSRVAQPASKKIDQNKLKPEMDEKGNLTTAGFACSQCGQPLFVYKLEQVSEKGKAYTNYFGRCNVAEHEKLILLAQLKPEKDSDEAVTYSLGKFGQRALDFYSIHVTKESTHPVKPLAQIAGNRYASAPVGKALSDACMGTIASFLSKYQDIIIEHQKVVKGNQKRLESLRELAGKENLEYPSVTLPPQPHTKEGVDAYNEVIARVRMWVNLNLWQKLKLSRDDAKPLLRLKGFPSFPLVERQANEVDWWDMVCNVKKLINEKKEDGKVFWQNLAIYKRQEALRPYLSSEEDRKKGKKFARTQLGDLLLHLEKKHGEDWGKVYDEAWERIDKKVEGLSKHIKLEEERRSEDAQSKAALTDWLRAKASFVIEGLKEADKDEFCRCELKLQKWYGDLRGKPFAIEAENSILDISGFSKQYNCAFIWQKDGVKKLNLYLIINYFKGGKLRFKKIKPEAFEANRFYTVINKKSGEIVPMEVNFNFDDPNLIILPLAFGKRQGREFIWNDLLSLETGSLKLANGRVIEKTLYNRRTRQDEPALFVALTFERREVLDSSNIKPMNLIGVDRGENIPAVIALTDPEGCPLSRFKDSLGNPTHILRIGESYKEKQRTIQAKKEVEQRRAGGYSRKYASKAKNLADDMVRNTARDLLYYAVTQDAMLIFENLSRGFGRQGKRTFMAERQYTRMEDWLTAKLAYEGLPSKTYLSKTLAQYTSKTCSNCGFTITSADYDRVLEKLKKTATGWMTTINGKELKVEGQITYYNRYKRQNVVKDLSVELDRLSEESVNNDISSWTKGRSGEALSLLKKRFSHRPVQEKFVCLNCGFETHADEQAALNIARSWLFLRSQEYKKYQTNKTTGNTDKRAFVETWQSFYRKKLKEVWKPAV

SEQ ID NO: 44549 - protein, 978 aa, synthetic construct
  REGION 1..978: note = engineered CasX variant
QEIKRINKIRRRLVKDSNTKKAGKTGPMKTLLVRVMTPDLRERLENLRKKPENIPQPISNTSRANLNKLLTDYTEMKKAILHVYWEEFQKDPVGLMSRVAQPASKKIDQNKLKPEMDEKGNLTTAGFACSQCGQPLFVYKLEQVSEKGKAYTNYFGRCNVAEHEKLILLAQLKPEKDSDEAVTYSLGKFGQRALDFYSIHVTKESTHPVKPLAQIAGNRYASVPVGKALSDACMGTIASFLSKYQDIIIEHQKVVKGNQKRLESLRELAGKENLEYPSVTLPPQPHTKEGVDAYNEVIARVRMWVNLNLWQKLKLSRDDAKPLLRLKGFPSFPLVERQANEVDWWDMVCNVKKLINEKKEDGKVFWQNLAIYKRQEALRPYLSSEEDRKKGKKFARTQLGDLLLHLEKKHGEDWGKVYDEAWERIDKKVEGLSKHIKLEEERRSEDAQSKAALTDWLRAKASFVIEGLKEADKDEFCRCELKLQKWYGDLRGKPFAIEAENSILDISGFSKQYNCAFIWQKDGVKKLNLYLIINYFKGGKLRFKKIKPEAFEANRFYTVINKKSGEIVPMEVNFNFDDPNLIILPLAFGKRQGREFIWNDLLSLETGSLKLANGRVIEKTLYNRRTRQDEPALFVALTFERREVLDSSNIKPMNLIGVDRGENIPAVIALTDPEGCPLSRFKDSLGNPTHILRIGESYKEKQRTIQAKKEVEQRRAGGYSRKYASKAKNLADDMVRNTARDLLYYAVTQDAMLIFENLSRGFGRQGKRTFMAERQYTRMEDWLTAKLAYEGLPSKTYLSKTLAQYTSKTCSNCGFTITSADYDRVLEKLKKTATGWMTTINGKELKVEGQITYYNRYKRQNVVKDLSVELDRLSEESVNNDISSWTKGRSGEALSLLKKRFSHRPVQEKFVCLNCGFETHADEQAALNIARSWLFLRSQEYKKYQTNKTTGNTDKRAFVETWQSFYRKKLKEVWKPAV

SEQ ID NO: 44550 - protein, 978 aa, synthetic construct
  REGION 1..978: note = engineered CasX variant
QEIKRINKIRRRLVKDSNTKKAGKTGPMKTLLVRVMTPDLRERLENLRKKPENIPQPISNTSRANLNKLLTDYTEMKKAILHVYWEEFQKDPVGLMSRVAQPASKKIDQNKLKPEMDEKGNLTTAGFACSQCGQPLFVYKLEQVSEKGKAYTNYFGRCNVAEHEKLIKLAQLKPEKDSDEAVTYSLGKFGQRALDFYSIHVTKESTHPVKPLAQIAGNRYASGPVGKALSDACMGTIASFLSKYQDIIIEHQKVVKGNQKRLESLRELAGKENLEYPSVTLPPQPHTKEGVDAYNEVIARVRMWVNLNLWQKLKLSRDDAKPLLRLKGFPSFPLVERQANEVDWWDMVCNVKKLINEKKEDGKVFWQNLAIYKRQEALRPYLSSEEDRKKGKKFARTQLGDLLLHLEKKHGEDWGKVYDEAWERIDKKVEGLSKHIKLEEERRSEDAQSKAALTDWLRAKASFVIEGLKEADKDEFCRCELKLQKWYGDLRGKPFAIEAENSILDISGFSKQYNCAFIWQKDGVKKLNLYLIINYFKGGKLRFKKIKPEAFEANRFYTVINKKSGEIVPMEVNFNFDDPNLIILPLAFGKRQGREFIWNDLLSLETGSLKLANGRVIEKTLYNRRTRQDEPALFVALTFERREVLDSSNIKPMNLIGVDRGENIPAVIALTDPEGCPLSRFKDSLGNPTHILRIGESYKEKQRTIQAKKEVEQRRAGGYSRKYASKAKNLADDMVRNTARDLLYYAVTQDAMLIFENLSRGFGRQGKRTFMAERQYTRMEDWLTAKLAYEGLPSKTYLSKTLAQYTSKTCSNCGFTITSADYDRVLEKLKKTATGWMTTINGKELKVEGQITYYNRYKRQNVVKDLSVELDRLSEESVNNDISSWTKGRSGEALSLLKKRFSHRPVQEKFVCLNCGFETHADEQAALNIARSWLFLRSQEYKKYQTNKTTGNTDKRAFVETWQSFYRKKLKEVWKPAV

SEQ ID NO: 44551 - protein, 977 aa, synthetic construct
  REGION 1..977: note = engineered CasX variant
QEIKRINKIRRRLVKDSNTKKAGKTGPMKTLLVRVMTPDLRERLENLRKKPENIPQPISNTSRANLNKLLTDYTEMKKAILHVYWEEFQKDPVGLMSRVAQPASKKIDQNKLKPEMDEKGNLTTAGFACSQCGQPLFVYKLEQVSEKGKAYTNYFGRCNVAEHEKLILLAQLKPEKDSDEAVTYSLGKFGQRALDFYSIHVTKESTHPVKPLAQIAGNRYASPVGKALSDACMGTIASFLSKYQDIIIEHQKVVKGNQKRLESLRELAGKENLEYPSVTLPPQPHTKEGVDAYNEVIARVRMWVNLNLWQKLKLSRDDAKPLLRLKGFPSFPLVERQANEVDWWDMVCNVKKLINEKKEDGKVFWQNLAIYKRQEALRPYLSSEEDRKKGKKFARTQLGDLLLHLEKKHGEDWGKVYDEAWERIDKKVEGLSKHIKLEEERRSEDAQSKAALTDWLRAKASFVIEGLKEADKDEFCRCELKLQKWYGDLRGKPFAIEAENSILDISGFSKQYNCAFIWQKDGVKKLNLYLIINYFKGGKLRFKKIKPEAFEANRFYTVINKKSGEIVPMEVNFNFDDPNLIILPLAFGKRQGREFIWNDLLSLETGSLKLANGRVIEKTLYNRRTRQDEPALFVALTFERREVLDSSNIKPMNLIGVDRGENIPAVIALTDPEGCPLSRFKDSLGNPTHILRIGESYKEKQRTIQAKKEVEQRRAGGYSRKYASKAKNLADDMVRNTARDLLYYAVTQDAMLIFENLSRGFGRQGKRTFMAERQYTRMEDWLTAKLAYEGLPSKTYLSKTLAQYTSKTCSNCGFTITSADYDRVLEKLKKTATGWMTTINGKELKVEGQITYYNRYKRQNVVKDLSVELDRLSEESVNNDISSWTKGRSGEALSLLKKRFSHRPVQEKFVCLNCGFETHADEQAALNIARSWLFLRSQEYKKYQTNKTTGNTDKRAFVETWQSFYRKKLKEVWKPAV

SEQ ID NO: 44552 - protein, 978 aa, synthetic construct
  REGION 1..978: note = engineered CasX variant
QEIKRINKIRRRLVKDSNTKKAGKTGPMKTLLVRVMTPDLRERLENLRKKPENIPQPISNTSRANLNKLLTDYTEMKKAILHVYWEEFQKDPVGLMSRVAQPASKKIDQNKLKPEMDEKGNLTTAGFACSQCGQPLFVYKLEQVSEKGKAYTNYFGRCNVAEHEKLILLAQLKPEKDSDEAVTYSLGKFGQRALDFYSIHVTKESTHPVKPLAQIAGNRYASYPVGKALSDACMGTIASFLSKYQDIIIEHQKVVKGNQKRLESLRELAGKENLEYPSVTLPPQPHTKEGVDAYNEVIARVRMWVNLNLWQKLKLSRDDAKPLLRLKGFPSFPLVERQANEVDWWDMVCNVKKLINEKKEDGKVFWQNLAGYKRQEALRPYLSSEEDREKGKKFARTQLGDLLLHLEKKHGEDWGKVYDEAWERIDKKVEGLSKHIKLEEERRSEDAQSKAALTDWLRAKASFVIEGLKEADKDEFCRCELKLQKWYGDLRGKPFAIEAENSILDISGFSKQYNCAFIWQKDGVKKLNLYLIINYFKGGKLRFKKIKPEAFEANRFYTVINKKSGEIVPMEVNFNFDDPNLIILPLAFGKRQGREFIWNDLLSLETGSLKLANGRVIEKTLYNRRTRQDEPALFVALTFERREVLDSSNIKPMNLIGVDRGENIPAVIALTDPEGCPLSRFKDSLGNPTHILRIGESYKEKQRTIQAKKEVEQRRAGGYSRKYASKAKNLADDMVRNTARDLLYYAVTQDAMLIFENLSRGFGRQGKRTFMAERQYTRMEDWLTAKLAYEGLPSKTYLSKTLAQYTSKTCSNCGFTITSADYDRVLEKLKKTATGWMTTINGKELKVEGQITYYNRYKRQNVVKDLSVELDRLSEESVNNDISSWTKGRSGEALSLLKKRFSHRPVQEKFVCLNCGFETHADEQAALNIARSWLFLRSQEYKKYQTNKTTGNTDKRAFVETWQSFYRKKLKEVWKPAV

SEQ ID NO: 44553 - protein, 978 aa, synthetic construct
  REGION 1..978: note = engineered CasX variant
QEIKRINKIRRRLVKDSNTKKAGKTGPMKTLLVRVMTPDLRERLENLRKKPENIPQPISNTSRANLNKLLTDYTEMKKAILHVYWEEFQKDPVGLMSRVAQPASKKIDQNKLKPEMDEKGNLTTAGFACSQCGQPLFVYKLEQVSEKGKAYTNYFGRCNVAEHEKLILLAQLKPEKDSDEAVTYSLGKFGQRALDFYSIHVTKESTHPVKPLAQIAGNRYASHPVGKALSDACMGTIASFLSKYQDIIIEHQKVVKGNQKRLESLRELAGKENLEYPSVTLPPQPHTKEGVDAYNEVIARVRMWVNLNLWQKLKLSRDDAKPLLRLKGFPSFPLVERQANEVDWWDMVCNVKKLINEKKEDGKVFWQNLAGYKRQEALRPYLSSEEDREKGKKFARTQLGDLLLHLEKKHGEDWGKVYDEAWERIDKKVEGLSKHIKLEEERRSEDAQSKAALTDWLRAKASFVIEGLKEADKDEFCRCELKLQKWYGDLRGKPFAIEAENSILDISGFSKQYNCAFIWQKDGVKKLNLYLIINYFKGGKLRFKKIKPEAFEANRFYTVINKKSGEIVPMEVNFNFDDPNLIILPLAFGKRQGREFIWNDLLSLETGSLKLANGRVIEKTLYNRRTRQDEPALFVALTFERREVLDSSNIKPMNLIGVDRGENIPAVIALTDPEGCPLSRFKDSLGNPTHILRIGESYKEKQRTIQAKKEVEQRRAGGYSRKYASKAKNLADDMVRNTARDLLYYAVTQDAMLIFENLSRGFGRQGKRTFMAERQYTRMEDWLTAKLAYEGLPSKTYLSKTLAQYTSKTCSNCGFTITSADYDRVLEKLKKTATGWMTTINGKELKVEGQITYYNRYKRQNVVKDLSVELDRLSEESVNNDISSWTKGRSGEALSLLKKRFSHRPVQEKFVCLNCGFETHADEQAALNIARSWLFLRSQEYKKYQTNKTTGNTDKRAFVETWQSFYRKKLKEVWKPAV

SEQ ID NO: 44554 - protein, 978 aa, synthetic construct
  REGION 1..978: note = engineered CasX variant
QEIKRINKIRRRLVKDSNTKKAGKTGPMKTLLVRVMTPDLRERLENLRKKPENIPQPISNTSRANLNKLLTDYTEMKKAILHVYWEEFQKDPVGLMSRVAQPASKKIDQNKLKPEMDEKGNLTTAGFACSQCGQPLFVYKLEQVSEKGKAYTNYFGRCNVAEHEKLILLAQLKPEKDSDEAVTYSLGKFGQRALDFYSIHVTKESTHPVKPLAQIAGNRYASSPVGKALSDACMGTIASFLSKYQDIIIEHQKVVKGNQKRLESLRELAGKENLEYPSVTLPPQPHTKEGVDAYNEVIARVRMWVNLNLWQKLKLSRDDAKPLLRLKGFPSFPLVERQANEVDWWDMVCNVKKLINEKKEDGKVFWQNLAGYKRQEALRPYLSSEEDREKGKKFARTQLGDLLLHLEKKHGEDWGKVYDEAWERIDKKVEGLSKHIKLEEERRSEDAQSKAALTDWLRAKASFVIEGLKEADKDEFCRCELKLQKWYGDLRGKPFAIEAENSILDISGFSKQYNCAFIWQKDGVKKLNLYLIINYFKGGKLRFKKIKPEAFEANRFYTVINKKSGEIVPMEVNFNFDDPNLIILPLAFGKRQGREFIWNDLLSLETGSLKLANGRVIEKTLYNRRTRQDEPALFVALTFERREVLDSSNIKPMNLIGVDRGENIPAVIALTDPEGCPLSRFKDSLGNPTHILRIGESYKEKQRTIQAKKEVEQRRAGGYSRKYASKAKNLADDMVRNTARDLLYYAVTQDAMLIFENLSRGFGRQGKRTFMAERQYTRMEDWLTAKLAYEGLPSKTYLSKTLAQYTSKTCSNCGFTITSADYDRVLEKLKKTATGWMTTINGKELKVEGQITYYNRYKRQNVVKDLSVELDRLSEESVNNDISSWTKGRSGEALSLLKKRFSHRPVQEKFVCLNCGFETHADEQAALNIARSWLFLRSQEYKKYQTNKTTGNTDKRAFVETWQSFYRKKLKEVWKPAV

SEQ ID NO: 44555 - protein, 978 aa, synthetic construct
  REGION 1..978: note = engineered CasX variant
QEIKRINKIRRRLVKDSNTKKAGKTGPMKTLLVRVMTPDLRERLENLRKKPENIPQPISNTSRANLNKLLTDYTEMKKAILHVYWEEFQKDPVGLMSRVAQPASKKIDQNKLKPEMDEKGNLTTAGFACSQCGQPLFVYKLEQVSEKGKAYTNYFGRCNVAEHEKLILLAQLKPEKDSDEAVTYSLGKFGQRALDFYSIHVTKESTHPVKPLAQIAGNRYASTPVGKALSDACMGTIASFLSKYQDIIIEHQKVVKGNQKRLESLRELAGKENLEYPSVTLPPQPHTKEGVDAYNEVIARVRMWVNLNLWQKLKLSRDDAKPLLRLKGFPSFPLVERQANEVDWWDMVCNVKKLINEKKEDGKVFWQNLAGYKRQEALRPYLSSEEDREKGKKFARTQLGDLLLHLEKKHGEDWGKVYDEAWERIDKKVEGLSKHIKLEEERRSEDAQSKAALTDWLRAKASFVIEGLKEADKDEFCRCELKLQKWYGDLRGKPFAIEAENSILDISGFSKQYNCAFIWQKDGVKKLNLYLIINYFKGGKLRFKKIKPEAFEANRFYTVINKKSGEIVPMEVNFNFDDPNLIILPLAFGKRQGREFIWNDLLSLETGSLKLANGRVIEKTLYNRRTRQDEPALFVALTFERREVLDSSNIKPMNLIGVDRGENIPAVIALTDPEGCPLSRFKDSLGNPTHILRIGESYKEKQRTIQAKKEVEQRRAGGYSRKYASKAKNLADDMVRNTARDLLYYAVTQDAMLIFENLSRGFGRQGKRTFMAERQYTRMEDWLTAKLAYEGLPSKTYLSKTLAQYTSKTCSNCGFTITSADYDRVLEKLKKTATGWMTTINGKELKVEGQITYYNRYKRQNVVKDLSVELDRLSEESVNNDISSWTKGRSGEALSLLKKRFSHRPVQEKFVCLNCGFETHADEQAALNIARSWLFLRSQEYKKYQTNKTTGNTDKRAFVETWQSFYRKKLKEVWKPAV

SEQ ID NO: 44556 - protein, 978 aa, synthetic construct
  REGION 1..978: note = engineered CasX variant
QEIKRINKIRRRLVKDSNTKKAGKTGPMKTLLVRVMTPDLRERLENLRKKPENIPQPISNTSRANLNKLLTDYTEMKKAILHVYWEEFQKDPVGLMSRVAQPASKKIDQNKLKPEMDEKGNLTTAGFACSQCGQPLFVYKLEQVSEKGKAYTNYFGRCNVAEHEKLILLAQLKPEKDSDEAVTYSLGKFGQRALDFYSIHVTKESTHPVKPLAQIAGNRYASAPVGKALSDACMGTIASFLSKYQDIIIEHQKVVKGNQKRLESLRELAGKENLEYPSVTLPPQPHTKEGVDAYNEVIARVRMWVNLNLWQKLKLSRDDAKPLLRLKGFPSFPLVERQANEVDWWDMVCNVKKLINEKKEDGKVFWQNLAGYKRQEALRPYLSSEEDREKGKKFARTQLGDLLLHLEKKHGEDWGKVYDEAWERIDKKVEGLSKHIKLEEERRSEDAQSKAALTDWLRAKASFVIEGLKEADKDEFCRCELKLQKWYGDLRGKPFAIEAENSILDISGFSKQYNCAFIWQKDGVKKLNLYLIINYFKGGKLRFKKIKPEAFEANRFYTVINKKSGEIVPMEVNFNFDDPNLIILPLAFGKRQGREFIWNDLLSLETGSLKLANGRVIEKTLYNRRTRQDEPALFVALTFERREVLDSSNIKPMNLIGVDRGENIPAVIALTDPEGCPLSRFKDSLGNPTHILRIGESYKEKQRTIQAKKEVEQRRAGGYSRKYASKAKNLADDMVRNTARDLLYYAVTQDAMLIFENLSRGFGRQGKRTFMAERQYTRMEDWLTAKLAYEGLPSKTYLSKTLAQYTSKTCSNCGFTITSADYDRVLEKLKKTATGWMTTINGKELKVEGQITYYNRYKRQNVVKDLSVELDRLSEESVNNDISSWTKGRSGEALSLLKKRFSHRPVQEKFVCLNCGFETHADEQAALNIARSWLFLRSQEYKKYQTNKTTGNTDKRAFVETWQSFYRKKLKEVWKPAV

SEQ ID NO: 44557 - protein, 978 aa, synthetic construct
  REGION 1..978: note = engineered CasX variant
QEIKRINKIRRRLVKDSNTKKAGKTGPMKTLLVRVMTPDLRERLENLRKKPENIPQPISNTSRANLNKLLTDYTEMKKAILHVYWEEFQKDPVGLMSRVAQPASKKIDQNKLKPEMDEKGNLTTAGFACSQCGQPLFVYKLEQVSEKGKAYTNYFGRCNVAEHEKLILLAQLKPEKDSDEAVTYSLGKFGQRALDFYSIHVTKESTHPVKPLAQIAGNRYASVPVGKALSDACMGTIASFLSKYQDIIIEHQKVVKGNQKRLESLRELAGKENLEYPSVTLPPQPHTKEGVDAYNEVIARVRMWVNLNLWQKLKLSRDDAKPLLRLKGFPSFPLVERQANEVDWWDMVCNVKKLINEKKEDGKVFWQNLAGYKRQEALRPYLSSEEDREKGKKFARTQLGDLLLHLEKKHGEDWGKVYDEAWERIDKKVEGLSKHIKLEEERRSEDAQSKAALTDWLRAKASFVIEGLKEADKDEFCRCELKLQKWYGDLRGKPFAIEAENSILDISGFSKQYNCAFIWQKDGVKKLNLYLIINYFKGGKLRFKKIKPEAFEANRFYTVINKKSGEIVPMEVNFNFDDPNLIILPLAFGKRQGREFIWNDLLSLETGSLKLANGRVIEKTLYNRRTRQDEPALFVALTFERREVLDSSNIKPMNLIGVDRGENIPAVIALTDPEGCPLSRFKDSLGNPTHILRIGESYKEKQRTIQAKKEVEQRRAGGYSRKYASKAKNLADDMVRNTARDLLYYAVTQDAMLIFENLSRGFGRQGKRTFMAERQYTRMEDWLTAKLAYEGLPSKTYLSKTLAQYTSKTCSNCGFTITSADYDRVLEKLKKTATGWMTTINGKELKVEGQITYYNRYKRQNVVKDLSVELDRLSEESVNNDISSWTKGRSGEALSLLKKRFSHRPVQEKFVCLNCGFETHADEQAALNIARSWLFLRSQEYKKYQTNKTTGNTDKRAFVETWQSFYRKKLKEVWKPAV

SEQ ID NO: 44558 - protein, 978 aa, synthetic construct
  REGION 1..978: note = engineered CasX variant
QEIKRINKIRRRLVKDSNTKKAGKTGPMKTLLVRVMTPDLRERLENLRKKPENIPQPISNTSRANLNKLLTDYTEMKKAILHVYWEEFQKDPVGLMSRVAQPASKKIDQNKLKPEMDEKGNLTTAGFACSQCGQPLFVYKLEQVSEKGKAYTNYFGRCNVAEHEKLIKLAQLKPEKDSDEAVTYSLGKFGQRALDFYSIHVTKESTHPVKPLAQIAGNRYASGPVGKALSDACMGTIASFLSKYQDIIIEHQKVVKGNQKRLESLRELAGKENLEYPSVTLPPQPHTKEGVDAYNEVIARVRMWVNLNLWQKLKLSRDDAKPLLRLKGFPSFPLVERQANEVDWWDMVCNVKKLINEKKEDGKVFWQNLAGYKRQEALRPYLSSEEDREKGKKFARTQLGDLLLHLEKKHGEDWGKVYDEAWERIDKKVEGLSKHIKLEEERRSEDAQSKAALTDWLRAKASFVIEGLKEADKDEFCRCELKLQKWYGDLRGKPFAIEAENSILDISGFSKQYNCAFIWQKDGVKKLNLYLIINYFKGGKLRFKKIKPEAFEANRFYTVINKKSGEIVPMEVNFNFDDPNLIILPLAFGKRQGREFIWNDLLSLETGSLKLANGRVIEKTLYNRRTRQDEPALFVALTFERREVLDSSNIKPMNLIGVDRGENIPAVIALTDPEGCPLSRFKDSLGNPTHILRIGESYKEKQRTIQAKKEVEQRRAGGYSRKYASKAKNLADDMVRNTARDLLYYAVTQDAMLIFENLSRGFGRQGKRTFMAERQYTRMEDWLTAKLAYEGLPSKTYLSKTLAQYTSKTCSNCGFTITSADYDRVLEKLKKTATGWMTTINGKELKVEGQITYYNRYKRQNVVKDLSVELDRLSEESVNNDISSWTKGRSGEALSLLKKRFSHRPVQEKFVCLNCGFETHADEQAALNIARSWLFLRSQEYKKYQTNKTTGNTDKRAFVETWQSFYRKKLKEVWKPAV

SEQ ID NO: 44559 - protein, 977 aa, synthetic construct
  REGION 1..977: note = engineered CasX variant
QEIKRINKIRRRLVKDSNTKKAGKTGPMKTLLVRVMTPDLRERLENLRKKPENIPQPISNTSRANLNKLLTDYTEMKKAILHVYWEEFQKDPVGLMSRVAQPASKKIDQNKLKPEMDEKGNLTTAGFACSQCGQPLFVYKLEQVSEKGKAYTNYFGRCNVAEHEKLILLAQLKPEKDSDEAVTYSLGKFGQRALDFYSIHVTKESTHPVKPLAQIAGNRYASPVGKALSDACMGTIASFLSKYQDIIIEHQKVVKGNQKRLESLRELAGKENLEYPSVTLPPQPHTKEGVDAYNEVIARVRMWVNLNLWQKLKLSRDDAKPLLRLKGFPSFPLVERQANEVDWWDMVCNVKKLINEKKEDGKVFWQNLAGYKRQEALRPYLSSEEDREKGKKFARTQLGDLLLHLEKKHGEDWGKVYDEAWERIDKKVEGLSKHIKLEEERRSEDAQSKAALTDWLRAKASFVIEGLKEADKDEFCRCELKLQKWYGDLRGKPFAIEAENSILDISGFSKQYNCAFIWQKDGVKKLNLYLIINYFKGGKLRFKKIKPEAFEANRFYTVINKKSGEIVPMEVNFNFDDPNLIILPLAFGKRQGREFIWNDLLSLETGSLKLANGRVIEKTLYNRRTRQDEPALFVALTFERREVLDSSNIKPMNLIGVDRGENIPAVIALTDPEGCPLSRFKDSLGNPTHILRIGESYKEKQRTIQAKKEVEQRRAGGYSRKYASKAKNLADDMVRNTARDLLYYAVTQDAMLIFENLSRGFGRQGKRTFMAERQYTRMEDWLTAKLAYEGLPSKTYLSKTLAQYTSKTCSNCGFTITSADYDRVLEKLKKTATGWMTTINGKELKVEGQITYYNRYKRQNVVKDLSVELDRLSEESVNNDISSWTKGRSGEALSLLKKRFSHRPVQEKFVCLNCGFETHADEQAALNIARSWLFLRSQEYKKYQTNKTTGNTDKRAFVETWQSFYRKKLKEVWKPAV

SEQ ID NO: 44560 - protein, 978 aa, synthetic construct
  REGION 1..978: note = engineered CasX variant
QEIKRINKIRRRLVKDSNTKKAGKTGPMKTLLVRVMTPDLRERLENLRKKPENIPQPISNTSRANLNKLLTDYTEMKKAILHVYWEEFQKDPVGLMSRVAQPASKKIDQNKLKPEMDEKGNLTTAGFACSQCGQPLFVYKLEQVSEKGKAYTNYFGRCNVAEHEKLILLAQLKPEKDSDEAVTYSLGKFGQRALDFYSIHVTKESTHPVKPLAQIAGNRYASYPVGKALSDACMGTIASFLSKYQDIIIEHQKVVKGNQKRLESLRELAGKENLEYPSVTLPPQPHTKEGVDAYNEVIARVRMWVNLNLWQKLKLSRDDAKPLLRLKGFPSFPLVERQANEVDWWDMVCNVKKLINEKKEDGKVFWQNLAGYKRQEALRPYLSSEEDRKKGKKFARTQLGDLLLHLEKKHGEDWGKVYDEAWERIDKKVEGLSKHIKLEEERRSEDAQSKAALTDWLRAKASFVIEGLKEADKDEFCRCELKLQKWYGDLRGKPFAIEAENSILDISGFSKQYNCAFIWQKDGVKKLNLYLIINYFKGGKLRFKKIKPEAFEANRFYTVINKKSGEIVIMEVNFNFDDPNLIILPLAFGKRQGREFIWNDLLSLETGSLKLANGRVIEKTLYNRRTRQDEPALFVALTFERREVLDSSNIKPMNLIGVDRGENIPAVIALTDPEGCPLSRFKDSLGNPTHILRIGESYKEKQRTIQAKKEVEQRRAGGYSRKYASKAKNLADDMVRNTARDLLYYAVTQDAMLIFENLSRGFGRQGKRTFMAERQYTRMEDWLTAKLAYEGLPSKTYLSKTLAQYTSKTCSNCGFTITSADYDRVLEKLKKTATGWMTTINGKELKVEGQITYYNRYKRQNVVKDLSVELDRLSEESVNNDISSWTKGRSGEALSLLKKRFSHRPVQEKFVCLNCGFETHADEQAALNIARSWLFLRSQEYKKYQTNKTTGNTDKRAFVETWQSFYRKKLKEVWKPAV

SEQ ID NO: 44561 - protein, 978 aa, synthetic construct
  REGION 1..978: note = engineered CasX variant
QEIKRINKIRRRLVKDSNTKKAGKTGPMKTLLVRVMTPDLRERLENLRKKPENIPQPISNTSRANLNKLLTDYTEMKKAILHVYWEEFQKDPVGLMSRVAQPASKKIDQNKLKPEMDEKGNLTTAGFACSQCGQPLFVYKLEQVSEKGKAYTNYFGRCNVAEHEKLILLAQLKPEKDSDEAVTYSLGKFGQRALDFYSIHVTKESTHPVKPLAQIAGNRYASHPVGKALSDACMGTIASFLSKYQDIIIEHQKVVKGNQKRLESLRELAGKENLEYPSVTLPPQPHTKEGVDAYNEVIARVRMWVNLNLWQKLKLSRDDAKPLLRLKGFPSFPLVERQANEVDWWDMVCNVKKLINEKKEDGKVFWQNLAGYKRQEALRPYLSSEEDRKKGKKFARTQLGDLLLHLEKKHGEDWGKVYDEAWERIDKKVEGLSKHIKLEEERRSEDAQSKAALTDWLRAKASFVIEGLKEADKDEFCRCELKLQKWYGDLRGKPFAIEAENSILDISGFSKQYNCAFIWQKDGVKKLNLYLIINYFKGGKLRFKKIKPEAFEANRFYTVINKKSGEIVIMEVNFNFDDPNLIILPLAFGKRQGREFIWNDLLSLETGSLKLANGRVIEKTLYNRRTRQDEPALFVALTFERREVLDSSNIKPMNLIGVDRGENIPAVIALTDPEGCPLSRFKDSLGNPTHILRIGESYKEKQRTIQAKKEVEQRRAGGYSRKYASKAKNLADDMVRNTARDLLYYAVTQDAMLIFENLSRGFGRQGKRTFMAERQYTRMEDWLTAKLAYEGLPSKTYLSKTLAQYTSKTCSNCGFTITSADYDRVLEKLKKTATGWMTTINGKELKVEGQITYYNRYKRQNVVKDLSVELDRLSEESVNNDISSWTKGRSGEALSLLKKRFSHRPVQEKFVCLNCGFETHADEQAALNIARSWLFLRSQEYKKYQTNKTTGNTDKRAFVETWQSFYRKKLKEVWKPAV

SEQ ID NO: 44562 - protein, 978 aa, synthetic construct
  REGION 1..978: note = engineered CasX variant
QEIKRINKIRRRLVKDSNTKKAGKTGPMKTLLVRVMTPDLRERLENLRKKPENIPQPISNTSRANLNKLLTDYTEMKKAILHVYWEEFQKDPVGLMSRVAQPASKKIDQNKLKPEMDEKGNLTTAGFACSQCGQPLFVYKLEQVSEKGKAYTNYFGRCNVAEHEKLILLAQLKPEKDSDEAVTYSLGKFGQRALDFYSIHVTKESTHPVKPLAQIAGNRYASSPVGKALSDACMGTIASFLSKYQDIIIEHQKVVKGNQKRLESLRELAGKENLEYPSVTLPPQPHTKEGVDAYNEVIARVRMWVNLNLWQKLKLSRDDAKPLLRLKGFPSFPLVERQANEVDWWDMVCNVKKLINEKKEDGKVFWQNLAGYKRQEALRPYLSSEEDRKKGKKFARTQLGDLLLHLEKKHGEDWGKVYDEAWERIDKKVEGLSKHIKLEEERRSEDAQSKAALTDWLRAKASFVIEGLKEADKDEFCRCELKLQKWYGDLRGKPFAIEAENSILDISGFSKQYNCAFIWQKDGVKKLNLYLIINYFKGGKLRFKKIKPEAFEANRFYTVINKKSGEIVIMEVNFNFDDPNLIILPLAFGKRQGREFIWNDLLSLETGSLKLANGRVIEKTLYNRRTRQDEPALFVALTFERREVLDSSNIKPMNLIGVDRGENIPAVIALTDPEGCPLSRFKDSLGNPTHILRIGESYKEKQRTIQAKKEVEQRRAGGYSRKYASKAKNLADDMVRNTARDLLYYAVTQDAMLIFENLSRGFGRQGKRTFMAERQYTRMEDWLTAKLAYEGLPSKTYLSKTLAQYTSKTCSNCGFTITSADYDRVLEKLKKTATGWMTTINGKELKVEGQITYYNRYKRQNVVKDLSVELDRLSEESVNNDISSWTKGRSGEALSLLKKRFSHRPVQEKFVCLNCGFETHADEQAALNIARSWLFLRSQEYKKYQTNKTTGNTDKRAFVETWQSFYRKKLKEVWKPAV

SEQ ID NO: 44563 - protein, 978 aa, synthetic construct
  REGION 1..978: note = engineered CasX variant
QEIKRINKIRRRLVKDSNTKKAGKTGPMKTLLVRVMTPDLRERLENLRKKPENIPQPISNTSRANLNKLLTDYTEMKKAILHVYWEEFQKDPVGLMSRVAQPASKKIDQNKLKPEMDEKGNLTTAGFACSQCGQPLFVYKLEQVSEKGKAYTNYFGRCNVAEHEKLILLAQLKPEKDSDEAVTYSLGKFGQRALDFYSIHVTKESTHPVKPLAQIAGNRYASTPVGKALSDACMGTIASFLSKYQDIIIEHQKVVKGNQKRLESLRELAGKENLEYPSVTLPPQPHTKEGVDAYNEVIARVRMWVNLNLWQKLKLSRDDAKPLLRLKGFPSFPLVERQANEVDWWDMVCNVKKLINEKKEDGKVFWQNLAGYKRQEALRPYLSSEEDRKKGKKFARTQLGDLLLHLEKKHGEDWGKVYDEAWERIDKKVEGLSKHIKLEEERRSEDAQSKAALTDWLRAKASFVIEGLKEADKDEFCRCELKLQKWYGDLRGKPFAIEAENSILDISGFSKQYNCAFIWQKDGVKKLNLYLIINYFKGGKLRFKKIKPEAFEANRFYTVINKKSGEIVIMEVNFNFDDPNLIILPLAFGKRQGREFIWNDLLSLETGSLKLANGRVIEKTLYNRRTRQDEPALFVALTFERREVLDSSNIKPMNLIGVDRGENIPAVIALTDPEGCPLSRFKDSLGNPTHILRIGESYKEKQRTIQAKKEVEQRRAGGYSRKYASKAKNLADDMVRNTARDLLYYAVTQDAMLIFENLSRGFGRQGKRTFMAERQYTRMEDWLTAKLAYEGLPSKTYLSKTLAQYTSKTCSNCGFTITSADYDRVLEKLKKTATGWMTTINGKELKVEGQITYYNRYKRQNVVKDLSVELDRLSEESVNNDISSWTKGRSGEALSLLKKRFSHRPVQEKFVCLNCGFETHADEQAALNIARSWLFLRSQEYKKYQTNKTTGNTDKRAFVETWQSFYRKKLKEVWKPAV

SEQ ID NO: 44564 - protein, 978 aa, synthetic construct
  REGION 1..978: note = engineered CasX variant
QEIKRINKIRRRLVKDSNTKKAGKTGPMKTLLVRVMTPDLRERLENLRKKPENIPQPISNTSRANLNKLLTDYTEMKKAILHVYWEEFQKDPVGLMSRVAQPASKKIDQNKLKPEMDEKGNLTTAGFACSQCGQPLFVYKLEQVSEKGKAYTNYFGRCNVAEHEKLILLAQLKPEKDSDEAVTYSLGKFGQRALDFYSIHVTKESTHPVKPLAQIAGNRYASAPVGKALSDACMGTIASFLSKYQDIIIEHQKVVKGNQKRLESLRELAGKENLEYPSVTLPPQPHTKEGVDAYNEVIARVRMWVNLNLWQKLKLSRDDAKPLLRLKGFPSFPLVERQANEVDWWDMVCNVKKLINEKKEDGKVFWQNLAGYKRQEALRPYLSSEEDRKKGKKFARTQLGDLLLHLEKKHGEDWGKVYDEAWERIDKKVEGLSKHIKLEEERRSEDAQSKAALTDWLRAKASFVIEGLKEADKDEFCRCELKLQKWYGDLRGKPFAIEAENSILDISGFSKQYNCAFIWQKDGVKKLNLYLIINYFKGGKLRFKKIKPEAFEANRFYTVINKKSGEIVIMEVNFNFDDPNLIILPLAFGKRQGREFIWNDLLSLETGSLKLANGRVIEKTLYNRRTRQDEPALFVALTFERREVLDSSNIKPMNLIGVDRGENIPAVIALTDPEGCPLSRFKDSLGNPTHILRIGESYKEKQRTIQAKKEVEQRRAGGYSRKYASKAKNLADDMVRNTARDLLYYAVTQDAMLIFENLSRGFGRQGKRTFMAERQYTRMEDWLTAKLAYEGLPSKTYLSKTLAQYTSKTCSNCGFTITSADYDRVLEKLKKTATGWMTTINGKELKVEGQITYYNRYKRQNVVKDLSVELDRLSEESVNNDISSWTKGRSGEALSLLKKRFSHRPVQEKFVCLNCGFETHADEQAALNIARSWLFLRSQEYKKYQTNKTTGNTDKRAFVETWQSFYRKKLKEVWKPAV

SEQ ID NO: 44565 - protein, 978 aa, synthetic construct
  REGION 1..978: note = engineered CasX variant
QEIKRINKIRRRLVKDSNTKKAGKTGPMKTLLVRVMTPDLRERLENLRKKPENIPQPISNTSRANLNKLLTDYTEMKKAILHVYWEEFQKDPVGLMSRVAQPASKKIDQNKLKPEMDEKGNLTTAGFACSQCGQPLFVYKLEQVSEKGKAYTNYFGRCNVAEHEKLILLAQLKPEKDSDEAVTYSLGKFGQRALDFYSIHVTKESTHPVKPLAQIAGNRYASVPVGKALSDACMGTIASFLSKYQDIIIEHQKVVKGNQKRLESLRELAGKENLEYPSVTLPPQPHTKEGVDAYNEVIARVRMWVNLNLWQKLKLSRDDAKPLLRLKGFPSFPLVERQANEVDWWDMVCNVKKLINEKKEDGKVFWQNLAGYKRQEALRPYLSSEEDRKKGKKFARTQLGDLLLHLEKKHGEDWGKVYDEAWERIDKKVEGLSKHIKLEEERRSEDAQSKAALTDWLRAKASFVIEGLKEADKDEFCRCELKLQKWYGDLRGKPFAIEAENSILDISGFSKQYNCAFIWQKDGVKKLNLYLIINYFKGGKLRFKKIKPEAFEANRFYTVINKKSGEIVIMEVNFNFDDPNLIILPLAFGKRQGREFIWNDLLSLETGSLKLANGRVIEKTLYNRRTRQDEPALFVALTFERREVLDSSNIKPMNLIGVDRGENIPAVIALTDPEGCPLSRFKDSLGNPTHILRIGESYKEKQRTIQAKKEVEQRRAGGYSRKYASKAKNLADDMVRNTARDLLYYAVTQDAMLIFENLSRGFGRQGKRTFMAERQYTRMEDWLTAKLAYEGLPSKTYLSKTLAQYTSKTCSNCGFTITSADYDRVLEKLKKTATGWMTTINGKELKVEGQITYYNRYKRQNVVKDLSVELDRLSEESVNNDISSWTKGRSGEALSLLKKRFSHRPVQEKFVCLNCGFETHADEQAALNIARSWLFLRSQEYKKYQTNKTTGNTDKRAFVETWQSFYRKKLKEVWKPAV

SEQ ID NO: 44566 - protein, 978 aa, synthetic construct
  REGION 1..978: note = engineered CasX variant
QEIKRINKIRRRLVKDSNTKKAGKTGPMKTLLVRVMTPDLRERLENLRKKPENIPQPISNTSRANLNKLLTDYTEMKKAILHVYWEEFQKDPVGLMSRVAQPASKKIDQNKLKPEMDEKGNLTTAGFACSQCGQPLFVYKLEQVSEKGKAYTNYFGRCNVAEHEKLIKLAQLKPEKDSDEAVTYSLGKFGQRALDFYSIHVTKESTHPVKPLAQIAGNRYASGPVGKALSDACMGTIASFLSKYQDIIIEHQKVVKGNQKRLESLRELAGKENLEYPSVTLPPQPHTKEGVDAYNEVIARVRMWVNLNLWQKLKLSRDDAKPLLRLKGFPSFPLVERQANEVDWWDMVCNVKKLINEKKEDGKVFWQNLAGYKRQEALRPYLSSEEDRKKGKKFARTQLGDLLLHLEKKHGEDWGKVYDEAWERIDKKVEGLSKHIKLEEERRSEDAQSKAALTDWLRAKASFVIEGLKEADKDEFCRCELKLQKWYGDLRGKPFAIEAENSILDISGFSKQYNCAFIWQKDGVKKLNLYLIINYFKGGKLRFKKIKPEAFEANRFYTVINKKSGEIVIMEVNFNFDDPNLIILPLAFGKRQGREFIWNDLLSLETGSLKLANGRVIEKTLYNRRTRQDEPALFVALTFERREVLDSSNIKPMNLIGVDRGENIPAVIALTDPEGCPLSRFKDSLGNPTHILRIGESYKEKQRTIQAKKEVEQRRAGGYSRKYASKAKNLADDMVRNTARDLLYYAVTQDAMLIFENLSRGFGRQGKRTFMAERQYTRMEDWLTAKLAYEGLPSKTYLSKTLAQYTSKTCSNCGFTITSADYDRVLEKLKKTATGWMTTINGKELKVEGQITYYNRYKRQNVVKDLSVELDRLSEESVNNDISSWTKGRSGEALSLLKKRFSHRPVQEKFVCLNCGFETHADEQAALNIARSWLFLRSQEYKKYQTNKTTGNTDKRAFVETWQSFYRKKLKEVWKPAV

SEQ ID NO: 44567 - protein, 977 aa, synthetic construct
  REGION 1..977: note = engineered CasX variant
QEIKRINKIRRRLVKDSNTKKAGKTGPMKTLLVRVMTPDLRERLENLRKKPENIPQPISNTSRANLNKLLTDYTEMKKAILHVYWEEFQKDPVGLMSRVAQPASKKIDQNKLKPEMDEKGNLTTAGFACSQCGQPLFVYKLEQVSEKGKAYTNYFGRCNVAEHEKLILLAQLKPEKDSDEAVTYSLGKFGQRALDFYSIHVTKESTHPVKPLAQIAGNRYASPVGKALSDACMGTIASFLSKYQDIIIEHQKVVKGNQKRLESLRELAGKENLEYPSVTLPPQPHTKEGVDAYNEVIARVRMWVNLNLWQKLKLSRDDAKPLLRLKGFPSFPLVERQANEVDWWDMVCNVKKLINEKKEDGKVFWQNLAGYKRQEALRPYLSSEEDRKKGKKFARTQLGDLLLHLEKKHGEDWGKVYDEAWERIDKKVEGLSKHIKLEEERRSEDAQSKAALTDWLRAKASFVIEGLKEADKDEFCRCELKLQKWYGDLRGKPFAIEAENSILDISGFSKQYNCAFIWQKDGVKKLNLYLIINYFKGGKLRFKKIKPEAFEANRFYTVINKKSGEIVIMEVNFNFDDPNLIILPLAFGKRQGREFIWNDLLSLETGSLKLANGRVIEKTLYNRRTRQDEPALFVALTFERREVLDSSNIKPMNLIGVDRGENIPAVIALTDPEGCPLSRFKDSLGNPTHILRIGESYKEKQRTIQAKKEVEQRRAGGYSRKYASKAKNLADDMVRNTARDLLYYAVTQDAMLIFENLSRGFGRQGKRTFMAERQYTRMEDWLTAKLAYEGLPSKTYLSKTLAQYTSKTCSNCGFTITSADYDRVLEKLKKTATGWMTTINGKELKVEGQITYYNRYKRQNVVKDLSVELDRLSEESVNNDISSWTKGRSGEALSLLKKRFSHRPVQEKFVCLNCGFETHADEQAALNIARSWLFLRSQEYKKYQTNKTTGNTDKRAFVETWQSFYRKKLKEVWKPAV

SEQ ID NO: 44568 - protein, 979 aa, synthetic construct
  REGION 1..979: note = engineered CasX variant
QEIKRINKIRRRLVKDSNTKKAGKTGPMKTLLVRVMTPDLRERLENLRKKPENIPQPISNTSRANLNKLLTDYTEMKKAILHVYWEEFQKDPVGLMSRVAQPASKKIDQNKLKPEMDEKGNLTTAGFACSQCGQPLFVYKLEQVSEKGKAYTNYFGRCNVAEHEKLILLAQLKPEKDSDEAVTYSLGKFGQRALDFYSIHVTKESTHPVKPLAQIAGNRYASYPVGKALSGACMGTIASFLSKYQDIIIEHQKVVKGNQKRLESLRELAGKENLEYPSVTLPPQPHTKEGVDAYNEVIARVRMWVNLNLWQKLKLSRDDAKPLLRLKGFPSFPLVERQANEVDWWDMVCNVKKLINEKKEDGKVFWQNLAGYKRQEALRPYLSSEEDRKKGKKFARYQLGDLLLHLEKKHEGEDWGKVYDEAWERIDKKVEGLSKHIKLEEERRSEDAQSKAALTDWLRAKASFVIEGLKEADKDEFCRCELKLQKWYGDLRGKPFAIEAENSILDISGFSKQYNCAFIWQKDGVKKLNLYLIINYFKGGKLRFKKIKPEAFEANRFYTVINKKSGEIVPMEVNFNFDDPNLIILPLAFGKRQGREFIWNDLLSLETGSLKLANGRVIEKTLYNRRTRQDEPALFVALTFERREVLDSSNIKPMNLIGVDRGENIPAVIALTDPEGCPLSRFKDSLGNPTHILRIGESYKEKQRTIQAKKEVEQRRAGGYSRKYASKAKNLADDMVRNTARDLLYYAVTQDAMLIFENLSRGFGRQGKRTFMAERQYTRMEDWLTAKLAYEGLPSKTYLSKTLAQYTSKTCSNCGFTITSADYDRVLEKLKKTATGWMTTINGKELKVEGQITYYNRYKRQNVVKDLSVELDRLSEESVNNDISSWTKGRSGEALSLLKKRFSHRPVQEKFVCLNCGFETHADEQAALNIARSWLFLRSQEYKKYQTNKTTGNTDKRAFVETWQSFYRKKLKEVWKPAV

SEQ ID NO: 44569 - protein, 979 aa, synthetic construct
  REGION 1..979: note = engineered CasX variant
QEIKRINKIRRRLVKDSNTKKAGKTGPMKTLLVRVMTPDLRERLENLRKKPENIPQPISNTSRANLNKLLTDYTEMKKAILHVYWEEFQKDPVGLMSRVAQPASKKIDQNKLKPEMDEKGNLTTAGFACSQCGQPLFVYKLEQVSEKGKAYTNYFGRCNVAEHEKLILLAQLKPEKDSDEAVTYSLGKFGQRALDFYSIHVTKESTHPVKPLAQIAGNRYASHPVGKALSGACMGTIASFLSKYQDIIIEHQKVVKGNQKRLESLRELAGKENLEYPSVTLPPQPHTKEGVDAYNEVIARVRMWVNLNLWQKLKLSRDDAKPLLRLKGFPSFPLVERQANEVDWWDMVCNVKKLINEKKEDGKVFWQNLAGYKRQEALRPYLSSEEDRKKGKKFARYQLGDLLLHLEKKHEGEDWGKVYDEAWERIDKKVEGLSKHIKLEEERRSEDAQSKAALTDWLRAKASFVIEGLKEADKDEFCRCELKLQKWYGDLRGKPFAIEAENSILDISGFSKQYNCAFIWQKDGVKKLNLYLIINYFKGGKLRFKKIKPEAFEANRFYTVINKKSGEIVPMEVNFNFDDPNLIILPLAFGKRQGREFIWNDLLSLETGSLKLANGRVIEKTLYNRRTRQDEPALFVALTFERREVLDSSNIKPMNLIGVDRGENIPAVIALTDPEGCPLSRFKDSLGNPTHILRIGESYKEKQRTIQAKKEVEQRRAGGYSRKYASKAKNLADDMVRNTARDLLYYAVTQDAMLIFENLSRGFGRQGKRTFMAERQYTRMEDWLTAKLAYEGLPSKTYLSKTLAQYTSKTCSNCGFTITSADYDRVLEKLKKTATGWMTTINGKELKVEGQITYYNRYKRQNVVKDLSVELDRLSEESVNNDISSWTKGRSGEALSLLKKRFSHRPVQEKFVCLNCGFETHADEQAALNIARSWLFLRSQEYKKYQTNKTTGNTDKRAFVETWQSFYRKKLKEVWKPAV

SEQ ID NO: 44570 - protein, 979 aa, synthetic construct
  REGION 1..979: note = engineered CasX variant
QEIKRINKIRRRLVKDSNTKKAGKTGPMKTLLVRVMTPDLRERLENLRKKPENIPQPISNTSRANLNKLLTDYTEMKKAILHVYWEEFQKDPVGLMSRVAQPASKKIDQNKLKPEMDEKGNLTTAGFACSQCGQPLFVYKLEQVSEKGKAYTNYFGRCNVAEHEKLILLAQLKPEKDSDEAVTYSLGKFGQRALDFYSIHVTKESTHPVKPLAQIAGNRYASSPVGKALSGACMGTIASFLSKYQDIIIEHQKVVKGNQKRLESLRELAGKENLEYPSVTLPPQPHTKEGVDAYNEVIARVRMWVNLNLWQKLKLSRDDAKPLLRLKGFPSFPLVERQANEVDWWDMVCNVKKLINEKKEDGKVFWQNLAGYKRQEALRPYLSSEEDRKKGKKFARYQLGDLLLHLEKKHEGEDWGKVYDEAWERIDKKVEGLSKHIKLEEERRSEDAQSKAALTDWLRAKASFVIEGLKEADKDEFCRCELKLQKWYGDLRGKPFAIEAENSILDISGFSKQYNCAFIWQKDGVKKLNLYLIINYFKGGKLRFKKIKPEAFEANRFYTVINKKSGEIVPMEVNFNFDDPNLIILPLAFGKRQGREFIWNDLLSLETGSLKLANGRVIEKTLYNRRTRQDEPALFVALTFERREVLDSSNIKPMNLIGVDRGENIPAVIALTDPEGCPLSRFKDSLGNPTHILRIGESYKEKQRTIQAKKEVEQRRAGGYSRKYASKAKNLADDMVRNTARDLLYYAVTQDAMLIFENLSRGFGRQGKRTFMAERQYTRMEDWLTAKLAYEGLPSKTYLSKTLAQYTSKTCSNCGFTITSADYDRVLEKLKKTATGWMTTINGKELKVEGQITYYNRYKRQNVVKDLSVELDRLSEESVNNDISSWTKGRSGEALSLLKKRFSHRPVQEKFVCLNCGFETHADEQAALNIARSWLFLRSQEYKKYQTNKTTGNTDKRAFVETWQSFYRKKLKEVWKPAV

SEQ ID NO: 44571 - protein, 979 aa, synthetic construct
  REGION 1..979: note = engineered CasX variant
QEIKRINKIRRRLVKDSNTKKAGKTGPMKTLLVRVMTPDLRERLENLRKKPENIPQPISNTSRANLNKLLTDYTEMKKAILHVYWEEFQKDPVGLMSRVAQPASKKIDQNKLKPEMDEKGNLTTAGFACSQCGQPLFVYKLEQVSEKGKAYTNYFGRCNVAEHEKLILLAQLKPEKDSDEAVTYSLGKFGQRALDFYSIHVTKESTHPVKPLAQIAGNRYASTPVGKALSGACMGTIASFLSKYQDIIIEHQKVVKGNQKRLESLRELAGKENLEYPSVTLPPQPHTKEGVDAYNEVIARVRMWVNLNLWQKLKLSRDDAKPLLRLKGFPSFPLVERQANEVDWWDMVCNVKKLINEKKEDGKVFWQNLAGYKRQEALRPYLSSEEDRKKGKKFARYQLGDLLLHLEKKHEGEDWGKVYDEAWERIDKKVEGLSKHIKLEEERRSEDAQSKAALTDWLRAKASFVIEGLKEADKDEFCRCELKLQKWYGDLRGKPFAIEAENSILDISGFSKQYNCAFIWQKDGVKKLNLYLIINYFKGGKLRFKKIKPEAFEANRFYTVINKKSGEIVPMEVNFNFDDPNLIILPLAFGKRQGREFIWNDLLSLETGSLKLANGRVIEKTLYNRRTRQDEPALFVALTFERREVLDSSNIKPMNLIGVDRGENIPAVIALTDPEGCPLSRFKDSLGNPTHILRIGESYKEKQRTIQAKKEVEQRRAGGYSRKYASKAKNLADDMVRNTARDLLYYAVTQDAMLIFENLSRGFGRQGKRTFMAERQYTRMEDWLTAKLAYEGLPSKTYLSKTLAQYTSKTCSNCGFTITSADYDRVLEKLKKTATGWMTTINGKELKVEGQITYYNRYKRQNVVKDLSVELDRLSEESVNNDISSWTKGRSGEALSLLKKRFSHRPVQEKFVCLNCGFETHADEQAALNIARSWLFLRSQEYKKYQTNKTTGNTDKRAFVETWQSFYRKKLKEVWKPAV

SEQ ID NO: 44572 - protein, 979 aa, synthetic construct
  REGION 1..979: note = engineered CasX variant
QEIKRINKIRRRLVKDSNTKKAGKTGPMKTLLVRVMTPDLRERLENLRKKPENIPQPISNTSRANLNKLLTDYTEMKKAILHVYWEEFQKDPVGLMSRVAQPASKKIDQNKLKPEMDEKGNLTTAGFACSQCGQPLFVYKLEQVSEKGKAYTNYFGRCNVAEHEKLILLAQLKPEKDSDEAVTYSLGKFGQRALDFYSIHVTKESTHPVKPLAQIAGNRYASAPVGKALSGACMGTIASFLSKYQDIIIEHQKVVKGNQKRLESLRELAGKENLEYPSVTLPPQPHTKEGVDAYNEVIARVRMWVNLNLWQKLKLSRDDAKPLLRLKGFPSFPLVERQANEVDWWDMVCNVKKLINEKKEDGKVFWQNLAGYKRQEALRPYLSSEEDRKKGKKFARYQLGDLLLHLEKKHEGEDWGKVYDEAWERIDKKVEGLSKHIKLEEERRSEDAQSKAALTDWLRAKASFVIEGLKEADKDEFCRCELKLQKWYGDLRGKPFAIEAENSILDISGFSKQYNCAFIWQKDGVKKLNLYLIINYFKGGKLRFKKIKPEAFEANRFYTVINKKSGEIVPMEVNFNFDDPNLIILPLAFGKRQGREFIWNDLLSLETGSLKLANGRVIEKTLYNRRTRQDEPALFVALTFERREVLDSSNIKPMNLIGVDRGENIPAVIALTDPEGCPLSRFKDSLGNPTHILRIGESYKEKQRTIQAKKEVEQRRAGGYSRKYASKAKNLADDMVRNTARDLLYYAVTQDAMLIFENLSRGFGRQGKRTFMAERQYTRMEDWLTAKLAYEGLPSKTYLSKTLAQYTSKTCSNCGFTITSADYDRVLEKLKKTATGWMTTINGKELKVEGQITYYNRYKRQNVVKDLSVELDRLSEESVNNDISSWTKGRSGEALSLLKKRFSHRPVQEKFVCLNCGFETHADEQAALNIARSWLFLRSQEYKKYQTNKTTGNTDKRAFVETWQSFYRKKLKEVWKPAV

SEQ ID NO: 44573 - protein, 979 aa, synthetic construct
  REGION 1..979: note = engineered CasX variant
QEIKRINKIRRRLVKDSNTKKAGKTGPMKTLLVRVMTPDLRERLENLRKKPENIPQPISNTSRANLNKLLTDYTEMKKAILHVYWEEFQKDPVGLMSRVAQPASKKIDQNKLKPEMDEKGNLTTAGFACSQCGQPLFVYKLEQVSEKGKAYTNYFGRCNVAEHEKLILLAQLKPEKDSDEAVTYSLGKFGQRALDFYSIHVTKESTHPVKPLAQIAGNRYASVPVGKALSGACMGTIASFLSKYQDIIIEHQKVVKGNQKRLESLRELAGKENLEYPSVTLPPQPHTKEGVDAYNEVIARVRMWVNLNLWQKLKLSRDDAKPLLRLKGFPSFPLVERQANEVDWWDMVCNVKKLINEKKEDGKVFWQNLAGYKRQEALRPYLSSEEDRKKGKKFARYQLGDLLLHLEKKHEGEDWGKVYDEAWERIDKKVEGLSKHIKLEEERRSEDAQSKAALTDWLRAKASFVIEGLKEADKDEFCRCELKLQKWYGDLRGKPFAIEAENSILDISGFSKQYNCAFIWQKDGVKKLNLYLIINYFKGGKLRFKKIKPEAFEANRFYTVINKKSGEIVPMEVNFNFDDPNLIILPLAFGKRQGREFIWNDLLSLETGSLKLANGRVIEKTLYNRRTRQDEPALFVALTFERREVLDSSNIKPMNLIGVDRGENIPAVIALTDPEGCPLSRFKDSLGNPTHILRIGESYKEKQRTIQAKKEVEQRRAGGYSRKYASKAKNLADDMVRNTARDLLYYAVTQDAMLIFENLSRGFGRQGKRTFMAERQYTRMEDWLTAKLAYEGLPSKTYLSKTLAQYTSKTCSNCGFTITSADYDRVLEKLKKTATGWMTTINGKELKVEGQITYYNRYKRQNVVKDLSVELDRLSEESVNNDISSWTKGRSGEALSLLKKRFSHRPVQEKFVCLNCGFETHADEQAALNIARSWLFLRSQEYKKYQTNKTTGNTDKRAFVETWQSFYRKKLKEVWKPAV

SEQ ID NO: 44574 - protein, 979 aa, synthetic construct
  REGION 1..979: note = engineered CasX variant
QEIKRINKIRRRLVKDSNTKKAGKTGPMKTLLVRVMTPDLRERLENLRKKPENIPQPISNTSRANLNKLLTDYTEMKKAILHVYWEEFQKDPVGLMSRVAQPASKKIDQNKLKPEMDEKGNLTTAGFACSQCGQPLFVYKLEQVSEKGKAYTNYFGRCNVAEHEKLIKLAQLKPEKDSDEAVTYSLGKFGQRALDFYSIHVTKESTHPVKPLAQIAGNRYASGPVGKALSGACMGTIASFLSKYQDIIIEHQKVVKGNQKRLESLRELAGKENLEYPSVTLPPQPHTKEGVDAYNEVIARVRMWVNLNLWQKLKLSRDDAKPLLRLKGFPSFPLVERQANEVDWWDMVCNVKKLINEKKEDGKVFWQNLAGYKRQEALRPYLSSEEDRKKGKKFARYQLGDLLLHLEKKHEGEDWGKVYDEAWERIDKKVEGLSKHIKLEEERRSEDAQSKAALTDWLRAKASFVIEGLKEADKDEFCRCELKLQKWYGDLRGKPFAIEAENSILDISGFSKQYNCAFIWQKDGVKKLNLYLIINYFKGGKLRFKKIKPEAFEANRFYTVINKKSGEIVPMEVNFNFDDPNLIILPLAFGKRQGREFIWNDLLSLETGSLKLANGRVIEKTLYNRRTRQDEPALFVALTFERREVLDSSNIKPMNLIGVDRGENIPAVIALTDPEGCPLSRFKDSLGNPTHILRIGESYKEKQRTIQAKKEVEQRRAGGYSRKYASKAKNLADDMVRNTARDLLYYAVTQDAMLIFENLSRGFGRQGKRTFMAERQYTRMEDWLTAKLAYEGLPSKTYLSKTLAQYTSKTCSNCGFTITSADYDRVLEKLKKTATGWMTTINGKELKVEGQITYYNRYKRQNVVKDLSVELDRLSEESVNNDISSWTKGRSGEALSLLKKRFSHRPVQEKFVCLNCGFETHADEQAALNIARSWLFLRSQEYKKYQTNKTTGNTDKRAFVETWQSFYRKKLKEVWKPAV

SEQ ID NO: 44575 - protein, 978 aa, synthetic construct
  REGION 1..978: note = engineered CasX variant
QEIKRINKIRRRLVKDSNTKKAGKTGPMKTLLVRVMTPDLRERLENLRKKPENIPQPISNTSRANLNKLLTDYTEMKKAILHVYWEEFQKDPVGLMSRVAQPASKKIDQNKLKPEMDEKGNLTTAGFACSQCGQPLFVYKLEQVSEKGKAYTNYFGRCNVAEHEKLILLAQLKPEKDSDEAVTYSLGKFGQRALDFYSIHVTKESTHPVKPLAQIAGNRYASPVGKALSGACMGTIASFLSKYQDIIIEHQKVVKGNQKRLESLRELAGKENLEYPSVTLPPQPHTKEGVDAYNEVIARVRMWVNLNLWQKLKLSRDDAKPLLRLKGFPSFPLVERQANEVDWWDMVCNVKKLINEKKEDGKVFWQNLAGYKRQEALRPYLSSEEDRKKGKKFARYQLGDLLLHLEKKHEGEDWGKVYDEAWERIDKKVEGLSKHIKLEEERRSEDAQSKAALTDWLRAKASFVIEGLKEADKDEFCRCELKLQKWYGDLRGKPFAIEAENSILDISGFSKQYNCAFIWQKDGVKKLNLYLIINYFKGGKLRFKKIKPEAFEANRFYTVINKKSGEIVPMEVNFNFDDPNLIILPLAFGKRQGREFIWNDLLSLETGSLKLANGRVIEKTLYNRRTRQDEPALFVALTFERREVLDSSNIKPMNLIGVDRGENIPAVIALTDPEGCPLSRFKDSLGNPTHILRIGESYKEKQRTIQAKKEVEQRRAGGYSRKYASKAKNLADDMVRNTARDLLYYAVTQDAMLIFENLSRGFGRQGKRTFMAERQYTRMEDWLTAKLAYEGLPSKTYLSKTLAQYTSKTCSNCGFTITSADYDRVLEKLKKTATGWMTTINGKELKVEGQITYYNRYKRQNVVKDLSVELDRLSEESVNNDISSWTKGRSGEALSLLKKRFSHRPVQEKFVCLNCGFETHADEQAALNIARSWLFLRSQEYKKYQTNKTTGNTDKRAFVETWQSFYRKKLKEVWKPAV

SEQ ID NO: 44576 - protein, 979 aa, synthetic construct
  REGION 1..979: note = engineered CasX variant
QEIKRINKIRRRLVKDSNTKKAGKTGPMKTLLVRVMTPDLRERLENLRKKPENIPQPISNTSRANLNKLLTDYTEMKKAILHVYWEEFQKDPVGLMSRVAQPASKKIDQNKLKPEMDEKGNLTTAGFACSQCGQPLFVYKLEQVSEKGKAYTNYFGRCNVAEHEKLILLAQLKPEKDSDEAVTYSLGKFGQRALDFYSIHVTKESTHPVKPLAQIAGNRYASYPVGKALSDACMGTIASFLSKYQDIIIEHQKVVKGNQKRLESLRELAGKENLEYPSVTLPPQPHTKEGVDAYNEVIARVRMWVNLNLWQKLKLSRDDAKPLLRLKNFPSFPLVERQANEVDWWDMVCNVKKLINEKKEDGKVFWQNLAGYKRQEALRPYLSSEEDRKKGKKFARYQLGDLLLHLEKKHEGEDWGKVYDEAWERIDKKVEGLSKHIKLEEERRSEDAQSKAALTDWLRAKASFVIEGLKEADKDEFCRCELKLQKWYGDLRGKPFAIEAENSILDISGFSKQYNCAFIWQKDGVKKLNLYLIINYFKGGKLRFKKIKPEAFEANRFYTVINKKSGEIVPMEVNFNFDDPNLIILPLAFGKRQGREFIWNDLLSLETGSLKLANGRVIEKTLYNRRTRQDEPALFVALTFERREVLDSSNIKPMNLIGVDRGENIPAVIALTDPEGCPLSRFKDSLGNPTHILRIGESYKEKQRTIQAKKEVEQRRAGGYSRKYASKAKNLADDMVRNTARDLLYYAVTQDAMLIFENLSRGFGRQGKRTFMAERQYTRMEDWLTAKLAYEGLPSKTYLSKTLAQYTSKTCSNCGFTITSADYDRVLEKLKKTATGWMTTINGKELKVEGQITYYNRYKRQNVVKDLSVELDRLSEESVNNDISSWTKGRSGEALSLLKKRFSHRPVQEKFVCLNCGFETHADEQAALNIARSWLFLRSQEYKKYQTNKTTGNTDKRAFVETWQSFYRKKLKEVWKPAV

SEQ ID NO: 44577 - protein, 979 aa, synthetic construct
  REGION 1..979: note = engineered CasX variant
QEIKRINKIRRRLVKDSNTKKAGKTGPMKTLLVRVMTPDLRERLENLRKKPENIPQPISNTSRANLNKLLTDYTEMKKAILHVYWEEFQKDPVGLMSRVAQPASKKIDQNKLKPEMDEKGNLTTAGFACSQCGQPLFVYKLEQVSEKGKAYTNYFGRCNVAEHEKLILLAQLKPEKDSDEAVTYSLGKFGQRALDFYSIHVTKESTHPVKPLAQIAGNRYASHPVGKALSDACMGTIASFLSKYQDIIIEHQKVVKGNQKRLESLRELAGKENLEYPSVTLPPQPHTKEGVDAYNEVIARVRMWVNLNLWQKLKLSRDDAKPLLRLKNFPSFPLVERQANEVDWWDMVCNVKKLINEKKEDGKVFWQNLAGYKRQEALRPYLSSEEDRKKGKKFARYQLGDLLLHLEKKHEGEDWGKVYDEAWERIDKKVEGLSKHIKLEEERRSEDAQSKAALTDWLRAKASFVIEGLKEADKDEFCRCELKLQKWYGDLRGKPFAIEAENSILDISGFSKQYNCAFIWQKDGVKKLNLYLIINYFKGGKLRFKKIKPEAFEANRFYTVINKKSGEIVPMEVNFNFDDPNLIILPLAFGKRQGREFIWNDLLSLETGSLKLANGRVIEKTLYNRRTRQDEPALFVALTFERREVLDSSNIKPMNLIGVDRGENIPAVIALTDPEGCPLSRFKDSLGNPTHILRIGESYKEKQRTIQAKKEVEQRRAGGYSRKYASKAKNLADDMVRNTARDLLYYAVTQDAMLIFENLSRGFGRQGKRTFMAERQYTRMEDWLTAKLAYEGLPSKTYLSKTLAQYTSKTCSNCGFTITSADYDRVLEKLKKTATGWMTTINGKELKVEGQITYYNRYKRQNVVKDLSVELDRLSEESVNNDISSWTKGRSGEALSLLKKRFSHRPVQEKFVCLNCGFETHADEQAALNIARSWLFLRSQEYKKYQTNKTTGNTDKRAFVETWQSFYRKKLKEVWKPAV

SEQ ID NO: 44578 - protein, 979 aa, synthetic construct
  REGION 1..979: note = engineered CasX variant
QEIKRINKIRRRLVKDSNTKKAGKTGPMKTLLVRVMTPDLRERLENLRKKPENIPQPISNTSRANLNKLLTDYTEMKKAILHVYWEEFQKDPVGLMSRVAQPASKKIDQNKLKPEMDEKGNLTTAGFACSQCGQPLFVYKLEQVSEKGKAYTNYFGRCNVAEHEKLILLAQLKPEKDSDEAVTYSLGKFGQRALDFYSIHVTKESTHPVKPLAQIAGNRYASSPVGKALSDACMGTIASFLSKYQDIIIEHQKVVKGNQKRLESLRELAGKENLEYPSVTLPPQPHTKEGVDAYNEVIARVRMWVNLNLWQKLKLSRDDAKPLLRLKNFPSFPLVERQANEVDWWDMVCNVKKLINEKKEDGKVFWQNLAGYKRQEALRPYLSSEEDRKKGKKFARYQLGDLLLHLEKKHEGEDWGKVYDEAWERIDKKVEGLSKHIKLEEERRSEDAQSKAALTDWLRAKASFVIEGLKEADKDEFCRCELKLQKWYGDLRGKPFAIEAENSILDISGFSKQYNCAFIWQKDGVKKLNLYLIINYFKGGKLRFKKIKPEAFEANRFYTVINKKSGEIVPMEVNFNFDDPNLIILPLAFGKRQGREFIWNDLLSLETGSLKLANGRVIEKTLYNRRTRQDEPALFVALTFERREVLDSSNIKPMNLIGVDRGENIPAVIALTDPEGCPLSRFKDSLGNPTHILRIGESYKEKQRTIQAKKEVEQRRAGGYSRKYASKAKNLADDMVRNTARDLLYYAVTQDAMLIFENLSRGFGRQGKRTFMAERQYTRMEDWLTAKLAYEGLPSKTYLSKTLAQYTSKTCSNCGFTITSADYDRVLEKLKKTATGWMTTINGKELKVEGQITYYNRYKRQNVVKDLSVELDRLSEESVNNDISSWTKGRSGEALSLLKKRFSHRPVQEKFVCLNCGFETHADEQAALNIARSWLFLRSQEYKKYQTNKTTGNTDKRAFVETWQSFYRKKLKEVWKPAV

SEQ ID NO: 44579 - protein, 979 aa, synthetic construct
  REGION 1..979: note = engineered CasX variant
QEIKRINKIRRRLVKDSNTKKAGKTGPMKTLLVRVMTPDLRERLENLRKKPENIPQPISNTSRANLNKLLTDYTEMKKAILHVYWEEFQKDPVGLMSRVAQPASKKIDQNKLKPEMDEKGNLTTAGFACSQCGQPLFVYKLEQVSEKGKAYTNYFGRCNVAEHEKLILLAQLKPEKDSDEAVTYSLGKFGQRALDFYSIHVTKESTHPVKPLAQIAGNRYASTPVGKALSDACMGTIASFLSKYQDIIIEHQKVVKGNQKRLESLRELAGKENLEYPSVTLPPQPHTKEGVDAYNEVIARVRMWVNLNLWQKLKLSRDDAKPLLRLKNFPSFPLVERQANEVDWWDMVCNVKKLINEKKEDGKVFWQNLAGYKRQEALRPYLSSEEDRKKGKKFARYQLGDLLLHLEKKHEGEDWGKVYDEAWERIDKKVEGLSKHIKLEEERRSEDAQSKAALTDWLRAKASFVIEGLKEADKDEFCRCELKLQKWYGDLRGKPFAIEAENSILDISGFSKQYNCAFIWQKDGVKKLNLYLIINYFKGGKLRFKKIKPEAFEANRFYTVINKKSGEIVPMEVNFNFDDPNLIILPLAFGKRQGREFIWNDLLSLETGSLKLANGRVIEKTLYNRRTRQDEPALFVALTFERREVLDSSNIKPMNLIGVDRGENIPAVIALTDPEGCPLSRFKDSLGNPTHILRIGESYKEKQRTIQAKKEVEQRRAGGYSRKYASKAKNLADDMVRNTARDLLYYAVTQDAMLIFENLSRGFGRQGKRTFMAERQYTRMEDWLTAKLAYEGLPSKTYLSKTLAQYTSKTCSNCGFTITSADYDRVLEKLKKTATGWMTTINGKELKVEGQITYYNRYKRQNVVKDLSVELDRLSEESVNNDISSWTKGRSGEALSLLKKRFSHRPVQEKFVCLNCGFETHADEQAALNIARSWLFLRSQEYKKYQTNKTTGNTDKRAFVETWQSFYRKKLKEVWKPAV

SEQ ID NO: 44580 - protein, 979 aa, synthetic construct
  REGION 1..979: note = engineered CasX variant
QEIKRINKIRRRLVKDSNTKKAGKTGPMKTLLVRVMTPDLRERLENLRKKPENIPQPISNTSRANLNKLLTDYTEMKKAILHVYWEEFQKDPVGLMSRVAQPASKKIDQNKLKPEMDEKGNLTTAGFACSQCGQPLFVYKLEQVSEKGKAYTNYFGRCNVAEHEKLILLAQLKPEKDSDEAVTYSLGKFGQRALDFYSIHVTKESTHPVKPLAQIAGNRYASAPVGKALSDACMGTIASFLSKYQDIIIEHQKVVKGNQKRLESLRELAGKENLEYPSVTLPPQPHTKEGVDAYNEVIARVRMWVNLNLWQKLKLSRDDAKPLLRLKNFPSFPLVERQANEVDWWDMVCNVKKLINEKKEDGKVFWQNLAGYKRQEALRPYLSSEEDRKKGKKFARYQLGDLLLHLEKKHEGEDWGKVYDEAWERIDKKVEGLSKHIKLEEERRSEDAQSKAALTDWLRAKASFVIEGLKEADKDEFCRCELKLQKWYGDLRGKPFAIEAENSILDISGFSKQYNCAFIWQKDGVKKLNLYLIINYFKGGKLRFKKIKPEAFEANRFYTVINKKSGEIVPMEVNFNFDDPNLIILPLAFGKRQGREFIWNDLLSLETGSLKLANGRVIEKTLYNRRTRQDEPALFVALTFERREVLDSSNIKPMNLIGVDRGENIPAVIALTDPEGCPLSRFKDSLGNPTHILRIGESYKEKQRTIQAKKEVEQRRAGGYSRKYASKAKNLADDMVRNTARDLLYYAVTQDAMLIFENLSRGFGRQGKRTFMAERQYTRMEDWLTAKLAYEGLPSKTYLSKTLAQYTSKTCSNCGFTITSADYDRVLEKLKKTATGWMTTINGKELKVEGQITYYNRYKRQNVVKDLSVELDRLSEESVNNDISSWTKGRSGEALSLLKKRFSHRPVQEKFVCLNCGFETHADEQAALNIARSWLFLRSQEYKKYQTNKTTGNTDKRAFVETWQSFYRKKLKEVWKPAV

SEQ ID NO: 44581 - protein, 979 aa, synthetic construct
  REGION 1..979: note = engineered CasX variant
QEIKRINKIRRRLVKDSNTKKAGKTGPMKTLLVRVMTPDLRERLENLRKKPENIPQPISNTSRANLNKLLTDYTEMKKAILHVYWEEFQKDPVGLMSRVAQPASKKIDQNKLKPEMDEKGNLTTAGFACSQCGQPLFVYKLEQVSEKGKAYTNYFGRCNVAEHEKLILLAQLKPEKDSDEAVTYSLGKFGQRALDFYSIHVTKESTHPVKPLAQIAGNRYASVPVGKALSDACMGTIASFLSKYQDIIIEHQKVVKGNQKRLESLRELAGKENLEYPSVTLPPQPHTKEGVDAYNEVIARVRMWVNLNLWQKLKLSRDDAKPLLRLKNFPSFPLVERQANEVDWWDMVCNVKKLINEKKEDGKVFWQNLAGYKRQEALRPYLSSEEDRKKGKKFARYQLGDLLLHLEKKHEGEDWGKVYDEAWERIDKKVEGLSKHIKLEEERRSEDAQSKAALTDWLRAKASFVIEGLKEADKDEFCRCELKLQKWYGDLRGKPFAIEAENSILDISGFSKQYNCAFIWQKDGVKKLNLYLIINYFKGGKLRFKKIKPEAFEANRFYTVINKKSGEIVPMEVNFNFDDPNLIILPLAFGKRQGREFIWNDLLSLETGSLKLANGRVIEKTLYNRRTRQDEPALFVALTFERREVLDSSNIKPMNLIGVDRGENIPAVIALTDPEGCPLSRFKDSLGNPTHILRIGESYKEKQRTIQAKKEVEQRRAGGYSRKYASKAKNLADDMVRNTARDLLYYAVTQDAMLIFENLSRGFGRQGKRTFMAERQYTRMEDWLTAKLAYEGLPSKTYLSKTLAQYTSKTCSNCGFTITSADYDRVLEKLKKTATGWMTTINGKELKVEGQITYYNRYKRQNVVKDLSVELDRLSEESVNNDISSWTKGRSGEALSLLKKRFSHRPVQEKFVCLNCGFETHADEQAALNIARSWLFLRSQEYKKYQTNKTTGNTDKRAFVETWQSFYRKKLKEVWKPAV

SEQ ID NO: 44582 - protein, 979 aa, synthetic construct
  REGION 1..979: note = engineered CasX variant
QEIKRINKIRRRLVKDSNTKKAGKTGPMKTLLVRVMTPDLRERLENLRKKPENIPQPISNTSRANLNKLLTDYTEMKKAILHVYWEEFQKDPVGLMSRVAQPASKKIDQNKLKPEMDEKGNLTTAGFACSQCGQPLFVYKLEQVSEKGKAYTNYFGRCNVAEHEKLIKLAQLKPEKDSDEAVTYSLGKFGQRALDFYSIHVTKESTHPVKPLAQIAGNRYASGPVGKALSDACMGTIASFLSKYQDIIIEHQKVVKGNQKRLESLRELAGKENLEYPSVTLPPQPHTKEGVDAYNEVIARVRMWVNLNLWQKLKLSRDDAKPLLRLKNFPSFPLVERQANEVDWWDMVCNVKKLINEKKEDGKVFWQNLAGYKRQEALRPYLSSEEDRKKGKKFARYQLGDLLLHLEKKHEGEDWGKVYDEAWERIDKKVEGLSKHIKLEEERRSEDAQSKAALTDWLRAKASFVIEGLKEADKDEFCRCELKLQKWYGDLRGKPFAIEAENSILDISGFSKQYNCAFIWQKDGVKKLNLYLIINYFKGGKLRFKKIKPEAFEANRFYTVINKKSGEIVPMEVNFNFDDPNLIILPLAFGKRQGREFIWNDLLSLETGSLKLANGRVIEKTLYNRRTRQDEPALFVALTFERREVLDSSNIKPMNLIGVDRGENIPAVIALTDPEGCPLSRFKDSLGNPTHILRIGESYKEKQRTIQAKKEVEQRRAGGYSRKYASKAKNLADDMVRNTARDLLYYAVTQDAMLIFENLSRGFGRQGKRTFMAERQYTRMEDWLTAKLAYEGLPSKTYLSKTLAQYTSKTCSNCGFTITSADYDRVLEKLKKTATGWMTTINGKELKVEGQITYYNRYKRQNVVKDLSVELDRLSEESVNNDISSWTKGRSGEALSLLKKRFSHRPVQEKFVCLNCGFETHADEQAALNIARSWLFLRSQEYKKYQTNKTTGNTDKRAFVETWQSFYRKKLKEVWKPAV

SEQ ID NO: 44583 - protein, 978 aa, synthetic construct
  REGION 1..978: note = engineered CasX variant
QEIKRINKIRRRLVKDSNTKKAGKTGPMKTLLVRVMTPDLRERLENLRKKPENIPQPISNTSRANLNKLLTDYTEMKKAILHVYWEEFQKDPVGLMSRVAQPASKKIDQNKLKPEMDEKGNLTTAGFACSQCGQPLFVYKLEQVSEKGKAYTNYFGRCNVAEHEKLILLAQLKPEKDSDEAVTYSLGKFGQRALDFYSIHVTKESTHPVKPLAQIAGNRYASPVGKALSDACMGTIASFLSKYQDIIIEHQKVVKGNQKRLESLRELAGKENLEYPSVTLPPQPHTKEGVDAYNEVIARVRMWVNLNLWQKLKLSRDDAKPLLRLKNFPSFPLVERQANEVDWWDMVCNVKKLINEKKEDGKVFWQNLAGYKRQEALRPYLSSEEDRKKGKKFARYQLGDLLLHLEKKHEGEDWGKVYDEAWERIDKKVEGLSKHIKLEEERRSEDAQSKAALTDWLRAKASFVIEGLKEADKDEFCRCELKLQKWYGDLRGKPFAIEAENSILDISGFSKQYNCAFIWQKDGVKKLNLYLIINYFKGGKLRFKKIKPEAFEANRFYTVINKKSGEIVPMEVNFNFDDPNLIILPLAFGKRQGREFIWNDLLSLETGSLKLANGRVIEKTLYNRRTRQDEPALFVALTFERREVLDSSNIKPMNLIGVDRGENIPAVIALTDPEGCPLSRFKDSLGNPTHILRIGESYKEKQRTIQAKKEVEQRRAGGYSRKYASKAKNLADDMVRNTARDLLYYAVTQDAMLIFENLSRGFGRQGKRTFMAERQYTRMEDWLTAKLAYEGLPSKTYLSKTLAQYTSKTCSNCGFTITSADYDRVLEKLKKTATGWMTTINGKELKVEGQITYYNRYKRQNVVKDLSVELDRLSEESVNNDISSWTKGRSGEALSLLKKRFSHRPVQEKFVCLNCGFETHADEQAALNIARSWLFLRSQEYKKYQTNKTTGNTDKRAFVETWQSFYRKKLKEVWKPAV

SEQ ID NO: 44584 - protein, 979 aa, synthetic construct
  REGION 1..979: note = engineered CasX variant
QEIKRINKIRRRLVKDSNTKKAGKTGPMKTLLVRVMTPDLRERLENLRKKPENIPQPISNTSRANLNKLLTDYTEMKKAILHVYWEEFQKDPVGLMSRVAQPASKKIDQNKLKPEMDEKGNLTTAGFACSQCGQPLFVYKLEQVSEKGKAYTNYFGRCNVAEHEKLILLAQLKPEKDSDEAVTYSLGKFGQRALDFYSIHVTKESTHPVKPLAQIAGNRYASYPVGKALSDACMGTIASFLSKYQDIIIEHQKVVKGNQKRLESLRELAGKENLEYPSVTLPPQPHTKEGVDAYNEVIARVRMWVNLNLWQKLKLSRDDAKPLLRLKGFPSFPLVERQANEVDWWDMVCNVKKLINEKKEDGKVFWQNLAGYKRQEALRPYLSSEEDRKKGKKFARYQLGDLLNHLEKKHEGEDWGKVYDEAWERIDKKVEGLSKHIKLEEERRSEDAQSKAALTDWLRAKASFVIEGLKEADKDEFCRCELKLQKWYGDLRGKPFAIEAENSILDISGFSKQYNCAFIWQKDGVKKLNLYLIINYFKGGKLRFKKIKPEAFEANRFYTVINKKSGEIVPMEVNFNFDDPNLIILPLAFGKRQGREFIWNDLLSLETGSLKLANGRVIEKTLYNRRTRQDEPALFVALTFERREVLDSSNIKPMNLIGVDRGENIPAVIALTDPEGCPLSRFKDSLGNPTHILRIGESYKEKQRTIQAKKEVEQRRAGGYSRKYASKAKNLADDMVRNTARDLLYYAVTQDAMLIFENLSRGFGRQGKRTFMAERQYTRMEDWLTAKLAYEGLPSKTYLSKTLAQYTSKTCSNCGFTITSADYDRVLEKLKKTATGWMTTINGKELKVEGQITYYNRYKRQNVVKDLSVELDRLSEESVNNDISSWTKGRSGEALSLLKKRFSHRPVQEKFVCLNCGFETHADEQAALNIARSWLFLRSQEYKKYQTNKTTGNTDKRAFVETWQSFYRKKLKEVWKPAV

SEQ ID NO: 44585 - protein, 979 aa, synthetic construct
  REGION 1..979: note = engineered CasX variant
QEIKRINKIRRRLVKDSNTKKAGKTGPMKTLLVRVMTPDLRERLENLRKKPENIPQPISNTSRANLNKLLTDYTEMKKAILHVYWEEFQKDPVGLMSRVAQPASKKIDQNKLKPEMDEKGNLTTAGFACSQCGQPLFVYKLEQVSEKGKAYTNYFGRCNVAEHEKLILLAQLKPEKDSDEAVTYSLGKFGQRALDFYSIHVTKESTHPVKPLAQIAGNRYASHPVGKALSDACMGTIASFLSKYQDIIIEHQKVVKGNQKRLESLRELAGKENLEYPSVTLPPQPHTKEGVDAYNEVIARVRMWVNLNLWQKLKLSRDDAKPLLRLKGFPSFPLVERQANEVDWWDMVCNVKKLINEKKEDGKVFWQNLAGYKRQEALRPYLSSEEDRKKGKKFARYQLGDLLNHLEKKHEGEDWGKVYDEAWERIDKKVEGLSKHIKLEEERRSEDAQSKAALTDWLRAKASFVIEGLKEADKDEFCRCELKLQKWYGDLRGKPFAIEAENSILDISGFSKQYNCAFIWQKDGVKKLNLYLIINYFKGGKLRFKKIKPEAFEANRFYTVINKKSGEIVPMEVNFNFDDPNLIILPLAFGKRQGREFIWNDLLSLETGSLKLANGRVIEKTLYNRRTRQDEPALFVALTFERREVLDSSNIKPMNLIGVDRGENIPAVIALTDPEGCPLSRFKDSLGNPTHILRIGESYKEKQRTIQAKKEVEQRRAGGYSRKYASKAKNLADDMVRNTARDLLYYAVTQDAMLIFENLSRGFGRQGKRTFMAERQYTRMEDWLTAKLAYEGLPSKTYLSKTLAQYTSKTCSNCGFTITSADYDRVLEKLKKTATGWMTTINGKELKVEGQITYYNRYKRQNVVKDLSVELDRLSEESVNNDISSWTKGRSGEALSLLKKRFSHRPVQEKFVCLNCGFETHADEQAALNIARSWLFLRSQEYKKYQTNKTTGNTDKRAFVETWQSFYRKKLKEVWKPAV

SEQ ID NO: 44586 - protein, 979 aa, synthetic construct
  REGION 1..979: note = engineered CasX variant
QEIKRINKIRRRLVKDSNTKKAGKTGPMKTLLVRVMTPDLRERLENLRKKPENIPQPISNTSRANLNKLLTDYTEMKKAILHVYWEEFQKDPVGLMSRVAQPASKKIDQNKLKPEMDEKGNLTTAGFACSQCGQPLFVYKLEQVSEKGKAYTNYFGRCNVAEHEKLILLAQLKPEKDSDEAVTYSLGKFGQRALDFYSIHVTKESTHPVKPLAQIAGNRYASSPVGKALSDACMGTIASFLSKYQDIIIEHQKVVKGNQKRLESLRELAGKENLEYPSVTLPPQPHTKEGVDAYNEVIARVRMWVNLNLWQKLKLSRDDAKPLLRLKGFPSFPLVERQANEVDWWDMVCNVKKLINEKKEDGKVFWQNLAGYKRQEALRPYLSSEEDRKKGKKFARYQLGDLLNHLEKKHEGEDWGKVYDEAWERIDKKVEGLSKHIKLEEERRSEDAQSKAALTDWLRAKASFVIEGLKEADKDEFCRCELKLQKWYGDLRGKPFAIEAENSILDISGFSKQYNCAFIWQKDGVKKLNLYLIINYFKGGKLRFKKIKPEAFEANRFYTVINKKSGEIVPMEVNFNFDDPNLIILPLAFGKRQGREFIWNDLLSLETGSLKLANGRVIEKTLYNRRTRQDEPALFVALTFERREVLDSSNIKPMNLIGVDRGENIPAVIALTDPEGCPLSRFKDSLGNPTHILRIGESYKEKQRTIQAKKEVEQRRAGGYSRKYASKAKNLADDMVRNTARDLLYYAVTQDAMLIFENLSRGFGRQGKRTFMAERQYTRMEDWLTAKLAYEGLPSKTYLSKTLAQYTSKTCSNCGFTITSADYDRVLEKLKKTATGWMTTINGKELKVEGQITYYNRYKRQNVVKDLSVELDRLSEESVNNDISSWTKGRSGEALSLLKKRFSHRPVQEKFVCLNCGFETHADEQAALNIARSWLFLRSQEYKKYQTNKTTGNTDKRAFVETWQSFYRKKLKEVWKPAV

SEQ ID NO: 44587 - protein, 979 aa, synthetic construct
  REGION 1..979: note = engineered CasX variant
QEIKRINKIRRRLVKDSNTKKAGKTGPMKTLLVRVMTPDLRERLENLRKKPENIPQPISNTSRANLNKLLTDYTEMKKAILHVYWEEFQKDPVGLMSRVAQPASKKIDQNKLKPEMDEKGNLTTAGFACSQCGQPLFVYKLEQVSEKGKAYTNYFGRCNVAEHEKLILLAQLKPEKDSDEAVTYSLGKFGQRALDFYSIHVTKESTHPVKPLAQIAGNRYASTPVGKALSDACMGTIASFLSKYQDIIIEHQKVVKGNQKRLESLRELAGKENLEYPSVTLPPQPHTKEGVDAYNEVIARVRMWVNLNLWQKLKLSRDDAKPLLRLKGFPSFPLVERQANEVDWWDMVCNVKKLINEKKEDGKVFWQNLAGYKRQEALRPYLSSEEDRKKGKKFARYQLGDLLNHLEKKHEGEDWGKVYDEAWERIDKKVEGLSKHIKLEEERRSEDAQSKAALTDWLRAKASFVIEGLKEADKDEFCRCELKLQKWYGDLRGKPFAIEAENSILDISGFSKQYNCAFIWQKDGVKKLNLYLIINYFKGGKLRFKKIKPEAFEANRFYTVINKKSGEIVPMEVNFNFDDPNLIILPLAFGKRQGREFIWNDLLSLETGSLKLANGRVIEKTLYNRRTRQDEPALFVALTFERREVLDSSNIKPMNLIGVDRGENIPAVIALTDPEGCPLSRFKDSLGNPTHILRIGESYKEKQRTIQAKKEVEQRRAGGYSRKYASKAKNLADDMVRNTARDLLYYAVTQDAMLIFENLSRGFGRQGKRTFMAERQYTRMEDWLTAKLAYEGLPSKTYLSKTLAQYTSKTCSNCGFTITSADYDRVLEKLKKTATGWMTTINGKELKVEGQITYYNRYKRQNVVKDLSVELDRLSEESVNNDISSWTKGRSGEALSLLKKRFSHRPVQEKFVCLNCGFETHADEQAALNIARSWLFLRSQEYKKYQTNKTTGNTDKRAFVETWQSFYRKKLKEVWKPAV

SEQ ID NO: 44588 - protein, 979 aa, synthetic construct
  REGION 1..979: note = engineered CasX variant
QEIKRINKIRRRLVKDSNTKKAGKTGPMKTLLVRVMTPDLRERLENLRKKPENIPQPISNTSRANLNKLLTDYTEMKKAILHVYWEEFQKDPVGLMSRVAQPASKKIDQNKLKPEMDEKGNLTTAGFACSQCGQPLFVYKLEQVSEKGKAYTNYFGRCNVAEHEKLILLAQLKPEKDSDEAVTYSLGKFGQRALDFYSIHVTKESTHPVKPLAQIAGNRYASAPVGKALSDACMGTIASFLSKYQDIIIEHQKVVKGNQKRLESLRELAGKENLEYPSVTLPPQPHTKEGVDAYNEVIARVRMWVNLNLWQKLKLSRDDAKPLLRLKGFPSFPLVERQANEVDWWDMVCNVKKLINEKKEDGKVFWQNLAGYKRQEALRPYLSSEEDRKKGKKFARYQLGDLLNHLEKKHEGEDWGKVYDEAWERIDKKVEGLSKHIKLEEERRSEDAQSKAALTDWLRAKASFVIEGLKEADKDEFCRCELKLQKWYGDLRGKPFAIEAENSILDISGFSKQYNCAFIWQKDGVKKLNLYLIINYFKGGKLRFKKIKPEAFEANRFYTVINKKSGEIVPMEVNFNFDDPNLIILPLAFGKRQGREFIWNDLLSLETGSLKLANGRVIEKTLYNRRTRQDEPALFVALTFERREVLDSSNIKPMNLIGVDRGENIPAVIALTDPEGCPLSRFKDSLGNPTHILRIGESYKEKQRTIQAKKEVEQRRAGGYSRKYASKAKNLADDMVRNTARDLLYYAVTQDAMLIFENLSRGFGRQGKRTFMAERQYTRMEDWLTAKLAYEGLPSKTYLSKTLAQYTSKTCSNCGFTITSADYDRVLEKLKKTATGWMTTINGKELKVEGQITYYNRYKRQNVVKDLSVELDRLSEESVNNDISSWTKGRSGEALSLLKKRFSHRPVQEKFVCLNCGFETHADEQAALNIARSWLFLRSQEYKKYQTNKTTGNTDKRAFVETWQSFYRKKLKEVWKPAV

SEQ ID NO: 44589 - protein, 979 aa, synthetic construct
  REGION 1..979: note = engineered CasX variant
QEIKRINKIRRRLVKDSNTKKAGKTGPMKTLLVRVMTPDLRERLENLRKKPENIPQPISNTSRANLNKLLTDYTEMKKAILHVYWEEFQKDPVGLMSRVAQPASKKIDQNKLKPEMDEKGNLTTAGFACSQCGQPLFVYKLEQVSEKGKAYTNYFGRCNVAEHEKLILLAQLKPEKDSDEAVTYSLGKFGQRALDFYSIHVTKESTHPVKPLAQIAGNRYASVPVGKALSDACMGTIASFLSKYQDIIIEHQKVVKGNQKRLESLRELAGKENLEYPSVTLPPQPHTKEGVDAYNEVIARVRMWVNLNLWQKLKLSRDDAKPLLRLKGFPSFPLVERQANEVDWWDMVCNVKKLINEKKEDGKVFWQNLAGYKRQEALRPYLSSEEDRKKGKKFARYQLGDLLNHLEKKHEGEDWGKVYDEAWERIDKKVEGLSKHIKLEEERRSEDAQSKAALTDWLRAKASFVIEGLKEADKDEFCRCELKLQKWYGDLRGKPFAIEAENSILDISGFSKQYNCAFIWQKDGVKKLNLYLIINYFKGGKLRFKKIKPEAFEANRFYTVINKKSGEIVPMEVNFNFDDPNLIILPLAFGKRQGREFIWNDLLSLETGSLKLANGRVIEKTLYNRRTRQDEPALFVALTFERREVLDSSNIKPMNLIGVDRGENIPAVIALTDPEGCPLSRFKDSLGNPTHILRIGESYKEKQRTIQAKKEVEQRRAGGYSRKYASKAKNLADDMVRNTARDLLYYAVTQDAMLIFENLSRGFGRQGKRTFMAERQYTRMEDWLTAKLAYEGLPSKTYLSKTLAQYTSKTCSNCGFTITSADYDRVLEKLKKTATGWMTTINGKELKVEGQITYYNRYKRQNVVKDLSVELDRLSEESVNNDISSWTKGRSGEALSLLKKRFSHRPVQEKFVCLNCGFETHADEQAALNIARSWLFLRSQEYKKYQTNKTTGNTDKRAFVETWQSFYRKKLKEVWKPAV

SEQ ID NO: 44590 - protein, 979 aa, synthetic construct
  REGION 1..979: note = engineered CasX variant
QEIKRINKIRRRLVKDSNTKKAGKTGPMKTLLVRVMTPDLRERLENLRKKPENIPQPISNTSRANLNKLLTDYTEMKKAILHVYWEEFQKDPVGLMSRVAQPASKKIDQNKLKPEMDEKGNLTTAGFACSQCGQPLFVYKLEQVSEKGKAYTNYFGRCNVAEHEKLIKLAQLKPEKDSDEAVTYSLGKFGQRALDFYSIHVTKESTHPVKPLAQIAGNRYASGPVGKALSDACMGTIASFLSKYQDIIIEHQKVVKGNQKRLESLRELAGKENLEYPSVTLPPQPHTKEGVDAYNEVIARVRMWVNLNLWQKLKLSRDDAKPLLRLKGFPSFPLVERQANEVDWWDMVCNVKKLINEKKEDGKVFWQNLAGYKRQEALRPYLSSEEDRKKGKKFARYQLGDLLNHLEKKHEGEDWGKVYDEAWERIDKKVEGLSKHIKLEEERRSEDAQSKAALTDWLRAKASFVIEGLKEADKDEFCRCELKLQKWYGDLRGKPFAIEAENSILDISGFSKQYNCAFIWQKDGVKKLNLYLIINYFKGGKLRFKKIKPEAFEANRFYTVINKKSGEIVPMEVNFNFDDPNLIILPLAFGKRQGREFIWNDLLSLETGSLKLANGRVIEKTLYNRRTRQDEPALFVALTFERREVLDSSNIKPMNLIGVDRGENIPAVIALTDPEGCPLSRFKDSLGNPTHILRIGESYKEKQRTIQAKKEVEQRRAGGYSRKYASKAKNLADDMVRNTARDLLYYAVTQDAMLIFENLSRGFGRQGKRTFMAERQYTRMEDWLTAKLAYEGLPSKTYLSKTLAQYTSKTCSNCGFTITSADYDRVLEKLKKTATGWMTTINGKELKVEGQITYYNRYKRQNVVKDLSVELDRLSEESVNNDISSWTKGRSGEALSLLKKRFSHRPVQEKFVCLNCGFETHADEQAALNIARSWLFLRSQEYKKYQTNKTTGNTDKRAFVETWQSFYRKKLKEVWKPAV

SEQ ID NO: 44591 - protein, 978 aa, synthetic construct
  REGION 1..978: note = engineered CasX variant
QEIKRINKIRRRLVKDSNTKKAGKTGPMKTLLVRVMTPDLRERLENLRKKPENIPQPISNTSRANLNKLLTDYTEMKKAILHVYWEEFQKDPVGLMSRVAQPASKKIDQNKLKPEMDEKGNLTTAGFACSQCGQPLFVYKLEQVSEKGKAYTNYFGRCNVAEHEKLILLAQLKPEKDSDEAVTYSLGKFGQRALDFYSIHVTKESTHPVKPLAQIAGNRYASPVGKALSDACMGTIASFLSKYQDIIIEHQKVVKGNQKRLESLRELAGKENLEYPSVTLPPQPHTKEGVDAYNEVIARVRMWVNLNLWQKLKLSRDDAKPLLRLKGFPSFPLVERQANEVDWWDMVCNVKKLINEKKEDGKVFWQNLAGYKRQEALRPYLSSEEDRKKGKKFARYQLGDLLNHLEKKHEGEDWGKVYDEAWERIDKKVEGLSKHIKLEEERRSEDAQSKAALTDWLRAKASFVIEGLKEADKDEFCRCELKLQKWYGDLRGKPFAIEAENSILDISGFSKQYNCAFIWQKDGVKKLNLYLIINYFKGGKLRFKKIKPEAFEANRFYTVINKKSGEIVPMEVNFNFDDPNLIILPLAFGKRQGREFIWNDLLSLETGSLKLANGRVIEKTLYNRRTRQDEPALFVALTFERREVLDSSNIKPMNLIGVDRGENIPAVIALTDPEGCPLSRFKDSLGNPTHILRIGESYKEKQRTIQAKKEVEQRRAGGYSRKYASKAKNLADDMVRNTARDLLYYAVTQDAMLIFENLSRGFGRQGKRTFMAERQYTRMEDWLTAKLAYEGLPSKTYLSKTLAQYTSKTCSNCGFTITSADYDRVLEKLKKTATGWMTTINGKELKVEGQITYYNRYKRQNVVKDLSVELDRLSEESVNNDISSWTKGRSGEALSLLKKRFSHRPVQEKFVCLNCGFETHADEQAALNIARSWLFLRSQEYKKYQTNKTTGNTDKRAFVETWQSFYRKKLKEVWKPAV

SEQ ID NO: 44592 - protein, 979 aa, synthetic construct
  REGION 1..979: note = engineered CasX variant
QEIKRINKIRRRLVKDSNTKKAGKTGPMKTLLVRVMTPDLRERLENLRKKPENIPQPISNTSRANLNKLLTDYTEMKKAILHVYWEEFQKDPVGLMSRVAQPASKKIDQNKLKPEMDEKGNLTTAGFACSQCGQPLFVYKLEQVSEKGKAYTNYFGRCNVAEHEKLILLAQLKPEKDSDEAVTYSLGKFGQRALDFYSIHVTKESTHPVKPLAQIAGNRYASYPVGKALSDACMGTIASFLSKYQDIIIEHQKVVKGNQKRLESLRELAGKENLEYPSVTLPPQPHTKEGVDAYNEVIARVRMWVNLNLWQKLKLSRDDAKPLLRLKGFPSFPLVERQANEVDWWDMVCNVKKLINEKKEDGKVFWQNLAGYKRQEALRPYLSSEEDRKKGKKFARYQLGDLLWHLEKKHEGEDWGKVYDEAWERIDKKVEGLSKHIKLEEERRSEDAQSKAALTDWLRAKASFVIEGLKEADKDEFCRCELKLQKWYGDLRGKPFAIEAENSILDISGFSKQYNCAFIWQKDGVKKLNLYLIINYFKGGKLRFKKIKPEAFEANRFYTVINKKSGEIVPMEVNFNFDDPNLIILPLAFGKRQGREFIWNDLLSLETGSLKLANGRVIEKTLYNRRTRQDEPALFVALTFERREVLDSSNIKPMNLIGVDRGENIPAVIALTDPEGCPLSRFKDSLGNPTHILRIGESYKEKQRTIQAKKEVEQRRAGGYSRKYASKAKNLADDMVRNTARDLLYYAVTQDAMLIFENLSRGFGRQGKRTFMAERQYTRMEDWLTAKLAYEGLPSKTYLSKTLAQYTSKTCSNCGFTITSADYDRVLEKLKKTATGWMTTINGKELKVEGQITYYNRYKRQNVVKDLSVELDRLSEESVNNDISSWTKGRSGEALSLLKKRFSHRPVQEKFVCLNCGFETHADEQAALNIARSWLFLRSQEYKKYQTNKTTGNTDKRAFVETWQSFYRKKLKEVWKPAV

SEQ ID NO: 44593 - protein, 979 aa, synthetic construct
  REGION 1..979: note = engineered CasX variant
QEIKRINKIRRRLVKDSNTKKAGKTGPMKTLLVRVMTPDLRERLENLRKKPENIPQPISNTSRANLNKLLTDYTEMKKAILHVYWEEFQKDPVGLMSRVAQPASKKIDQNKLKPEMDEKGNLTTAGFACSQCGQPLFVYKLEQVSEKGKAYTNYFGRCNVAEHEKLILLAQLKPEKDSDEAVTYSLGKFGQRALDFYSIHVTKESTHPVKPLAQIAGNRYASHPVGKALSDACMGTIASFLSKYQDIIIEHQKVVKGNQKRLESLRELAGKENLEYPSVTLPPQPHTKEGVDAYNEVIARVRMWVNLNLWQKLKLSRDDAKPLLRLKGFPSFPLVERQANEVDWWDMVCNVKKLINEKKEDGKVFWQNLAGYKRQEALRPYLSSEEDRKKGKKFARYQLGDLLWHLEKKHEGEDWGKVYDEAWERIDKKVEGLSKHIKLEEERRSEDAQSKAALTDWLRAKASFVIEGLKEADKDEFCRCELKLQKWYGDLRGKPFAIEAENSILDISGFSKQYNCAFIWQKDGVKKLNLYLIINYFKGGKLRFKKIKPEAFEANRFYTVINKKSGEIVPMEVNFNFDDPNLIILPLAFGKRQGREFIWNDLLSLETGSLKLANGRVIEKTLYNRRTRQDEPALFVALTFERREVLDSSNIKPMNLIGVDRGENIPAVIALTDPEGCPLSRFKDSLGNPTHILRIGESYKEKQRTIQAKKEVEQRRAGGYSRKYASKAKNLADDMVRNTARDLLYYAVTQDAMLIFENLSRGFGRQGKRTFMAERQYTRMEDWLTAKLAYEGLPSKTYLSKTLAQYTSKTCSNCGFTITSADYDRVLEKLKKTATGWMTTINGKELKVEGQITYYNRYKRQNVVKDLSVELDRLSEESVNNDISSWTKGRSGEALSLLKKRFSHRPVQEKFVCLNCGFETHADEQAALNIARSWLFLRSQEYKKYQTNKTTGNTDKRAFVETWQSFYRKKLKEVWKPAV

SEQ ID NO: 44594 - protein, 979 aa, synthetic construct
  REGION 1..979: note = engineered CasX variant
QEIKRINKIRRRLVKDSNTKKAGKTGPMKTLLVRVMTPDLRERLENLRKKPENIPQPISNTSRANLNKLLTDYTEMKKAILHVYWEEFQKDPVGLMSRVAQPASKKIDQNKLKPEMDEKGNLTTAGFACSQCGQPLFVYKLEQVSEKGKAYTNYFGRCNVAEHEKLILLAQLKPEKDSDEAVTYSLGKFGQRALDFYSIHVTKESTHPVKPLAQIAGNRYASSPVGKALSDACMGTIASFLSKYQDIIIEHQKVVKGNQKRLESLRELAGKENLEYPSVTLPPQPHTKEGVDAYNEVIARVRMWVNLNLWQKLKLSRDDAKPLLRLKGFPSFPLVERQANEVDWWDMVCNVKKLINEKKEDGKVFWQNLAGYKRQEALRPYLSSEEDRKKGKKFARYQLGDLLWHLEKKHEGEDWGKVYDEAWERIDKKVEGLSKHIKLEEERRSEDAQSKAALTDWLRAKASFVIEGLKEADKDEFCRCELKLQKWYGDLRGKPFAIEAENSILDISGFSKQYNCAFIWQKDGVKKLNLYLIINYFKGGKLRFKKIKPEAFEANRFYTVINKKSGEIVPMEVNFNFDDPNLIILPLAFGKRQGREFIWNDLLSLETGSLKLANGRVIEKTLYNRRTRQDEPALFVALTFERREVLDSSNIKPMNLIGVDRGENIPAVIALTDPEGCPLSRFKDSLGNPTHILRIGESYKEKQRTIQAKKEVEQRRAGGYSRKYASKAKNLADDMVRNTARDLLYYAVTQDAMLIFENLSRGFGRQGKRTFMAERQYTRMEDWLTAKLAYEGLPSKTYLSKTLAQYTSKTCSNCGFTITSADYDRVLEKLKKTATGWMTTINGKELKVEGQITYYNRYKRQNVVKDLSVELDRLSEESVNNDISSWTKGRSGEALSLLKKRFSHRPVQEKFVCLNCGFETHADEQAALNIARSWLFLRSQEYKKYQTNKTTGNTDKRAFVETWQSFYRKKLKEVWKPAV

SEQ ID NO: 44595 - protein, 979 aa, synthetic construct
  REGION 1..979: note = engineered CasX variant
QEIKRINKIRRRLVKDSNTKKAGKTGPMKTLLVRVMTPDLRERLENLRKKPENIPQPISNTSRANLNKLLTDYTEMKKAILHVYWEEFQKDPVGLMSRVAQPASKKIDQNKLKPEMDEKGNLTTAGFACSQCGQPLFVYKLEQVSEKGKAYTNYFGRCNVAEHEKLILLAQLKPEKDSDEAVTYSLGKFGQRALDFYSIHVTKESTHPVKPLAQIAGNRYASTPVGKALSDACMGTIASFLSKYQDIIIEHQKVVKGNQKRLESLRELAGKENLEYPSVTLPPQPHTKEGVDAYNEVIARVRMWVNLNLWQKLKLSRDDAKPLLRLKGFPSFPLVERQANEVDWWDMVCNVKKLINEKKEDGKVFWQNLAGYKRQEALRPYLSSEEDRKKGKKFARYQLGDLLWHLEKKHEGEDWGKVYDEAWERIDKKVEGLSKHIKLEEERRSEDAQSKAALTDWLRAKASFVIEGLKEADKDEFCRCELKLQKWYGDLRGKPFAIEAENSILDISGFSKQYNCAFIWQKDGVKKLNLYLIINYFKGGKLRFKKIKPEAFEANRFYTVINKKSGEIVPMEVNFNFDDPNLIILPLAFGKRQGREFIWNDLLSLETGSLKLANGRVIEKTLYNRRTRQDEPALFVALTFERREVLDSSNIKPMNLIGVDRGENIPAVIALTDPEGCPLSRFKDSLGNPTHILRIGESYKEKQRTIQAKKEVEQRRAGGYSRKYASKAKNLADDMVRNTARDLLYYAVTQDAMLIFENLSRGFGRQGKRTFMAERQYTRMEDWLTAKLAYEGLPSKTYLSKTLAQYTSKTCSNCGFTITSADYDRVLEKLKKTATGWMTTINGKELKVEGQITYYNRYKRQNVVKDLSVELDRLSEESVNNDISSWTKGRSGEALSLLKKRFSHRPVQEKFVCLNCGFETHADEQAALNIARSWLFLRSQEYKKYQTNKTTGNTDKRAFVETWQSFYRKKLKEVWKPAV

SEQ ID NO: 44596 - protein, 979 aa, synthetic construct
  REGION 1..979: note = engineered CasX variant
QEIKRINKIRRRLVKDSNTKKAGKTGPMKTLLVRVMTPDLRERLENLRKKPENIPQPISNTSRANLNKLLTDYTEMKKAILHVYWEEFQKDPVGLMSRVAQPASKKIDQNKLKPEMDEKGNLTTAGFACSQCGQPLFVYKLEQVSEKGKAYTNYFGRCNVAEHEKLILLAQLKPEKDSDEAVTYSLGKFGQRALDFYSIHVTKESTHPVKPLAQIAGNRYASAPVGKALSDACMGTIASFLSKYQDIIIEHQKVVKGNQKRLESLRELAGKENLEYPSVTLPPQPHTKEGVDAYNEVIARVRMWVNLNLWQKLKLSRDDAKPLLRLKGFPSFPLVERQANEVDWWDMVCNVKKLINEKKEDGKVFWQNLAGYKRQEALRPYLSSEEDRKKGKKFARYQLGDLLWHLEKKHEGEDWGKVYDEAWERIDKKVEGLSKHIKLEEERRSEDAQSKAALTDWLRAKASFVIEGLKEADKDEFCRCELKLQKWYGDLRGKPFAIEAENSILDISGFSKQYNCAFIWQKDGVKKLNLYLIINYFKGGKLRFKKIKPEAFEANRFYTVINKKSGEIVPMEVNFNFDDPNLIILPLAFGKRQGREFIWNDLLSLETGSLKLANGRVIEKTLYNRRTRQDEPALFVALTFERREVLDSSNIKPMNLIGVDRGENIPAVIALTDPEGCPLSRFKDSLGNPTHILRIGESYKEKQRTIQAKKEVEQRRAGGYSRKYASKAKNLADDMVRNTARDLLYYAVTQDAMLIFENLSRGFGRQGKRTFMAERQYTRMEDWLTAKLAYEGLPSKTYLSKTLAQYTSKTCSNCGFTITSADYDRVLEKLKKTATGWMTTINGKELKVEGQITYYNRYKRQNVVKDLSVELDRLSEESVNNDISSWTKGRSGEALSLLKKRFSHRPVQEKFVCLNCGFETHADEQAALNIARSWLFLRSQEYKKYQTNKTTGNTDKRAFVETWQSFYRKKLKEVWKPAV

SEQ ID NO: 44597 - protein, 979 aa, synthetic construct
  REGION 1..979: note = engineered CasX variant
QEIKRINKIRRRLVKDSNTKKAGKTGPMKTLLVRVMTPDLRERLENLRKKPENIPQPISNTSRANLNKLLTDYTEMKKAILHVYWEEFQKDPVGLMSRVAQPASKKIDQNKLKPEMDEKGNLTTAGFACSQCGQPLFVYKLEQVSEKGKAYTNYFGRCNVAEHEKLILLAQLKPEKDSDEAVTYSLGKFGQRALDFYSIHVTKESTHPVKPLAQIAGNRYASVPVGKALSDACMGTIASFLSKYQDIIIEHQKVVKGNQKRLESLRELAGKENLEYPSVTLPPQPHTKEGVDAYNEVIARVRMWVNLNLWQKLKLSRDDAKPLLRLKGFPSFPLVERQANEVDWWDMVCNVKKLINEKKEDGKVFWQNLAGYKRQEALRPYLSSEEDRKKGKKFARYQLGDLLWHLEKKHEGEDWGKVYDEAWERIDKKVEGLSKHIKLEEERRSEDAQSKAALTDWLRAKASFVIEGLKEADKDEFCRCELKLQKWYGDLRGKPFAIEAENSILDISGFSKQYNCAFIWQKDGVKKLNLYLIINYFKGGKLRFKKIKPEAFEANRFYTVINKKSGEIVPMEVNFNFDDPNLIILPLAFGKRQGREFIWNDLLSLETGSLKLANGRVIEKTLYNRRTRQDEPALFVALTFERREVLDSSNIKPMNLIGVDRGENIPAVIALTDPEGCPLSRFKDSLGNPTHILRIGESYKEKQRTIQAKKEVEQRRAGGYSRKYASKAKNLADDMVRNTARDLLYYAVTQDAMLIFENLSRGFGRQGKRTFMAERQYTRMEDWLTAKLAYEGLPSKTYLSKTLAQYTSKTCSNCGFTITSADYDRVLEKLKKTATGWMTTINGKELKVEGQITYYNRYKRQNVVKDLSVELDRLSEESVNNDISSWTKGRSGEALSLLKKRFSHRPVQEKFVCLNCGFETHADEQAALNIARSWLFLRSQEYKKYQTNKTTGNTDKRAFVETWQSFYRKKLKEVWKPAV

SEQ ID NO: 44598 - protein, 979 aa, synthetic construct
  REGION 1..979: note = engineered CasX variant
QEIKRINKIRRRLVKDSNTKKAGKTGPMKTLLVRVMTPDLRERLENLRKKPENIPQPISNTSRANLNKLLTDYTEMKKAILHVYWEEFQKDPVGLMSRVAQPASKKIDQNKLKPEMDEKGNLTTAGFACSQCGQPLFVYKLEQVSEKGKAYTNYFGRCNVAEHEKLIKLAQLKPEKDSDEAVTYSLGKFGQRALDFYSIHVTKESTHPVKPLAQIAGNRYASGPVGKALSDACMGTIASFLSKYQDIIIEHQKVVKGNQKRLESLRELAGKENLEYPSVTLPPQPHTKEGVDAYNEVIARVRMWVNLNLWQKLKLSRDDAKPLLRLKGFPSFPLVERQANEVDWWDMVCNVKKLINEKKEDGKVFWQNLAGYKRQEALRPYLSSEEDRKKGKKFARYQLGDLLWHLEKKHEGEDWGKVYDEAWERIDKKVEGLSKHIKLEEERRSEDAQSKAALTDWLRAKASFVIEGLKEADKDEFCRCELKLQKWYGDLRGKPFAIEAENSILDISGFSKQYNCAFIWQKDGVKKLNLYLIINYFKGGKLRFKKIKPEAFEANRFYTVINKKSGEIVPMEVNFNFDDPNLIILPLAFGKRQGREFIWNDLLSLETGSLKLANGRVIEKTLYNRRTRQDEPALFVALTFERREVLDSSNIKPMNLIGVDRGENIPAVIALTDPEGCPLSRFKDSLGNPTHILRIGESYKEKQRTIQAKKEVEQRRAGGYSRKYASKAKNLADDMVRNTARDLLYYAVTQDAMLIFENLSRGFGRQGKRTFMAERQYTRMEDWLTAKLAYEGLPSKTYLSKTLAQYTSKTCSNCGFTITSADYDRVLEKLKKTATGWMTTINGKELKVEGQITYYNRYKRQNVVKDLSVELDRLSEESVNNDISSWTKGRSGEALSLLKKRFSHRPVQEKFVCLNCGFETHADEQAALNIARSWLFLRSQEYKKYQTNKTTGNTDKRAFVETWQSFYRKKLKEVWKPAV

SEQ ID NO: 44599 - protein, 978 aa, synthetic construct
  REGION 1..978: note = engineered CasX variant
QEIKRINKIRRRLVKDSNTKKAGKTGPMKTLLVRVMTPDLRERLENLRKKPENIPQPISNTSRANLNKLLTDYTEMKKAILHVYWEEFQKDPVGLMSRVAQPASKKIDQNKLKPEMDEKGNLTTAGFACSQCGQPLFVYKLEQVSEKGKAYTNYFGRCNVAEHEKLILLAQLKPEKDSDEAVTYSLGKFGQRALDFYSIHVTKESTHPVKPLAQIAGNRYASPVGKALSDACMGTIASFLSKYQDIIIEHQKVVKGNQKRLESLRELAGKENLEYPSVTLPPQPHTKEGVDAYNEVIARVRMWVNLNLWQKLKLSRDDAKPLLRLKGFPSFPLVERQANEVDWWDMVCNVKKLINEKKEDGKVFWQNLAGYKRQEALRPYLSSEEDRKKGKKFARYQLGDLLWHLEKKHEGEDWGKVYDEAWERIDKKVEGLSKHIKLEEERRSEDAQSKAALTDWLRAKASFVIEGLKEADKDEFCRCELKLQKWYGDLRGKPFAIEAENSILDISGFSKQYNCAFIWQKDGVKKLNLYLIINYFKGGKLRFKKIKPEAFEANRFYTVINKKSGEIVPMEVNFNFDDPNLIILPLAFGKRQGREFIWNDLLSLETGSLKLANGRVIEKTLYNRRTRQDEPALFVALTFERREVLDSSNIKPMNLIGVDRGENIPAVIALTDPEGCPLSRFKDSLGNPTHILRIGESYKEKQRTIQAKKEVEQRRAGGYSRKYASKAKNLADDMVRNTARDLLYYAVTQDAMLIFENLSRGFGRQGKRTFMAERQYTRMEDWLTAKLAYEGLPSKTYLSKTLAQYTSKTCSNCGFTITSADYDRVLEKLKKTATGWMTTINGKELKVEGQITYYNRYKRQNVVKDLSVELDRLSEESVNNDISSWTKGRSGEALSLLKKRFSHRPVQEKFVCLNCGFETHADEQAALNIARSWLFLRSQEYKKYQTNKTTGNTDKRAFVETWQSFYRKKLKEVWKPAV

SEQ ID NO: 44600 - protein, 979 aa, synthetic construct
  REGION 1..979: note = engineered CasX variant
QEIKRINKIRRRLVKDSNTKKAGKTGPMKTLLVRVMTPDLRERLENLRKKPENIPQPISNTSRANLNKLLTDYTEMKKAILHVYWEEFQKDPVGLMSRVAQPASKKIDQNKLKPEMDEKGNLTTAGFACSQCGQPLFVYKLEQVSEKGKAYTNYFGRCNVAEHEKLILLAQLKPEKDSDEAVTYSLGKFGQRALDFYSIHVTKESTHPVKPLAQIAGNRYASYPVGKALSDACMGTIASFLSKYQDIIIEHQKVVKGNQKRLESLRELAGKENLEYPSVTLPPQPHTKEGVDAYNEVIARVRMWVNLNLWQKLKLSRDDAKPLLRLKGFPSFPLVERQANEVDWWDMVCNVKKLINEKKEDGKVFWQNLAGYKRQEALRPYLSSEEDRKKGKKFARYQLGDLLLHLYKKHEGEDWGKVYDEAWERIDKKVEGLSKHIKLEEERRSEDAQSKAALTDWLRAKASFVIEGLKEADKDEFCRCELKLQKWYGDLRGKPFAIEAENSILDISGFSKQYNCAFIWQKDGVKKLNLYLIINYFKGGKLRFKKIKPEAFEANRFYTVINKKSGEIVPMEVNFNFDDPNLIILPLAFGKRQGREFIWNDLLSLETGSLKLANGRVIEKTLYNRRTRQDEPALFVALTFERREVLDSSNIKPMNLIGVDRGENIPAVIALTDPEGCPLSRFKDSLGNPTHILRIGESYKEKQRTIQAKKEVEQRRAGGYSRKYASKAKNLADDMVRNTARDLLYYAVTQDAMLIFENLSRGFGRQGKRTFMAERQYTRMEDWLTAKLAYEGLPSKTYLSKTLAQYTSKTCSNCGFTITSADYDRVLEKLKKTATGWMTTINGKELKVEGQITYYNRYKRQNVVKDLSVELDRLSEESVNNDISSWTKGRSGEALSLLKKRFSHRPVQEKFVCLNCGFETHADEQAALNIARSWLFLRSQEYKKYQTNKTTGNTDKRAFVETWQSFYRKKLKEVWKPAV

SEQ ID NO: 44601 - protein, 979 aa, synthetic construct
  REGION 1..979: note = engineered CasX variant
QEIKRINKIRRRLVKDSNTKKAGKTGPMKTLLVRVMTPDLRERLENLRKKPENIPQPISNTSRANLNKLLTDYTEMKKAILHVYWEEFQKDPVGLMSRVAQPASKKIDQNKLKPEMDEKGNLTTAGFACSQCGQPLFVYKLEQVSEKGKAYTNYFGRCNVAEHEKLILLAQLKPEKDSDEAVTYSLGKFGQRALDFYSIHVTKESTHPVKPLAQIAGNRYASHPVGKALSDACMGTIASFLSKYQDIIIEHQKVVKGNQKRLESLRELAGKENLEYPSVTLPPQPHTKEGVDAYNEVIARVRMWVNLNLWQKLKLSRDDAKPLLRLKGFPSFPLVERQANEVDWWDMVCNVKKLINEKKEDGKVFWQNLAGYKRQEALRPYLSSEEDRKKGKKFARYQLGDLLLHLYKKHEGEDWGKVYDEAWERIDKKVEGLSKHIKLEEERRSEDAQSKAALTDWLRAKASFVIEGLKEADKDEFCRCELKLQKWYGDLRGKPFAIEAENSILDISGFSKQYNCAFIWQKDGVKKLNLYLIINYFKGGKLRFKKIKPEAFEANRFYTVINKKSGEIVPMEVNFNFDDPNLIILPLAFGKRQGREFIWNDLLSLETGSLKLANGRVIEKTLYNRRTRQDEPALFVALTFERREVLDSSNIKPMNLIGVDRGENIPAVIALTDPEGCPLSRFKDSLGNPTHILRIGESYKEKQRTIQAKKEVEQRRAGGYSRKYASKAKNLADDMVRNTARDLLYYAVTQDAMLIFENLSRGFGRQGKRTFMAERQYTRMEDWLTAKLAYEGLPSKTYLSKTLAQYTSKTCSNCGFTITSADYDRVLEKLKKTATGWMTTINGKELKVEGQITYYNRYKRQNVVKDLSVELDRLSEESVNNDISSWTKGRSGEALSLLKKRFSHRPVQEKFVCLNCGFETHADEQAALNIARSWLFLRSQEYKKYQTNKTTGNTDKRAFVETWQSFYRKKLKEVWKPAV

SEQ ID NO: 44602 - protein, 979 aa, synthetic construct
  REGION 1..979: note = engineered CasX variant
QEIKRINKIRRRLVKDSNTKKAGKTGPMKTLLVRVMTPDLRERLENLRKKPENIPQPISNTSRANLNKLLTDYTEMKKAILHVYWEEFQKDPVGLMSRVAQPASKKIDQNKLKPEMDEKGNLTTAGFACSQCGQPLFVYKLEQVSEKGKAYTNYFGRCNVAEHEKLILLAQLKPEKDSDEAVTYSLGKFGQRALDFYSIHVTKESTHPVKPLAQIAGNRYASSPVGKALSDACMGTIASFLSKYQDIIIEHQKVVKGNQKRLESLRELAGKENLEYPSVTLPPQPHTKEGVDAYNEVIARVRMWVNLNLWQKLKLSRDDAKPLLRLKGFPSFPLVERQANEVDWWDMVCNVKKLINEKKEDGKVFWQNLAGYKRQEALRPYLSSEEDRKKGKKFARYQLGDLLLHLYKKHEGEDWGKVYDEAWERIDKKVEGLSKHIKLEEERRSEDAQSKAALTDWLRAKASFVIEGLKEADKDEFCRCELKLQKWYGDLRGKPFAIEAENSILDISGFSKQYNCAFIWQKDGVKKLNLYLIINYFKGGKLRFKKIKPEAFEANRFYTVINKKSGEIVPMEVNFNFDDPNLIILPLAFGKRQGREFIWNDLLSLETGSLKLANGRVIEKTLYNRRTRQDEPALFVALTFERREVLDSSNIKPMNLIGVDRGENIPAVIALTDPEGCPLSRFKDSLGNPTHILRIGESYKEKQRTIQAKKEVEQRRAGGYSRKYASKAKNLADDMVRNTARDLLYYAVTQDAMLIFENLSRGFGRQGKRTFMAERQYTRMEDWLTAKLAYEGLPSKTYLSKTLAQYTSKTCSNCGFTITSADYDRVLEKLKKTATGWMTTINGKELKVEGQITYYNRYKRQNVVKDLSVELDRLSEESVNNDISSWTKGRSGEALSLLKKRFSHRPVQEKFVCLNCGFETHADEQAALNIARSWLFLRSQEYKKYQTNKTTGNTDKRAFVETWQSFYRKKLKEVWKPAV

SEQ ID NO: 44603 - protein, 979 aa, synthetic construct
  REGION 1..979: note = engineered CasX variant
QEIKRINKIRRRLVKDSNTKKAGKTGPMKTLLVRVMTPDLRERLENLRKKPENIPQPISNTSRANLNKLLTDYTEMKKAILHVYWEEFQKDPVGLMSRVAQPASKKIDQNKLKPEMDEKGNLTTAGFACSQCGQPLFVYKLEQVSEKGKAYTNYFGRCNVAEHEKLILLAQLKPEKDSDEAVTYSLGKFGQRALDFYSIHVTKESTHPVKPLAQIAGNRYASTPVGKALSDACMGTIASFLSKYQDIIIEHQKVVKGNQKRLESLRELAGKENLEYPSVTLPPQPHTKEGVDAYNEVIARVRMWVNLNLWQKLKLSRDDAKPLLRLKGFPSFPLVERQANEVDWWDMVCNVKKLINEKKEDGKVFWQNLAGYKRQEALRPYLSSEEDRKKGKKFARYQLGDLLLHLYKKHEGEDWGKVYDEAWERIDKKVEGLSKHIKLEEERRSEDAQSKAALTDWLRAKASFVIEGLKEADKDEFCRCELKLQKWYGDLRGKPFAIEAENSILDISGFSKQYNCAFIWQKDGVKKLNLYLIINYFKGGKLRFKKIKPEAFEANRFYTVINKKSGEIVPMEVNFNFDDPNLIILPLAFGKRQGREFIWNDLLSLETGSLKLANGRVIEKTLYNRRTRQDEPALFVALTFERREVLDSSNIKPMNLIGVDRGENIPAVIALTDPEGCPLSRFKDSLGNPTHILRIGESYKEKQRTIQAKKEVEQRRAGGYSRKYASKAKNLADDMVRNTARDLLYYAVTQDAMLIFENLSRGFGRQGKRTFMAERQYTRMEDWLTAKLAYEGLPSKTYLSKTLAQYTSKTCSNCGFTITSADYDRVLEKLKKTATGWMTTINGKELKVEGQITYYNRYKRQNVVKDLSVELDRLSEESVNNDISSWTKGRSGEALSLLKKRFSHRPVQEKFVCLNCGFETHADEQAALNIARSWLFLRSQEYKKYQTNKTTGNTDKRAFVETWQSFYRKKLKEVWKPAV

SEQ ID NO: 44604 - protein, 979 aa, synthetic construct
  REGION 1..979: note = engineered CasX variant
QEIKRINKIRRRLVKDSNTKKAGKTGPMKTLLVRVMTPDLRERLENLRKKPENIPQPISNTSRANLNKLLTDYTEMKKAILHVYWEEFQKDPVGLMSRVAQPASKKIDQNKLKPEMDEKGNLTTAGFACSQCGQPLFVYKLEQVSEKGKAYTNYFGRCNVAEHEKLILLAQLKPEKDSDEAVTYSLGKFGQRALDFYSIHVTKESTHPVKPLAQIAGNRYASAPVGKALSDACMGTIASFLSKYQDIIIEHQKVVKGNQKRLESLRELAGKENLEYPSVTLPPQPHTKEGVDAYNEVIARVRMWVNLNLWQKLKLSRDDAKPLLRLKGFPSFPLVERQANEVDWWDMVCNVKKLINEKKEDGKVFWQNLAGYKRQEALRPYLSSEEDRKKGKKFARYQLGDLLLHLYKKHEGEDWGKVYDEAWERIDKKVEGLSKHIKLEEERRSEDAQSKAALTDWLRAKASFVIEGLKEADKDEFCRCELKLQKWYGDLRGKPFAIEAENSILDISGFSKQYNCAFIWQKDGVKKLNLYLIINYFKGGKLRFKKIKPEAFEANRFYTVINKKSGEIVPMEVNFNFDDPNLIILPLAFGKRQGREFIWNDLLSLETGSLKLANGRVIEKTLYNRRTRQDEPALFVALTFERREVLDSSNIKPMNLIGVDRGENIPAVIALTDPEGCPLSRFKDSLGNPTHILRIGESYKEKQRTIQAKKEVEQRRAGGYSRKYASKAKNLADDMVRNTARDLLYYAVTQDAMLIFENLSRGFGRQGKRTFMAERQYTRMEDWLTAKLAYEGLPSKTYLSKTLAQYTSKTCSNCGFTITSADYDRVLEKLKKTATGWMTTINGKELKVEGQITYYNRYKRQNVVKDLSVELDRLSEESVNNDISSWTKGRSGEALSLLKKRFSHRPVQEKFVCLNCGFETHADEQAALNIARSWLFLRSQEYKKYQTNKTTGNTDKRAFVETWQSFYRKKLKEVWKPAV

SEQ ID NO: 44605 - protein, 979 aa, synthetic construct
  REGION 1..979: note = engineered CasX variant
QEIKRINKIRRRLVKDSNTKKAGKTGPMKTLLVRVMTPDLRERLENLRKKPENIPQPISNTSRANLNKLLTDYTEMKKAILHVYWEEFQKDPVGLMSRVAQPASKKIDQNKLKPEMDEKGNLTTAGFACSQCGQPLFVYKLEQVSEKGKAYTNYFGRCNVAEHEKLILLAQLKPEKDSDEAVTYSLGKFGQRALDFYSIHVTKESTHPVKPLAQIAGNRYASVPVGKALSDACMGTIASFLSKYQDIIIEHQKVVKGNQKRLESLRELAGKENLEYPSVTLPPQPHTKEGVDAYNEVIARVRMWVNLNLWQKLKLSRDDAKPLLRLKGFPSFPLVERQANEVDWWDMVCNVKKLINEKKEDGKVFWQNLAGYKRQEALRPYLSSEEDRKKGKKFARYQLGDLLLHLYKKHEGEDWGKVYDEAWERIDKKVEGLSKHIKLEEERRSEDAQSKAALTDWLRAKASFVIEGLKEADKDEFCRCELKLQKWYGDLRGKPFAIEAENSILDISGFSKQYNCAFIWQKDGVKKLNLYLIINYFKGGKLRFKKIKPEAFEANRFYTVINKKSGEIVPMEVNFNFDDPNLIILPLAFGKRQGREFIWNDLLSLETGSLKLANGRVIEKTLYNRRTRQDEPALFVALTFERREVLDSSNIKPMNLIGVDRGENIPAVIALTDPEGCPLSRFKDSLGNPTHILRIGESYKEKQRTIQAKKEVEQRRAGGYSRKYASKAKNLADDMVRNTARDLLYYAVTQDAMLIFENLSRGFGRQGKRTFMAERQYTRMEDWLTAKLAYEGLPSKTYLSKTLAQYTSKTCSNCGFTITSADYDRVLEKLKKTATGWMTTINGKELKVEGQITYYNRYKRQNVVKDLSVELDRLSEESVNNDISSWTKGRSGEALSLLKKRFSHRPVQEKFVCLNCGFETHADEQAALNIARSWLFLRSQEYKKYQTNKTTGNTDKRAFVETWQSFYRKKLKEVWKPAV

SEQ ID NO: 44606 - protein, 979 aa, synthetic construct
  REGION 1..979: note = engineered CasX variant
QEIKRINKIRRRLVKDSNTKKAGKTGPMKTLLVRVMTPDLRERLENLRKKPENIPQPISNTSRANLNKLLTDYTEMKKAILHVYWEEFQKDPVGLMSRVAQPASKKIDQNKLKPEMDEKGNLTTAGFACSQCGQPLFVYKLEQVSEKGKAYTNYFGRCNVAEHEKLIKLAQLKPEKDSDEAVTYSLGKFGQRALDFYSIHVTKESTHPVKPLAQIAGNRYASGPVGKALSDACMGTIASFLSKYQDIIIEHQKVVKGNQKRLESLRELAGKENLEYPSVTLPPQPHTKEGVDAYNEVIARVRMWVNLNLWQKLKLSRDDAKPLLRLKGFPSFPLVERQANEVDWWDMVCNVKKLINEKKEDGKVFWQNLAGYKRQEALRPYLSSEEDRKKGKKFARYQLGDLLLHLYKKHEGEDWGKVYDEAWERIDKKVEGLSKHIKLEEERRSEDAQSKAALTDWLRAKASFVIEGLKEADKDEFCRCELKLQKWYGDLRGKPFAIEAENSILDISGFSKQYNCAFIWQKDGVKKLNLYLIINYFKGGKLRFKKIKPEAFEANRFYTVINKKSGEIVPMEVNFNFDDPNLIILPLAFGKRQGREFIWNDLLSLETGSLKLANGRVIEKTLYNRRTRQDEPALFVALTFERREVLDSSNIKPMNLIGVDRGENIPAVIALTDPEGCPLSRFKDSLGNPTHILRIGESYKEKQRTIQAKKEVEQRRAGGYSRKYASKAKNLADDMVRNTARDLLYYAVTQDAMLIFENLSRGFGRQGKRTFMAERQYTRMEDWLTAKLAYEGLPSKTYLSKTLAQYTSKTCSNCGFTITSADYDRVLEKLKKTATGWMTTINGKELKVEGQITYYNRYKRQNVVKDLSVELDRLSEESVNNDISSWTKGRSGEALSLLKKRFSHRPVQEKFVCLNCGFETHADEQAALNIARSWLFLRSQEYKKYQTNKTTGNTDKRAFVETWQSFYRKKLKEVWKPAV

SEQ ID NO: 44607 - protein, 978 aa, synthetic construct
  REGION 1..978: note = engineered CasX variant
QEIKRINKIRRRLVKDSNTKKAGKTGPMKTLLVRVMTPDLRERLENLRKKPENIPQPISNTSRANLNKLLTDYTEMKKAILHVYWEEFQKDPVGLMSRVAQPASKKIDQNKLKPEMDEKGNLTTAGFACSQCGQPLFVYKLEQVSEKGKAYTNYFGRCNVAEHEKLILLAQLKPEKDSDEAVTYSLGKFGQRALDFYSIHVTKESTHPVKPLAQIAGNRYASPVGKALSDACMGTIASFLSKYQDIIIEHQKVVKGNQKRLESLRELAGKENLEYPSVTLPPQPHTKEGVDAYNEVIARVRMWVNLNLWQKLKLSRDDAKPLLRLKGFPSFPLVERQANEVDWWDMVCNVKKLINEKKEDGKVFWQNLAGYKRQEALRPYLSSEEDRKKGKKFARYQLGDLLLHLYKKHEGEDWGKVYDEAWERIDKKVEGLSKHIKLEEERRSEDAQSKAALTDWLRAKASFVIEGLKEADKDEFCRCELKLQKWYGDLRGKPFAIEAENSILDISGFSKQYNCAFIWQKDGVKKLNLYLIINYFKGGKLRFKKIKPEAFEANRFYTVINKKSGEIVPMEVNFNFDDPNLIILPLAFGKRQGREFIWNDLLSLETGSLKLANGRVIEKTLYNRRTRQDEPALFVALTFERREVLDSSNIKPMNLIGVDRGENIPAVIALTDPEGCPLSRFKDSLGNPTHILRIGESYKEKQRTIQAKKEVEQRRAGGYSRKYASKAKNLADDMVRNTARDLLYYAVTQDAMLIFENLSRGFGRQGKRTFMAERQYTRMEDWLTAKLAYEGLPSKTYLSKTLAQYTSKTCSNCGFTITSADYDRVLEKLKKTATGWMTTINGKELKVEGQITYYNRYKRQNVVKDLSVELDRLSEESVNNDISSWTKGRSGEALSLLKKRFSHRPVQEKFVCLNCGFETHADEQAALNIARSWLFLRSQEYKKYQTNKTTGNTDKRAFVETWQSFYRKKLKEVWKPAV

SEQ ID NO: 44608 - protein, 979 aa, synthetic construct
  REGION 1..979: note = engineered CasX variant
QEIKRINKIRRRLVKDSNTKKAGKTGPMKTLLVRVMTPDLRERLENLRKKPENIPQPISNTSRANLNKLLTDYTEMKKAILHVYWEEFQKDPVGLMSRVAQPASKKIDQNKLKPEMDEKGNLTTAGFACSQCGQPLFVYKLEQVSEKGKAYTNYFGRCNVAEHEKLILLAQLKPEKDSDEAVTYSLGKFGQRALDFYSIHVTKESTHPVKPLAQIAGNRYASYPVGKALSDACMGTIASFLSKYQDIIIEHQKVVKGNQKRLESLRELAGKENLEYPSVTLPPQPHTKEGVDAYNEVIARVRMWVNLNLWQKLKLSRDDAKPLLRLKGFPSFPLVERQANEVDWWDMVCNVKKLINEKKEDGKVFWQNLAGYKRQEALRPYLSSEEDRKKGKKFARYQLGDLLLHLEKKHEPEDWGKVYDEAWERIDKKVEGLSKHIKLEEERRSEDAQSKAALTDWLRAKASFVIEGLKEADKDEFCRCELKLQKWYGDLRGKPFAIEAENSILDISGFSKQYNCAFIWQKDGVKKLNLYLIINYFKGGKLRFKKIKPEAFEANRFYTVINKKSGEIVPMEVNFNFDDPNLIILPLAFGKRQGREFIWNDLLSLETGSLKLANGRVIEKTLYNRRTRQDEPALFVALTFERREVLDSSNIKPMNLIGVDRGENIPAVIALTDPEGCPLSRFKDSLGNPTHILRIGESYKEKQRTIQAKKEVEQRRAGGYSRKYASKAKNLADDMVRNTARDLLYYAVTQDAMLIFENLSRGFGRQGKRTFMAERQYTRMEDWLTAKLAYEGLPSKTYLSKTLAQYTSKTCSNCGFTITSADYDRVLEKLKKTATGWMTTINGKELKVEGQITYYNRYKRQNVVKDLSVELDRLSEESVNNDISSWTKGRSGEALSLLKKRFSHRPVQEKFVCLNCGFETHADEQAALNIARSWLFLRSQEYKKYQTNKTTGNTDKRAFVETWQSFYRKKLKEVWKPAV

SEQ ID NO: 44609 - protein, 979 aa, synthetic construct
  REGION 1..979: note = engineered CasX variant
QEIKRINKIRRRLVKDSNTKKAGKTGPMKTLLVRVMTPDLRERLENLRKKPENIPQPISNTSRANLNKLLTDYTEMKKAILHVYWEEFQKDPVGLMSRVAQPASKKIDQNKLKPEMDEKGNLTTAGFACSQCGQPLFVYKLEQVSEKGKAYTNYFGRCNVAEHEKLILLAQLKPEKDSDEAVTYSLGKFGQRALDFYSIHVTKESTHPVKPLAQIAGNRYASHPVGKALSDACMGTIASFLSKYQDIIIEHQKVVKGNQKRLESLRELAGKENLEYPSVTLPPQPHTKEGVDAYNEVIARVRMWVNLNLWQKLKLSRDDAKPLLRLKGFPSFPLVERQANEVDWWDMVCNVKKLINEKKEDGKVFWQNLAGYKRQEALRPYLSSEEDRKKGKKFARYQLGDLLLHLEKKHEPEDWGKVYDEAWERIDKKVEGLSKHIKLEEERRSEDAQSKAALTDWLRAKASFVIEGLKEADKDEFCRCELKLQKWYGDLRGKPFAIEAENSILDISGFSKQYNCAFIWQKDGVKKLNLYLIINYFKGGKLRFKKIKPEAFEANRFYTVINKKSGEIVPMEVNFNFDDPNLIILPLAFGKRQGREFIWNDLLSLETGSLKLANGRVIEKTLYNRRTRQDEPALFVALTFERREVLDSSNIKPMNLIGVDRGENIPAVIALTDPEGCPLSRFKDSLGNPTHILRIGESYKEKQRTIQAKKEVEQRRAGGYSRKYASKAKNLADDMVRNTARDLLYYAVTQDAMLIFENLSRGFGRQGKRTFMAERQYTRMEDWLTAKLAYEGLPSKTYLSKTLAQYTSKTCSNCGFTITSADYDRVLEKLKKTATGWMTTINGKELKVEGQITYYNRYKRQNVVKDLSVELDRLSEESVNNDISSWTKGRSGEALSLLKKRFSHRPVQEKFVCLNCGFETHADEQAALNIARSWLFLRSQEYKKYQTNKTTGNTDKRAFVETWQSFYRKKLKEVWKPAV

SEQ ID NO: 44610 - protein, 979 aa, synthetic construct
  REGION 1..979: note = engineered CasX variant
QEIKRINKIRRRLVKDSNTKKAGKTGPMKTLLVRVMTPDLRERLENLRKKPENIPQPISNTSRANLNKLLTDYTEMKKAILHVYWEEFQKDPVGLMSRVAQPASKKIDQNKLKPEMDEKGNLTTAGFACSQCGQPLFVYKLEQVSEKGKAYTNYFGRCNVAEHEKLILLAQLKPEKDSDEAVTYSLGKFGQRALDFYSIHVTKESTHPVKPLAQIAGNRYASSPVGKALSDACMGTIASFLSKYQDIIIEHQKVVKGNQKRLESLRELAGKENLEYPSVTLPPQPHTKEGVDAYNEVIARVRMWVNLNLWQKLKLSRDDAKPLLRLKGFPSFPLVERQANEVDWWDMVCNVKKLINEKKEDGKVFWQNLAGYKRQEALRPYLSSEEDRKKGKKFARYQLGDLLLHLEKKHEPEDWGKVYDEAWERIDKKVEGLSKHIKLEEERRSEDAQSKAALTDWLRAKASFVIEGLKEADKDEFCRCELKLQKWYGDLRGKPFAIEAENSILDISGFSKQYNCAFIWQKDGVKKLNLYLIINYFKGGKLRFKKIKPEAFEANRFYTVINKKSGEIVPMEVNFNFDDPNLIILPLAFGKRQGREFIWNDLLSLETGSLKLANGRVIEKTLYNRRTRQDEPALFVALTFERREVLDSSNIKPMNLIGVDRGENIPAVIALTDPEGCPLSRFKDSLGNPTHILRIGESYKEKQRTIQAKKEVEQRRAGGYSRKYASKAKNLADDMVRNTARDLLYYAVTQDAMLIFENLSRGFGRQGKRTFMAERQYTRMEDWLTAKLAYEGLPSKTYLSKTLAQYTSKTCSNCGFTITSADYDRVLEKLKKTATGWMTTINGKELKVEGQITYYNRYKRQNVVKDLSVELDRLSEESVNNDISSWTKGRSGEALSLLKKRFSHRPVQEKFVCLNCGFETHADEQAALNIARSWLFLRSQEYKKYQTNKTTGNTDKRAFVETWQSFYRKKLKEVWKPAV

SEQ ID NO: 44611 - protein, 979 aa, synthetic construct
  REGION 1..979: note = engineered CasX variant
QEIKRINKIRRRLVKDSNTKKAGKTGPMKTLLVRVMTPDLRERLENLRKKPENIPQPISNTSRANLNKLLTDYTEMKKAILHVYWEEFQKDPVGLMSRVAQPASKKIDQNKLKPEMDEKGNLTTAGFACSQCGQPLFVYKLEQVSEKGKAYTNYFGRCNVAEHEKLILLAQLKPEKDSDEAVTYSLGKFGQRALDFYSIHVTKESTHPVKPLAQIAGNRYASTPVGKALSDACMGTIASFLSKYQDIIIEHQKVVKGNQKRLESLRELAGKENLEYPSVTLPPQPHTKEGVDAYNEVIARVRMWVNLNLWQKLKLSRDDAKPLLRLKGFPSFPLVERQANEVDWWDMVCNVKKLINEKKEDGKVFWQNLAGYKRQEALRPYLSSEEDRKKGKKFARYQLGDLLLHLEKKHEPEDWGKVYDEAWERIDKKVEGLSKHIKLEEERRSEDAQSKAALTDWLRAKASFVIEGLKEADKDEFCRCELKLQKWYGDLRGKPFAIEAENSILDISGFSKQYNCAFIWQKDGVKKLNLYLIINYFKGGKLRFKKIKPEAFEANRFYTVINKKSGEIVPMEVNFNFDDPNLIILPLAFGKRQGREFIWNDLLSLETGSLKLANGRVIEKTLYNRRTRQDEPALFVALTFERREVLDSSNIKPMNLIGVDRGENIPAVIALTDPEGCPLSRFKDSLGNPTHILRIGESYKEKQRTIQAKKEVEQRRAGGYSRKYASKAKNLADDMVRNTARDLLYYAVTQDAMLIFENLSRGFGRQGKRTFMAERQYTRMEDWLTAKLAYEGLPSKTYLSKTLAQYTSKTCSNCGFTITSADYDRVLEKLKKTATGWMTTINGKELKVEGQITYYNRYKRQNVVKDLSVELDRLSEESVNNDISSWTKGRSGEALSLLKKRFSHRPVQEKFVCLNCGFETHADEQAALNIARSWLFLRSQEYKKYQTNKTTGNTDKRAFVETWQSFYRKKLKEVWKPAV

SEQ ID NO: 44612 - protein, 979 aa, synthetic construct
  REGION 1..979: note = engineered CasX variant
QEIKRINKIRRRLVKDSNTKKAGKTGPMKTLLVRVMTPDLRERLENLRKKPENIPQPISNTSRANLNKLLTDYTEMKKAILHVYWEEFQKDPVGLMSRVAQPASKKIDQNKLKPEMDEKGNLTTAGFACSQCGQPLFVYKLEQVSEKGKAYTNYFGRCNVAEHEKLILLAQLKPEKDSDEAVTYSLGKFGQRALDFYSIHVTKESTHPVKPLAQIAGNRYASAPVGKALSDACMGTIASFLSKYQDIIIEHQKVVKGNQKRLESLRELAGKENLEYPSVTLPPQPHTKEGVDAYNEVIARVRMWVNLNLWQKLKLSRDDAKPLLRLKGFPSFPLVERQANEVDWWDMVCNVKKLINEKKEDGKVFWQNLAGYKRQEALRPYLSSEEDRKKGKKFARYQLGDLLLHLEKKHEPEDWGKVYDEAWERIDKKVEGLSKHIKLEEERRSEDAQSKAALTDWLRAKASFVIEGLKEADKDEFCRCELKLQKWYGDLRGKPFAIEAENSILDISGFSKQYNCAFIWQKDGVKKLNLYLIINYFKGGKLRFKKIKPEAFEANRFYTVINKKSGEIVPMEVNFNFDDPNLIILPLAFGKRQGREFIWNDLLSLETGSLKLANGRVIEKTLYNRRTRQDEPALFVALTFERREVLDSSNIKPMNLIGVDRGENIPAVIALTDPEGCPLSRFKDSLGNPTHILRIGESYKEKQRTIQAKKEVEQRRAGGYSRKYASKAKNLADDMVRNTARDLLYYAVTQDAMLIFENLSRGFGRQGKRTFMAERQYTRMEDWLTAKLAYEGLPSKTYLSKTLAQYTSKTCSNCGFTITSADYDRVLEKLKKTATGWMTTINGKELKVEGQITYYNRYKRQNVVKDLSVELDRLSEESVNNDISSWTKGRSGEALSLLKKRFSHRPVQEKFVCLNCGFETHADEQAALNIARSWLFLRSQEYKKYQTNKTTGNTDKRAFVETWQSFYRKKLKEVWKPAV

SEQ ID NO: 44613 - protein, 979 aa, synthetic construct
  REGION 1..979: note = engineered CasX variant
QEIKRINKIRRRLVKDSNTKKAGKTGPMKTLLVRVMTPDLRERLENLRKKPENIPQPISNTSRANLNKLLTDYTEMKKAILHVYWEEFQKDPVGLMSRVAQPASKKIDQNKLKPEMDEKGNLTTAGFACSQCGQPLFVYKLEQVSEKGKAYTNYFGRCNVAEHEKLILLAQLKPEKDSDEAVTYSLGKFGQRALDFYSIHVTKESTHPVKPLAQIAGNRYASVPVGKALSDACMGTIASFLSKYQDIIIEHQKVVKGNQKRLESLRELAGKENLEYPSVTLPPQPHTKEGVDAYNEVIARVRMWVNLNLWQKLKLSRDDAKPLLRLKGFPSFPLVERQANEVDWWDMVCNVKKLINEKKEDGKVFWQNLAGYKRQEALRPYLSSEEDRKKGKKFARYQLGDLLLHLEKKHEPEDWGKVYDEAWERIDKKVEGLSKHIKLEEERRSEDAQSKAALTDWLRAKASFVIEGLKEADKDEFCRCELKLQKWYGDLRGKPFAIEAENSILDISGFSKQYNCAFIWQKDGVKKLNLYLIINYFKGGKLRFKKIKPEAFEANRFYTVINKKSGEIVPMEVNFNFDDPNLIILPLAFGKRQGREFIWNDLLSLETGSLKLANGRVIEKTLYNRRTRQDEPALFVALTFERREVLDSSNIKPMNLIGVDRGENIPAVIALTDPEGCPLSRFKDSLGNPTHILRIGESYKEKQRTIQAKKEVEQRRAGGYSRKYASKAKNLADDMVRNTARDLLYYAVTQDAMLIFENLSRGFGRQGKRTFMAERQYTRMEDWLTAKLAYEGLPSKTYLSKTLAQYTSKTCSNCGFTITSADYDRVLEKLKKTATGWMTTINGKELKVEGQITYYNRYKRQNVVKDLSVELDRLSEESVNNDISSWTKGRSGEALSLLKKRFSHRPVQEKFVCLNCGFETHADEQAALNIARSWLFLRSQEYKKYQTNKTTGNTDKRAFVETWQSFYRKKLKEVWKPAV

SEQ ID NO: 44614 - protein, 979 aa, synthetic construct
  REGION 1..979: note = engineered CasX variant
QEIKRINKIRRRLVKDSNTKKAGKTGPMKTLLVRVMTPDLRERLENLRKKPENIPQPISNTSRANLNKLLTDYTEMKKAILHVYWEEFQKDPVGLMSRVAQPASKKIDQNKLKPEMDEKGNLTTAGFACSQCGQPLFVYKLEQVSEKGKAYTNYFGRCNVAEHEKLIKLAQLKPEKDSDEAVTYSLGKFGQRALDFYSIHVTKESTHPVKPLAQIAGNRYASGPVGKALSDACMGTIASFLSKYQDIIIEHQKVVKGNQKRLESLRELAGKENLEYPSVTLPPQPHTKEGVDAYNEVIARVRMWVNLNLWQKLKLSRDDAKPLLRLKGFPSFPLVERQANEVDWWDMVCNVKKLINEKKEDGKVFWQNLAGYKRQEALRPYLSSEEDRKKGKKFARYQLGDLLLHLEKKHEPEDWGKVYDEAWERIDKKVEGLSKHIKLEEERRSEDAQSKAALTDWLRAKASFVIEGLKEADKDEFCRCELKLQKWYGDLRGKPFAIEAENSILDISGFSKQYNCAFIWQKDGVKKLNLYLIINYFKGGKLRFKKIKPEAFEANRFYTVINKKSGEIVPMEVNFNFDDPNLIILPLAFGKRQGREFIWNDLLSLETGSLKLANGRVIEKTLYNRRTRQDEPALFVALTFERREVLDSSNIKPMNLIGVDRGENIPAVIALTDPEGCPLSRFKDSLGNPTHILRIGESYKEKQRTIQAKKEVEQRRAGGYSRKYASKAKNLADDMVRNTARDLLYYAVTQDAMLIFENLSRGFGRQGKRTFMAERQYTRMEDWLTAKLAYEGLPSKTYLSKTLAQYTSKTCSNCGFTITSADYDRVLEKLKKTATGWMTTINGKELKVEGQITYYNRYKRQNVVKDLSVELDRLSEESVNNDISSWTKGRSGEALSLLKKRFSHRPVQEKFVCLNCGFETHADEQAALNIARSWLFLRSQEYKKYQTNKTTGNTDKRAFVETWQSFYRKKLKEVWKPAV

SEQ ID NO: 44615 - protein, 978 aa, synthetic construct
  REGION 1..978: note = engineered CasX variant
QEIKRINKIRRRLVKDSNTKKAGKTGPMKTLLVRVMTPDLRERLENLRKKPENIPQPISNTSRANLNKLLTDYTEMKKAILHVYWEEFQKDPVGLMSRVAQPASKKIDQNKLKPEMDEKGNLTTAGFACSQCGQPLFVYKLEQVSEKGKAYTNYFGRCNVAEHEKLILLAQLKPEKDSDEAVTYSLGKFGQRALDFYSIHVTKESTHPVKPLAQIAGNRYASPVGKALSDACMGTIASFLSKYQDIIIEHQKVVKGNQKRLESLRELAGKENLEYPSVTLPPQPHTKEGVDAYNEVIARVRMWVNLNLWQKLKLSRDDAKPLLRLKGFPSFPLVERQANEVDWWDMVCNVKKLINEKKEDGKVFWQNLAGYKRQEALRPYLSSEEDRKKGKKFARYQLGDLLLHLEKKHEPEDWGKVYDEAWERIDKKVEGLSKHIKLEEERRSEDAQSKAALTDWLRAKASFVIEGLKEADKDEFCRCELKLQKWYGDLRGKPFAIEAENSILDISGFSKQYNCAFIWQKDGVKKLNLYLIINYFKGGKLRFKKIKPEAFEANRFYTVINKKSGEIVPMEVNFNFDDPNLIILPLAFGKRQGREFIWNDLLSLETGSLKLANGRVIEKTLYNRRTRQDEPALFVALTFERREVLDSSNIKPMNLIGVDRGENIPAVIALTDPEGCPLSRFKDSLGNPTHILRIGESYKEKQRTIQAKKEVEQRRAGGYSRKYASKAKNLADDMVRNTARDLLYYAVTQDAMLIFENLSRGFGRQGKRTFMAERQYTRMEDWLTAKLAYEGLPSKTYLSKTLAQYTSKTCSNCGFTITSADYDRVLEKLKKTATGWMTTINGKELKVEGQITYYNRYKRQNVVKDLSVELDRLSEESVNNDISSWTKGRSGEALSLLKKRFSHRPVQEKFVCLNCGFETHADEQAALNIARSWLFLRSQEYKKYQTNKTTGNTDKRAFVETWQSFYRKKLKEVWKPAV

SEQ ID NO: 44616 - protein, 980 aa, synthetic construct
  REGION 1..980: note = engineered CasX variant
QEIKRINKIRRRLVKDSNTKKAGKTGPMKTLLVRVMTPDLRERLENLRKKPENIPQPISNTSRANLNKLLTDYTEMKKAILHVYWEEFQKDPVGLMSRVAQPASKKIDQNKLKPEMDEKGNLTTAGFACSQCGQPLFVYKLEQVSEKGKAYTNYFGRCNVAEHEKLILLAQLKPEKDSDEAVTYSLGKFGQRALDFYSIHVTKESTHPVKPLAQIAGNRYASYPVGKALSDACMGTIASFLSKYQDIIIEHQKVVKGNQKRLESLRELAGKENLEYPSVTLPPQPHTKEGVDAYNEVIARVRMWVNLNLWQKLKLSRDDAKPLLRLKGFPSFPLVERQANEVDWWDMVCNVKKLINEKKEDGKVFWQNLAGYKRQEALRPYLSSEEDRKKGKKFARYQLGDLLLHLEKKHEGERDWGKVYDEAWERIDKKVEGLSKHIKLEEERRSEDAQSKAALTDWLRAKASFVIEGLKEADKDEFCRCELKLQKWYGDLRGKPFAIEAENSILDISGFSKQYNCAFIWQKDGVKKLNLYLIINYFKGGKLRFKKIKPEAFEANRFYTVINKKSGEIVPMEVNFNFDDPNLIILPLAFGKRQGREFIWNDLLSLETGSLKLANGRVIEKTLYNRRTRQDEPALFVALTFERREVLDSSNIKPMNLIGVDRGENIPAVIALTDPEGCPLSRFKDSLGNPTHILRIGESYKEKQRTIQAKKEVEQRRAGGYSRKYASKAKNLADDMVRNTARDLLYYAVTQDAMLIFENLSRGFGRQGKRTFMAERQYTRMEDWLTAKLAYEGLPSKTYLSKTLAQYTSKTCSNCGFTITSADYDRVLEKLKKTATGWMTTINGKELKVEGQITYYNRYKRQNVVKDLSVELDRLSEESVNNDISSWTKGRSGEALSLLKKRFSHRPVQEKFVCLNCGFETHADEQAALNIARSWLFLRSQEYKKYQTNKTTGNTDKRAFVETWQSFYRKKLKEVWKPAV

SEQ ID NO: 44617 - protein, 980 aa, synthetic construct
  REGION 1..980: note = engineered CasX variant
QEIKRINKIRRRLVKDSNTKKAGKTGPMKTLLVRVMTPDLRERLENLRKKPENIPQPISNTSRANLNKLLTDYTEMKKAILHVYWEEFQKDPVGLMSRVAQPASKKIDQNKLKPEMDEKGNLTTAGFACSQCGQPLFVYKLEQVSEKGKAYTNYFGRCNVAEHEKLILLAQLKPEKDSDEAVTYSLGKFGQRALDFYSIHVTKESTHPVKPLAQIAGNRYASHPVGKALSDACMGTIASFLSKYQDIIIEHQKVVKGNQKRLESLRELAGKENLEYPSVTLPPQPHTKEGVDAYNEVIARVRMWVNLNLWQKLKLSRDDAKPLLRLKGFPSFPLVERQANEVDWWDMVCNVKKLINEKKEDGKVFWQNLAGYKRQEALRPYLSSEEDRKKGKKFARYQLGDLLLHLEKKHEGERDWGKVYDEAWERIDKKVEGLSKHIKLEEERRSEDAQSKAALTDWLRAKASFVIEGLKEADKDEFCRCELKLQKWYGDLRGKPFAIEAENSILDISGFSKQYNCAFIWQKDGVKKLNLYLIINYFKGGKLRFKKIKPEAFEANRFYTVINKKSGEIVPMEVNFNFDDPNLIILPLAFGKRQGREFIWNDLLSLETGSLKLANGRVIEKTLYNRRTRQDEPALFVALTFERREVLDSSNIKPMNLIGVDRGENIPAVIALTDPEGCPLSRFKDSLGNPTHILRIGESYKEKQRTIQAKKEVEQRRAGGYSRKYASKAKNLADDMVRNTARDLLYYAVTQDAMLIFENLSRGFGRQGKRTFMAERQYTRMEDWLTAKLAYEGLPSKTYLSKTLAQYTSKTCSNCGFTITSADYDRVLEKLKKTATGWMTTINGKELKVEGQITYYNRYKRQNVVKDLSVELDRLSEESVNNDISSWTKGRSGEALSLLKKRFSHRPVQEKFVCLNCGFETHADEQAALNIARSWLFLRSQEYKKYQTNKTTGNTDKRAFVETWQSFYRKKLKEVWKPAV

SEQ ID NO: 44618 - protein, 980 aa, synthetic construct
  REGION 1..980: note = engineered CasX variant
QEIKRINKIRRRLVKDSNTKKAGKTGPMKTLLVRVMTPDLRERLENLRKKPENIPQPISNTSRANLNKLLTDYTEMKKAILHVYWEEFQKDPVGLMSRVAQPASKKIDQNKLKPEMDEKGNLTTAGFACSQCGQPLFVYKLEQVSEKGKAYTNYFGRCNVAEHEKLILLAQLKPEKDSDEAVTYSLGKFGQRALDFYSIHVTKESTHPVKPLAQIAGNRYASSPVGKALSDACMGTIASFLSKYQDIIIEHQKVVKGNQKRLESLRELAGKENLEYPSVTLPPQPHTKEGVDAYNEVIARVRMWVNLNLWQKLKLSRDDAKPLLRLKGFPSFPLVERQANEVDWWDMVCNVKKLINEKKEDGKVFWQNLAGYKRQEALRPYLSSEEDRKKGKKFARYQLGDLLLHLEKKHEGERDWGKVYDEAWERIDKKVEGLSKHIKLEEERRSEDAQSKAALTDWLRAKASFVIEGLKEADKDEFCRCELKLQKWYGDLRGKPFAIEAENSILDISGFSKQYNCAFIWQKDGVKKLNLYLIINYFKGGKLRFKKIKPEAFEANRFYTVINKKSGEIVPMEVNFNFDDPNLIILPLAFGKRQGREFIWNDLLSLETGSLKLANGRVIEKTLYNRRTRQDEPALFVALTFERREVLDSSNIKPMNLIGVDRGENIPAVIALTDPEGCPLSRFKDSLGNPTHILRIGESYKEKQRTIQAKKEVEQRRAGGYSRKYASKAKNLADDMVRNTARDLLYYAVTQDAMLIFENLSRGFGRQGKRTFMAERQYTRMEDWLTAKLAYEGLPSKTYLSKTLAQYTSKTCSNCGFTITSADYDRVLEKLKKTATGWMTTINGKELKVEGQITYYNRYKRQNVVKDLSVELDRLSEESVNNDISSWTKGRSGEALSLLKKRFSHRPVQEKFVCLNCGFETHADEQAALNIARSWLFLRSQEYKKYQTNKTTGNTDKRAFVETWQSFYRKKLKEVWKPAV

SEQ ID NO: 44619 - protein, 980 aa, synthetic construct
  REGION 1..980: note = engineered CasX variant
QEIKRINKIRRRLVKDSNTKKAGKTGPMKTLLVRVMTPDLRERLENLRKKPENIPQPISNTSRANLNKLLTDYTEMKKAILHVYWEEFQKDPVGLMSRVAQPASKKIDQNKLKPEMDEKGNLTTAGFACSQCGQPLFVYKLEQVSEKGKAYTNYFGRCNVAEHEKLILLAQLKPEKDSDEAVTYSLGKFGQRALDFYSIHVTKESTHPVKPLAQIAGNRYASTPVGKALSDACMGTIASFLSKYQDIIIEHQKVVKGNQKRLESLRELAGKENLEYPSVTLPPQPHTKEGVDAYNEVIARVRMWVNLNLWQKLKLSRDDAKPLLRLKGFPSFPLVERQANEVDWWDMVCNVKKLINEKKEDGKVFWQNLAGYKRQEALRPYLSSEEDRKKGKKFARYQLGDLLLHLEKKHEGERDWGKVYDEAWERIDKKVEGLSKHIKLEEERRSEDAQSKAALTDWLRAKASFVIEGLKEADKDEFCRCELKLQKWYGDLRGKPFAIEAENSILDISGFSKQYNCAFIWQKDGVKKLNLYLIINYFKGGKLRFKKIKPEAFEANRFYTVINKKSGEIVPMEVNFNFDDPNLIILPLAFGKRQGREFIWNDLLSLETGSLKLANGRVIEKTLYNRRTRQDEPALFVALTFERREVLDSSNIKPMNLIGVDRGENIPAVIALTDPEGCPLSRFKDSLGNPTHILRIGESYKEKQRTIQAKKEVEQRRAGGYSRKYASKAKNLADDMVRNTARDLLYYAVTQDAMLIFENLSRGFGRQGKRTFMAERQYTRMEDWLTAKLAYEGLPSKTYLSKTLAQYTSKTCSNCGFTITSADYDRVLEKLKKTATGWMTTINGKELKVEGQITYYNRYKRQNVVKDLSVELDRLSEESVNNDISSWTKGRSGEALSLLKKRFSHRPVQEKFVCLNCGFETHADEQAALNIARSWLFLRSQEYKKYQTNKTTGNTDKRAFVETWQSFYRKKLKEVWKPAV

SEQ ID NO: 44620 - protein, 980 aa, synthetic construct
  REGION 1..980: note = engineered CasX variant
QEIKRINKIRRRLVKDSNTKKAGKTGPMKTLLVRVMTPDLRERLENLRKKPENIPQPISNTSRANLNKLLTDYTEMKKAILHVYWEEFQKDPVGLMSRVAQPASKKIDQNKLKPEMDEKGNLTTAGFACSQCGQPLFVYKLEQVSEKGKAYTNYFGRCNVAEHEKLILLAQLKPEKDSDEAVTYSLGKFGQRALDFYSIHVTKESTHPVKPLAQIAGNRYASAPVGKALSDACMGTIASFLSKYQDIIIEHQKVVKGNQKRLESLRELAGKENLEYPSVTLPPQPHTKEGVDAYNEVIARVRMWVNLNLWQKLKLSRDDAKPLLRLKGFPSFPLVERQANEVDWWDMVCNVKKLINEKKEDGKVFWQNLAGYKRQEALRPYLSSEEDRKKGKKFARYQLGDLLLHLEKKHEGERDWGKVYDEAWERIDKKVEGLSKHIKLEEERRSEDAQSKAALTDWLRAKASFVIEGLKEADKDEFCRCELKLQKWYGDLRGKPFAIEAENSILDISGFSKQYNCAFIWQKDGVKKLNLYLIINYFKGGKLRFKKIKPEAFEANRFYTVINKKSGEIVPMEVNFNFDDPNLIILPLAFGKRQGREFIWNDLLSLETGSLKLANGRVIEKTLYNRRTRQDEPALFVALTFERREVLDSSNIKPMNLIGVDRGENIPAVIALTDPEGCPLSRFKDSLGNPTHILRIGESYKEKQRTIQAKKEVEQRRAGGYSRKYASKAKNLADDMVRNTARDLLYYAVTQDAMLIFENLSRGFGRQGKRTFMAERQYTRMEDWLTAKLAYEGLPSKTYLSKTLAQYTSKTCSNCGFTITSADYDRVLEKLKKTATGWMTTINGKELKVEGQITYYNRYKRQNVVKDLSVELDRLSEESVNNDISSWTKGRSGEALSLLKKRFSHRPVQEKFVCLNCGFETHADEQAALNIARSWLFLRSQEYKKYQTNKTTGNTDKRAFVETWQSFYRKKLKEVWKPAV

SEQ ID NO: 44621 - protein, 980 aa, synthetic construct
  REGION 1..980: note = engineered CasX variant
QEIKRINKIRRRLVKDSNTKKAGKTGPMKTLLVRVMTPDLRERLENLRKKPENIPQPISNTSRANLNKLLTDYTEMKKAILHVYWEEFQKDPVGLMSRVAQPASKKIDQNKLKPEMDEKGNLTTAGFACSQCGQPLFVYKLEQVSEKGKAYTNYFGRCNVAEHEKLILLAQLKPEKDSDEAVTYSLGKFGQRALDFYSIHVTKESTHPVKPLAQIAGNRYASVPVGKALSDACMGTIASFLSKYQDIIIEHQKVVKGNQKRLESLRELAGKENLEYPSVTLPPQPHTKEGVDAYNEVIARVRMWVNLNLWQKLKLSRDDAKPLLRLKGFPSFPLVERQANEVDWWDMVCNVKKLINEKKEDGKVFWQNLAGYKRQEALRPYLSSEEDRKKGKKFARYQLGDLLLHLEKKHEGERDWGKVYDEAWERIDKKVEGLSKHIKLEEERRSEDAQSKAALTDWLRAKASFVIEGLKEADKDEFCRCELKLQKWYGDLRGKPFAIEAENSILDISGFSKQYNCAFIWQKDGVKKLNLYLIINYFKGGKLRFKKIKPEAFEANRFYTVINKKSGEIVPMEVNFNFDDPNLIILPLAFGKRQGREFIWNDLLSLETGSLKLANGRVIEKTLYNRRTRQDEPALFVALTFERREVLDSSNIKPMNLIGVDRGENIPAVIALTDPEGCPLSRFKDSLGNPTHILRIGESYKEKQRTIQAKKEVEQRRAGGYSRKYASKAKNLADDMVRNTARDLLYYAVTQDAMLIFENLSRGFGRQGKRTFMAERQYTRMEDWLTAKLAYEGLPSKTYLSKTLAQYTSKTCSNCGFTITSADYDRVLEKLKKTATGWMTTINGKELKVEGQITYYNRYKRQNVVKDLSVELDRLSEESVNNDISSWTKGRSGEALSLLKKRFSHRPVQEKFVCLNCGFETHADEQAALNIARSWLFLRSQEYKKYQTNKTTGNTDKRAFVETWQSFYRKKLKEVWKPAV

SEQ ID NO: 44622 - protein, 980 aa, synthetic construct
  REGION 1..980: note = engineered CasX variant
QEIKRINKIRRRLVKDSNTKKAGKTGPMKTLLVRVMTPDLRERLENLRKKPENIPQPISNTSRANLNKLLTDYTEMKKAILHVYWEEFQKDPVGLMSRVAQPASKKIDQNKLKPEMDEKGNLTTAGFACSQCGQPLFVYKLEQVSEKGKAYTNYFGRCNVAEHEKLIKLAQLKPEKDSDEAVTYSLGKFGQRALDFYSIHVTKESTHPVKPLAQIAGNRYASGPVGKALSDACMGTIASFLSKYQDIIIEHQKVVKGNQKRLESLRELAGKENLEYPSVTLPPQPHTKEGVDAYNEVIARVRMWVNLNLWQKLKLSRDDAKPLLRLKGFPSFPLVERQANEVDWWDMVCNVKKLINEKKEDGKVFWQNLAGYKRQEALRPYLSSEEDRKKGKKFARYQLGDLLLHLEKKHEGERDWGKVYDEAWERIDKKVEGLSKHIKLEEERRSEDAQSKAALTDWLRAKASFVIEGLKEADKDEFCRCELKLQKWYGDLRGKPFAIEAENSILDISGFSKQYNCAFIWQKDGVKKLNLYLIINYFKGGKLRFKKIKPEAFEANRFYTVINKKSGEIVPMEVNFNFDDPNLIILPLAFGKRQGREFIWNDLLSLETGSLKLANGRVIEKTLYNRRTRQDEPALFVALTFERREVLDSSNIKPMNLIGVDRGENIPAVIALTDPEGCPLSRFKDSLGNPTHILRIGESYKEKQRTIQAKKEVEQRRAGGYSRKYASKAKNLADDMVRNTARDLLYYAVTQDAMLIFENLSRGFGRQGKRTFMAERQYTRMEDWLTAKLAYEGLPSKTYLSKTLAQYTSKTCSNCGFTITSADYDRVLEKLKKTATGWMTTINGKELKVEGQITYYNRYKRQNVVKDLSVELDRLSEESVNNDISSWTKGRSGEALSLLKKRFSHRPVQEKFVCLNCGFETHADEQAALNIARSWLFLRSQEYKKYQTNKTTGNTDKRAFVETWQSFYRKKLKEVWKPAV

SEQ ID NO: 44623 - protein, 979 aa, synthetic construct
  REGION 1..979: note = engineered CasX variant
QEIKRINKIRRRLVKDSNTKKAGKTGPMKTLLVRVMTPDLRERLENLRKKPENIPQPISNTSRANLNKLLTDYTEMKKAILHVYWEEFQKDPVGLMSRVAQPASKKIDQNKLKPEMDEKGNLTTAGFACSQCGQPLFVYKLEQVSEKGKAYTNYFGRCNVAEHEKLILLAQLKPEKDSDEAVTYSLGKFGQRALDFYSIHVTKESTHPVKPLAQIAGNRYASPVGKALSDACMGTIASFLSKYQDIIIEHQKVVKGNQKRLESLRELAGKENLEYPSVTLPPQPHTKEGVDAYNEVIARVRMWVNLNLWQKLKLSRDDAKPLLRLKGFPSFPLVERQANEVDWWDMVCNVKKLINEKKEDGKVFWQNLAGYKRQEALRPYLSSEEDRKKGKKFARYQLGDLLLHLEKKHEGERDWGKVYDEAWERIDKKVEGLSKHIKLEEERRSEDAQSKAALTDWLRAKASFVIEGLKEADKDEFCRCELKLQKWYGDLRGKPFAIEAENSILDISGFSKQYNCAFIWQKDGVKKLNLYLIINYFKGGKLRFKKIKPEAFEANRFYTVINKKSGEIVPMEVNFNFDDPNLIILPLAFGKRQGREFIWNDLLSLETGSLKLANGRVIEKTLYNRRTRQDEPALFVALTFERREVLDSSNIKPMNLIGVDRGENIPAVIALTDPEGCPLSRFKDSLGNPTHILRIGESYKEKQRTIQAKKEVEQRRAGGYSRKYASKAKNLADDMVRNTARDLLYYAVTQDAMLIFENLSRGFGRQGKRTFMAERQYTRMEDWLTAKLAYEGLPSKTYLSKTLAQYTSKTCSNCGFTITSADYDRVLEKLKKTATGWMTTINGKELKVEGQITYYNRYKRQNVVKDLSVELDRLSEESVNNDISSWTKGRSGEALSLLKKRFSHRPVQEKFVCLNCGFETHADEQAALNIARSWLFLRSQEYKKYQTNKTTGNTDKRAFVETWQSFYRKKLKEVWKPAV

SEQ ID NO: 44624 - protein, 980 aa, synthetic construct
  REGION 1..980: note = engineered CasX variant
QEIKRINKIRRRLVKDSNTKKAGKTGPMKTLLVRVMTPDLRERLENLRKKPENIPQPISNTSRANLNKLLTDYTEMKKAILHVYWEEFQKDPVGLMSRVAQPASKKIDQNKLKPEMDEKGNLTTAGFACSQCGQPLFVYKLEQVSEKGKAYTNYFGRCNVAEHEKLILLAQLKPEKDSDEAVTYSLGKFGQRALDFYSIHVTKESTHPVKPLAQIAGNRYASYPVGKALSDACMGTIASFLSKYQDIIIEHQKVVKGNQKRLESLRELAGKENLEYPSVTLPPQPHTKEGVDAYNEVIARVRMWVNLNLWQKLKLSRDDAKPLLRLKGFPSFPLVERQANEVDWWDMVCNVKKLINEKKEDGKVFWQNLAGYKRQEALRPYLSSEEDRKKGKKFARYQLGDLLLHLEKKHEGEYDWGKVYDEAWERIDKKVEGLSKHIKLEEERRSEDAQSKAALTDWLRAKASFVIEGLKEADKDEFCRCELKLQKWYGDLRGKPFAIEAENSILDISGFSKQYNCAFIWQKDGVKKLNLYLIINYFKGGKLRFKKIKPEAFEANRFYTVINKKSGEIVPMEVNFNFDDPNLIILPLAFGKRQGREFIWNDLLSLETGSLKLANGRVIEKTLYNRRTRQDEPALFVALTFERREVLDSSNIKPMNLIGVDRGENIPAVIALTDPEGCPLSRFKDSLGNPTHILRIGESYKEKQRTIQAKKEVEQRRAGGYSRKYASKAKNLADDMVRNTARDLLYYAVTQDAMLIFENLSRGFGRQGKRTFMAERQYTRMEDWLTAKLAYEGLPSKTYLSKTLAQYTSKTCSNCGFTITSADYDRVLEKLKKTATGWMTTINGKELKVEGQITYYNRYKRQNVVKDLSVELDRLSEESVNNDISSWTKGRSGEALSLLKKRFSHRPVQEKFVCLNCGFETHADEQAALNIARSWLFLRSQEYKKYQTNKTTGNTDKRAFVETWQSFYRKKLKEVWKPAV

SEQ ID NO: 44625 - protein, 980 aa, synthetic construct
  REGION 1..980: note = engineered CasX variant
QEIKRINKIRRRLVKDSNTKKAGKTGPMKTLLVRVMTPDLRERLENLRKKPENIPQPISNTSRANLNKLLTDYTEMKKAILHVYWEEFQKDPVGLMSRVAQPASKKIDQNKLKPEMDEKGNLTTAGFACSQCGQPLFVYKLEQVSEKGKAYTNYFGRCNVAEHEKLILLAQLKPEKDSDEAVTYSLGKFGQRALDFYSIHVTKESTHPVKPLAQIAGNRYASHPVGKALSDACMGTIASFLSKYQDIIIEHQKVVKGNQKRLESLRELAGKENLEYPSVTLPPQPHTKEGVDAYNEVIARVRMWVNLNLWQKLKLSRDDAKPLLRLKGFPSFPLVERQANEVDWWDMVCNVKKLINEKKEDGKVFWQNLAGYKRQEALRPYLSSEEDRKKGKKFARYQLGDLLLHLEKKHEGEYDWGKVYDEAWERIDKKVEGLSKHIKLEEERRSEDAQSKAALTDWLRAKASFVIEGLKEADKDEFCRCELKLQKWYGDLRGKPFAIEAENSILDISGFSKQYNCAFIWQKDGVKKLNLYLIINYFKGGKLRFKKIKPEAFEANRFYTVINKKSGEIVPMEVNFNFDDPNLIILPLAFGKRQGREFIWNDLLSLETGSLKLANGRVIEKTLYNRRTRQDEPALFVALTFERREVLDSSNIKPMNLIGVDRGENIPAVIALTDPEGCPLSRFKDSLGNPTHILRIGESYKEKQRTIQAKKEVEQRRAGGYSRKYASKAKNLADDMVRNTARDLLYYAVTQDAMLIFENLSRGFGRQGKRTFMAERQYTRMEDWLTAKLAYEGLPSKTYLSKTLAQYTSKTCSNCGFTITSADYDRVLEKLKKTATGWMTTINGKELKVEGQITYYNRYKRQNVVKDLSVELDRLSEESVNNDISSWTKGRSGEALSLLKKRFSHRPVQEKFVCLNCGFETHADEQAALNIARSWLFLRSQEYKKYQTNKTTGNTDKRAFVETWQSFYRKKLKEVWKPAV

SEQ ID NO: 44626 - protein, 980 aa, synthetic construct
  REGION 1..980: note = engineered CasX variant
QEIKRINKIRRRLVKDSNTKKAGKTGPMKTLLVRVMTPDLRERLENLRKKPENIPQPISNTSRANLNKLLTDYTEMKKAILHVYWEEFQKDPVGLMSRVAQPASKKIDQNKLKPEMDEKGNLTTAGFACSQCGQPLFVYKLEQVSEKGKAYTNYFGRCNVAEHEKLILLAQLKPEKDSDEAVTYSLGKFGQRALDFYSIHVTKESTHPVKPLAQIAGNRYASSPVGKALSDACMGTIASFLSKYQDIIIEHQKVVKGNQKRLESLRELAGKENLEYPSVTLPPQPHTKEGVDAYNEVIARVRMWVNLNLWQKLKLSRDDAKPLLRLKGFPSFPLVERQANEVDWWDMVCNVKKLINEKKEDGKVFWQNLAGYKRQEALRPYLSSEEDRKKGKKFARYQLGDLLLHLEKKHEGEYDWGKVYDEAWERIDKKVEGLSKHIKLEEERRSEDAQSKAALTDWLRAKASFVIEGLKEADKDEFCRCELKLQKWYGDLRGKPFAIEAENSILDISGFSKQYNCAFIWQKDGVKKLNLYLIINYFKGGKLRFKKIKPEAFEANRFYTVINKKSGEIVPMEVNFNFDDPNLIILPLAFGKRQGREFIWNDLLSLETGSLKLANGRVIEKTLYNRRTRQDEPALFVALTFERREVLDSSNIKPMNLIGVDRGENIPAVIALTDPEGCPLSRFKDSLGNPTHILRIGESYKEKQRTIQAKKEVEQRRAGGYSRKYASKAKNLADDMVRNTARDLLYYAVTQDAMLIFENLSRGFGRQGKRTFMAERQYTRMEDWLTAKLAYEGLPSKTYLSKTLAQYTSKTCSNCGFTITSADYDRVLEKLKKTATGWMTTINGKELKVEGQITYYNRYKRQNVVKDLSVELDRLSEESVNNDISSWTKGRSGEALSLLKKRFSHRPVQEKFVCLNCGFETHADEQAALNIARSWLFLRSQEYKKYQTNKTTGNTDKRAFVETWQSFYRKKLKEVWKPAV

SEQ ID NO: 44627 - protein, 980 aa, synthetic construct
  REGION 1..980: note = engineered CasX variant
QEIKRINKIRRRLVKDSNTKKAGKTGPMKTLLVRVMTPDLRERLENLRKKPENIPQPISNTSRANLNKLLTDYTEMKKAILHVYWEEFQKDPVGLMSRVAQPASKKIDQNKLKPEMDEKGNLTTAGFACSQCGQPLFVYKLEQVSEKGKAYTNYFGRCNVAEHEKLILLAQLKPEKDSDEAVTYSLGKFGQRALDFYSIHVTKESTHPVKPLAQIAGNRYASTPVGKALSDACMGTIASFLSKYQDIIIEHQKVVKGNQKRLESLRELAGKENLEYPSVTLPPQPHTKEGVDAYNEVIARVRMWVNLNLWQKLKLSRDDAKPLLRLKGFPSFPLVERQANEVDWWDMVCNVKKLINEKKEDGKVFWQNLAGYKRQEALRPYLSSEEDRKKGKKFARYQLGDLLLHLEKKHEGEYDWGKVYDEAWERIDKKVEGLSKHIKLEEERRSEDAQSKAALTDWLRAKASFVIEGLKEADKDEFCRCELKLQKWYGDLRGKPFAIEAENSILDISGFSKQYNCAFIWQKDGVKKLNLYLIINYFKGGKLRFKKIKPEAFEANRFYTVINKKSGEIVPMEVNFNFDDPNLIILPLAFGKRQGREFIWNDLLSLETGSLKLANGRVIEKTLYNRRTRQDEPALFVALTFERREVLDSSNIKPMNLIGVDRGENIPAVIALTDPEGCPLSRFKDSLGNPTHILRIGESYKEKQRTIQAKKEVEQRRAGGYSRKYASKAKNLADDMVRNTARDLLYYAVTQDAMLIFENLSRGFGRQGKRTFMAERQYTRMEDWLTAKLAYEGLPSKTYLSKTLAQYTSKTCSNCGFTITSADYDRVLEKLKKTATGWMTTINGKELKVEGQITYYNRYKRQNVVKDLSVELDRLSEESVNNDISSWTKGRSGEALSLLKKRFSHRPVQEKFVCLNCGFETHADEQAALNIARSWLFLRSQEYKKYQTNKTTGNTDKRAFVETWQSFYRKKLKEVWKPAV

SEQ ID NO: 44628 - protein, 980 aa, synthetic construct
  REGION 1..980: note = engineered CasX variant
QEIKRINKIRRRLVKDSNTKKAGKTGPMKTLLVRVMTPDLRERLENLRKKPENIPQPISNTSRANLNKLLTDYTEMKKAILHVYWEEFQKDPVGLMSRVAQPASKKIDQNKLKPEMDEKGNLTTAGFACSQCGQPLFVYKLEQVSEKGKAYTNYFGRCNVAEHEKLILLAQLKPEKDSDEAVTYSLGKFGQRALDFYSIHVTKESTHPVKPLAQIAGNRYASAPVGKALSDACMGTIASFLSKYQDIIIEHQKVVKGNQKRLESLRELAGKENLEYPSVTLPPQPHTKEGVDAYNEVIARVRMWVNLNLWQKLKLSRDDAKPLLRLKGFPSFPLVERQANEVDWWDMVCNVKKLINEKKEDGKVFWQNLAGYKRQEALRPYLSSEEDRKKGKKFARYQLGDLLLHLEKKHEGEYDWGKVYDEAWERIDKKVEGLSKHIKLEEERRSEDAQSKAALTDWLRAKASFVIEGLKEADKDEFCRCELKLQKWYGDLRGKPFAIEAENSILDISGFSKQYNCAFIWQKDGVKKLNLYLIINYFKGGKLRFKKIKPEAFEANRFYTVINKKSGEIVPMEVNFNFDDPNLIILPLAFGKRQGREFIWNDLLSLETGSLKLANGRVIEKTLYNRRTRQDEPALFVALTFERREVLDSSNIKPMNLIGVDRGENIPAVIALTDPEGCPLSRFKDSLGNPTHILRIGESYKEKQRTIQAKKEVEQRRAGGYSRKYASKAKNLADDMVRNTARDLLYYAVTQDAMLIFENLSRGFGRQGKRTFMAERQYTRMEDWLTAKLAYEGLPSKTYLSKTLAQYTSKTCSNCGFTITSADYDRVLEKLKKTATGWMTTINGKELKVEGQITYYNRYKRQNVVKDLSVELDRLSEESVNNDISSWTKGRSGEALSLLKKRFSHRPVQEKFVCLNCGFETHADEQAALNIARSWLFLRSQEYKKYQTNKTTGNTDKRAFVETWQSFYRKKLKEVWKPAV

SEQ ID NO: 44629 - protein, 980 aa, synthetic construct
  REGION 1..980: note = engineered CasX variant
QEIKRINKIRRRLVKDSNTKKAGKTGPMKTLLVRVMTPDLRERLENLRKKPENIPQPISNTSRANLNKLLTDYTEMKKAILHVYWEEFQKDPVGLMSRVAQPASKKIDQNKLKPEMDEKGNLTTAGFACSQCGQPLFVYKLEQVSEKGKAYTNYFGRCNVAEHEKLILLAQLKPEKDSDEAVTYSLGKFGQRALDFYSIHVTKESTHPVKPLAQIAGNRYASVPVGKALSDACMGTIASFLSKYQDIIIEHQKVVKGNQKRLESLRELAGKENLEYPSVTLPPQPHTKEGVDAYNEVIARVRMWVNLNLWQKLKLSRDDAKPLLRLKGFPSFPLVERQANEVDWWDMVCNVKKLINEKKEDGKVFWQNLAGYKRQEALRPYLSSEEDRKKGKKFARYQLGDLLLHLEKKHEGEYDWGKVYDEAWERIDKKVEGLSKHIKLEEERRSEDAQSKAALTDWLRAKASFVIEGLKEADKDEFCRCELKLQKWYGDLRGKPFAIEAENSILDISGFSKQYNCAFIWQKDGVKKLNLYLIINYFKGGKLRFKKIKPEAFEANRFYTVINKKSGEIVPMEVNFNFDDPNLIILPLAFGKRQGREFIWNDLLSLETGSLKLANGRVIEKTLYNRRTRQDEPALFVALTFERREVLDSSNIKPMNLIGVDRGENIPAVIALTDPEGCPLSRFKDSLGNPTHILRIGESYKEKQRTIQAKKEVEQRRAGGYSRKYASKAKNLADDMVRNTARDLLYYAVTQDAMLIFENLSRGFGRQGKRTFMAERQYTRMEDWLTAKLAYEGLPSKTYLSKTLAQYTSKTCSNCGFTITSADYDRVLEKLKKTATGWMTTINGKELKVEGQITYYNRYKRQNVVKDLSVELDRLSEESVNNDISSWTKGRSGEALSLLKKRFSHRPVQEKFVCLNCGFETHADEQAALNIARSWLFLRSQEYKKYQTNKTTGNTDKRAFVETWQSFYRKKLKEVWKPAV

SEQ ID NO: 44630 - protein, 980 aa, synthetic construct
  REGION 1..980: note = engineered CasX variant
QEIKRINKIRRRLVKDSNTKKAGKTGPMKTLLVRVMTPDLRERLENLRKKPENIPQPISNTSRANLNKLLTDYTEMKKAILHVYWEEFQKDPVGLMSRVAQPASKKIDQNKLKPEMDEKGNLTTAGFACSQCGQPLFVYKLEQVSEKGKAYTNYFGRCNVAEHEKLIKLAQLKPEKDSDEAVTYSLGKFGQRALDFYSIHVTKESTHPVKPLAQIAGNRYASGPVGKALSDACMGTIASFLSKYQDIIIEHQKVVKGNQKRLESLRELAGKENLEYPSVTLPPQPHTKEGVDAYNEVIARVRMWVNLNLWQKLKLSRDDAKPLLRLKGFPSFPLVERQANEVDWWDMVCNVKKLINEKKEDGKVFWQNLAGYKRQEALRPYLSSEEDRKKGKKFARYQLGDLLLHLEKKHEGEYDWGKVYDEAWERIDKKVEGLSKHIKLEEERRSEDAQSKAALTDWLRAKASFVIEGLKEADKDEFCRCELKLQKWYGDLRGKPFAIEAENSILDISGFSKQYNCAFIWQKDGVKKLNLYLIINYFKGGKLRFKKIKPEAFEANRFYTVINKKSGEIVPMEVNFNFDDPNLIILPLAFGKRQGREFIWNDLLSLETGSLKLANGRVIEKTLYNRRTRQDEPALFVALTFERREVLDSSNIKPMNLIGVDRGENIPAVIALTDPEGCPLSRFKDSLGNPTHILRIGESYKEKQRTIQAKKEVEQRRAGGYSRKYASKAKNLADDMVRNTARDLLYYAVTQDAMLIFENLSRGFGRQGKRTFMAERQYTRMEDWLTAKLAYEGLPSKTYLSKTLAQYTSKTCSNCGFTITSADYDRVLEKLKKTATGWMTTINGKELKVEGQITYYNRYKRQNVVKDLSVELDRLSEESVNNDISSWTKGRSGEALSLLKKRFSHRPVQEKFVCLNCGFETHADEQAALNIARSWLFLRSQEYKKYQTNKTTGNTDKRAFVETWQSFYRKKLKEVWKPAV

SEQ ID NO: 44631 - protein, 979 aa, synthetic construct
  REGION 1..979: note = engineered CasX variant
QEIKRINKIRRRLVKDSNTKKAGKTGPMKTLLVRVMTPDLRERLENLRKKPENIPQPISNTSRANLNKLLTDYTEMKKAILHVYWEEFQKDPVGLMSRVAQPASKKIDQNKLKPEMDEKGNLTTAGFACSQCGQPLFVYKLEQVSEKGKAYTNYFGRCNVAEHEKLILLAQLKPEKDSDEAVTYSLGKFGQRALDFYSIHVTKESTHPVKPLAQIAGNRYASPVGKALSDACMGTIASFLSKYQDIIIEHQKVVKGNQKRLESLRELAGKENLEYPSVTLPPQPHTKEGVDAYNEVIARVRMWVNLNLWQKLKLSRDDAKPLLRLKGFPSFPLVERQANEVDWWDMVCNVKKLINEKKEDGKVFWQNLAGYKRQEALRPYLSSEEDRKKGKKFARYQLGDLLLHLEKKHEGEYDWGKVYDEAWERIDKKVEGLSKHIKLEEERRSEDAQSKAALTDWLRAKASFVIEGLKEADKDEFCRCELKLQKWYGDLRGKPFAIEAENSILDISGFSKQYNCAFIWQKDGVKKLNLYLIINYFKGGKLRFKKIKPEAFEANRFYTVINKKSGEIVPMEVNFNFDDPNLIILPLAFGKRQGREFIWNDLLSLETGSLKLANGRVIEKTLYNRRTRQDEPALFVALTFERREVLDSSNIKPMNLIGVDRGENIPAVIALTDPEGCPLSRFKDSLGNPTHILRIGESYKEKQRTIQAKKEVEQRRAGGYSRKYASKAKNLADDMVRNTARDLLYYAVTQDAMLIFENLSRGFGRQGKRTFMAERQYTRMEDWLTAKLAYEGLPSKTYLSKTLAQYTSKTCSNCGFTITSADYDRVLEKLKKTATGWMTTINGKELKVEGQITYYNRYKRQNVVKDLSVELDRLSEESVNNDISSWTKGRSGEALSLLKKRFSHRPVQEKFVCLNCGFETHADEQAALNIARSWLFLRSQEYKKYQTNKTTGNTDKRAFVETWQSFYRKKLKEVWKPAV

SEQ ID NO: 44632 - protein, 979 aa, synthetic construct
  REGION 1..979: note = engineered CasX variant
QEIKRINKIRRRLVKDSNTKKAGKTGPMKTLLVRVMTPDLRERLENLRKKPENIPQPISNTSRANLNKLLTDYTEMKKAILHVYWEEFQKDPVGLMSRVAQPASKKIDQNKLKPEMDEKGNLTTAGFACSQCGQPLFVYKLEQVSEKGKAYTNYFGRCNVAEHEKLILLAQLKPEKDSDEAVTYSLGKFGQRALDFYSIHVTKESTHPVKPLAQIAGNRYASYPVGKALSDACMGTIASFLSKYQDIIIEHQKVVKGNQKRLESLRELAGKENLEYPSVTLPPQPHTKEGVDAYNEVIARVRMWVNLNLWQKLKLSRDDAKPLLRLKGFPSFPLVERQANEVDWWDMVCNVKKLINEKKEDGKVFWQNLAGYKRQEALRPYLSSEEDRKKGKKFARYQLGDLLLHLEKKHEGEDWGDVYDEAWERIDKKVEGLSKHIKLEEERRSEDAQSKAALTDWLRAKASFVIEGLKEADKDEFCRCELKLQKWYGDLRGKPFAIEAENSILDISGFSKQYNCAFIWQKDGVKKLNLYLIINYFKGGKLRFKKIKPEAFEANRFYTVINKKSGEIVPMEVNFNFDDPNLIILPLAFGKRQGREFIWNDLLSLETGSLKLANGRVIEKTLYNRRTRQDEPALFVALTFERREVLDSSNIKPMNLIGVDRGENIPAVIALTDPEGCPLSRFKDSLGNPTHILRIGESYKEKQRTIQAKKEVEQRRAGGYSRKYASKAKNLADDMVRNTARDLLYYAVTQDAMLIFENLSRGFGRQGKRTFMAERQYTRMEDWLTAKLAYEGLPSKTYLSKTLAQYTSKTCSNCGFTITSADYDRVLEKLKKTATGWMTTINGKELKVEGQITYYNRYKRQNVVKDLSVELDRLSEESVNNDISSWTKGRSGEALSLLKKRFSHRPVQEKFVCLNCGFETHADEQAALNIARSWLFLRSQEYKKYQTNKTTGNTDKRAFVETWQSFYRKKLKEVWKPAV

SEQ ID NO: 44633 - protein, 979 aa, synthetic construct
  REGION 1..979: note = engineered CasX variant
QEIKRINKIRRRLVKDSNTKKAGKTGPMKTLLVRVMTPDLRERLENLRKKPENIPQPISNTSRANLNKLLTDYTEMKKAILHVYWEEFQKDPVGLMSRVAQPASKKIDQNKLKPEMDEKGNLTTAGFACSQCGQPLFVYKLEQVSEKGKAYTNYFGRCNVAEHEKLILLAQLKPEKDSDEAVTYSLGKFGQRALDFYSIHVTKESTHPVKPLAQIAGNRYASHPVGKALSDACMGTIASFLSKYQDIIIEHQKVVKGNQKRLESLRELAGKENLEYPSVTLPPQPHTKEGVDAYNEVIARVRMWVNLNLWQKLKLSRDDAKPLLRLKGFPSFPLVERQANEVDWWDMVCNVKKLINEKKEDGKVFWQNLAGYKRQEALRPYLSSEEDRKKGKKFARYQLGDLLLHLEKKHEGEDWGDVYDEAWERIDKKVEGLSKHIKLEEERRSEDAQSKAALTDWLRAKASFVIEGLKEADKDEFCRCELKLQKWYGDLRGKPFAIEAENSILDISGFSKQYNCAFIWQKDGVKKLNLYLIINYFKGGKLRFKKIKPEAFEANRFYTVINKKSGEIVPMEVNFNFDDPNLIILPLAFGKRQGREFIWNDLLSLETGSLKLANGRVIEKTLYNRRTRQDEPALFVALTFERREVLDSSNIKPMNLIGVDRGENIPAVIALTDPEGCPLSRFKDSLGNPTHILRIGESYKEKQRTIQAKKEVEQRRAGGYSRKYASKAKNLADDMVRNTARDLLYYAVTQDAMLIFENLSRGFGRQGKRTFMAERQYTRMEDWLTAKLAYEGLPSKTYLSKTLAQYTSKTCSNCGFTITSADYDRVLEKLKKTATGWMTTINGKELKVEGQITYYNRYKRQNVVKDLSVELDRLSEESVNNDISSWTKGRSGEALSLLKKRFSHRPVQEKFVCLNCGFETHADEQAALNIARSWLFLRSQEYKKYQTNKTTGNTDKRAFVETWQSFYRKKLKEVWKPAV

SEQ ID NO: 44634 - protein, 979 aa, synthetic construct
  REGION 1..979: note = engineered CasX variant
QEIKRINKIRRRLVKDSNTKKAGKTGPMKTLLVRVMTPDLRERLENLRKKPENIPQPISNTSRANLNKLLTDYTEMKKAILHVYWEEFQKDPVGLMSRVAQPASKKIDQNKLKPEMDEKGNLTTAGFACSQCGQPLFVYKLEQVSEKGKAYTNYFGRCNVAEHEKLILLAQLKPEKDSDEAVTYSLGKFGQRALDFYSIHVTKESTHPVKPLAQIAGNRYASSPVGKALSDACMGTIASFLSKYQDIIIEHQKVVKGNQKRLESLRELAGKENLEYPSVTLPPQPHTKEGVDAYNEVIARVRMWVNLNLWQKLKLSRDDAKPLLRLKGFPSFPLVERQANEVDWWDMVCNVKKLINEKKEDGKVFWQNLAGYKRQEALRPYLSSEEDRKKGKKFARYQLGDLLLHLEKKHEGEDWGDVYDEAWERIDKKVEGLSKHIKLEEERRSEDAQSKAALTDWLRAKASFVIEGLKEADKDEFCRCELKLQKWYGDLRGKPFAIEAENSILDISGFSKQYNCAFIWQKDGVKKLNLYLIINYFKGGKLRFKKIKPEAFEANRFYTVINKKSGEIVPMEVNFNFDDPNLIILPLAFGKRQGREFIWNDLLSLETGSLKLANGRVIEKTLYNRRTRQDEPALFVALTFERREVLDSSNIKPMNLIGVDRGENIPAVIALTDPEGCPLSRFKDSLGNPTHILRIGESYKEKQRTIQAKKEVEQRRAGGYSRKYASKAKNLADDMVRNTARDLLYYAVTQDAMLIFENLSRGFGRQGKRTFMAERQYTRMEDWLTAKLAYEGLPSKTYLSKTLAQYTSKTCSNCGFTITSADYDRVLEKLKKTATGWMTTINGKELKVEGQITYYNRYKRQNVVKDLSVELDRLSEESVNNDISSWTKGRSGEALSLLKKRFSHRPVQEKFVCLNCGFETHADEQAALNIARSWLFLRSQEYKKYQTNKTTGNTDKRAFVETWQSFYRKKLKEVWKPAV

SEQ ID NO: 44635 - protein, 979 aa, synthetic construct
  REGION 1..979: note = engineered CasX variant
QEIKRINKIRRRLVKDSNTKKAGKTGPMKTLLVRVMTPDLRERLENLRKKPENIPQPISNTSRANLNKLLTDYTEMKKAILHVYWEEFQKDPVGLMSRVAQPASKKIDQNKLKPEMDEKGNLTTAGFACSQCGQPLFVYKLEQVSEKGKAYTNYFGRCNVAEHEKLILLAQLKPEKDSDEAVTYSLGKFGQRALDFYSIHVTKESTHPVKPLAQIAGNRYASTPVGKALSDACMGTIASFLSKYQDIIIEHQKVVKGNQKRLESLRELAGKENLEYPSVTLPPQPHTKEGVDAYNEVIARVRMWVNLNLWQKLKLSRDDAKPLLRLKGFPSFPLVERQANEVDWWDMVCNVKKLINEKKEDGKVFWQNLAGYKRQEALRPYLSSEEDRKKGKKFARYQLGDLLLHLEKKHEGEDWGDVYDEAWERIDKKVEGLSKHIKLEEERRSEDAQSKAALTDWLRAKASFVIEGLKEADKDEFCRCELKLQKWYGDLRGKPFAIEAENSILDISGFSKQYNCAFIWQKDGVKKLNLYLIINYFKGGKLRFKKIKPEAFEANRFYTVINKKSGEIVPMEVNFNFDDPNLIILPLAFGKRQGREFIWNDLLSLETGSLKLANGRVIEKTLYNRRTRQDEPALFVALTFERREVLDSSNIKPMNLIGVDRGENIPAVIALTDPEGCPLSRFKDSLGNPTHILRIGESYKEKQRTIQAKKEVEQRRAGGYSRKYASKAKNLADDMVRNTARDLLYYAVTQDAMLIFENLSRGFGRQGKRTFMAERQYTRMEDWLTAKLAYEGLPSKTYLSKTLAQYTSKTCSNCGFTITSADYDRVLEKLKKTATGWMTTINGKELKVEGQITYYNRYKRQNVVKDLSVELDRLSEESVNNDISSWTKGRSGEALSLLKKRFSHRPVQEKFVCLNCGFETHADEQAALNIARSWLFLRSQEYKKYQTNKTTGNTDKRAFVETWQSFYRKKLKEVWKPAV

SEQ ID NO: 44636 - protein, 979 aa, synthetic construct
  REGION 1..979: note = engineered CasX variant
QEIKRINKIRRRLVKDSNTKKAGKTGPMKTLLVRVMTPDLRERLENLRKKPENIPQPISNTSRANLNKLLTDYTEMKKAILHVYWEEFQKDPVGLMSRVAQPASKKIDQNKLKPEMDEKGNLTTAGFACSQCGQPLFVYKLEQVSEKGKAYTNYFGRCNVAEHEKLILLAQLKPEKDSDEAVTYSLGKFGQRALDFYSIHVTKESTHPVKPLAQIAGNRYASAPVGKALSDACMGTIASFLSKYQDIIIEHQKVVKGNQKRLESLRELAGKENLEYPSVTLPPQPHTKEGVDAYNEVIARVRMWVNLNLWQKLKLSRDDAKPLLRLKGFPSFPLVERQANEVDWWDMVCNVKKLINEKKEDGKVFWQNLAGYKRQEALRPYLSSEEDRKKGKKFARYQLGDLLLHLEKKHEGEDWGDVYDEAWERIDKKVEGLSKHIKLEEERRSEDAQSKAALTDWLRAKASFVIEGLKEADKDEFCRCELKLQKWYGDLRGKPFAIEAENSILDISGFSKQYNCAFIWQKDGVKKLNLYLIINYFKGGKLRFKKIKPEAFEANRFYTVINKKSGEIVPMEVNFNFDDPNLIILPLAFGKRQGREFIWNDLLSLETGSLKLANGRVIEKTLYNRRTRQDEPALFVALTFERREVLDSSNIKPMNLIGVDRGENIPAVIALTDPEGCPLSRFKDSLGNPTHILRIGESYKEKQRTIQAKKEVEQRRAGGYSRKYASKAKNLADDMVRNTARDLLYYAVTQDAMLIFENLSRGFGRQGKRTFMAERQYTRMEDWLTAKLAYEGLPSKTYLSKTLAQYTSKTCSNCGFTITSADYDRVLEKLKKTATGWMTTINGKELKVEGQITYYNRYKRQNVVKDLSVELDRLSEESVNNDISSWTKGRSGEALSLLKKRFSHRPVQEKFVCLNCGFETHADEQAALNIARSWLFLRSQEYKKYQTNKTTGNTDKRAFVETWQSFYRKKLKEVWKPAV

SEQ ID NO: 44637 - protein, 979 aa, synthetic construct
  REGION 1..979: note = engineered CasX variant
QEIKRINKIRRRLVKDSNTKKAGKTGPMKTLLVRVMTPDLRERLENLRKKPENIPQPISNTSRANLNKLLTDYTEMKKAILHVYWEEFQKDPVGLMSRVAQPASKKIDQNKLKPEMDEKGNLTTAGFACSQCGQPLFVYKLEQVSEKGKAYTNYFGRCNVAEHEKLILLAQLKPEKDSDEAVTYSLGKFGQRALDFYSIHVTKESTHPVKPLAQIAGNRYASVPVGKALSDACMGTIASFLSKYQDIIIEHQKVVKGNQKRLESLRELAGKENLEYPSVTLPPQPHTKEGVDAYNEVIARVRMWVNLNLWQKLKLSRDDAKPLLRLKGFPSFPLVERQANEVDWWDMVCNVKKLINEKKEDGKVFWQNLAGYKRQEALRPYLSSEEDRKKGKKFARYQLGDLLLHLEKKHEGEDWGDVYDEAWERIDKKVEGLSKHIKLEEERRSEDAQSKAALTDWLRAKASFVIEGLKEADKDEFCRCELKLQKWYGDLRGKPFAIEAENSILDISGFSKQYNCAFIWQKDGVKKLNLYLIINYFKGGKLRFKKIKPEAFEANRFYTVINKKSGEIVPMEVNFNFDDPNLIILPLAFGKRQGREFIWNDLLSLETGSLKLANGRVIEKTLYNRRTRQDEPALFVALTFERREVLDSSNIKPMNLIGVDRGENIPAVIALTDPEGCPLSRFKDSLGNPTHILRIGESYKEKQRTIQAKKEVEQRRAGGYSRKYASKAKNLADDMVRNTARDLLYYAVTQDAMLIFENLSRGFGRQGKRTFMAERQYTRMEDWLTAKLAYEGLPSKTYLSKTLAQYTSKTCSNCGFTITSADYDRVLEKLKKTATGWMTTINGKELKVEGQITYYNRYKRQNVVKDLSVELDRLSEESVNNDISSWTKGRSGEALSLLKKRFSHRPVQEKFVCLNCGFETHADEQAALNIARSWLFLRSQEYKKYQTNKTTGNTDKRAFVETWQSFYRKKLKEVWKPAV

SEQ ID NO: 44638 - protein, 979 aa, synthetic construct
  REGION 1..979: note = engineered CasX variant
QEIKRINKIRRRLVKDSNTKKAGKTGPMKTLLVRVMTPDLRERLENLRKKPENIPQPISNTSRANLNKLLTDYTEMKKAILHVYWEEFQKDPVGLMSRVAQPASKKIDQNKLKPEMDEKGNLTTAGFACSQCGQPLFVYKLEQVSEKGKAYTNYFGRCNVAEHEKLIKLAQLKPEKDSDEAVTYSLGKFGQRALDFYSIHVTKESTHPVKPLAQIAGNRYASGPVGKALSDACMGTIASFLSKYQDIIIEHQKVVKGNQKRLESLRELAGKENLEYPSVTLPPQPHTKEGVDAYNEVIARVRMWVNLNLWQKLKLSRDDAKPLLRLKGFPSFPLVERQANEVDWWDMVCNVKKLINEKKEDGKVFWQNLAGYKRQEALRPYLSSEEDRKKGKKFARYQLGDLLLHLEKKHEGEDWGDVYDEAWERIDKKVEGLSKHIKLEEERRSEDAQSKAALTDWLRAKASFVIEGLKEADKDEFCRCELKLQKWYGDLRGKPFAIEAENSILDISGFSKQYNCAFIWQKDGVKKLNLYLIINYFKGGKLRFKKIKPEAFEANRFYTVINKKSGEIVPMEVNFNFDDPNLIILPLAFGKRQGREFIWNDLLSLETGSLKLANGRVIEKTLYNRRTRQDEPALFVALTFERREVLDSSNIKPMNLIGVDRGENIPAVIALTDPEGCPLSRFKDSLGNPTHILRIGESYKEKQRTIQAKKEVEQRRAGGYSRKYASKAKNLADDMVRNTARDLLYYAVTQDAMLIFENLSRGFGRQGKRTFMAERQYTRMEDWLTAKLAYEGLPSKTYLSKTLAQYTSKTCSNCGFTITSADYDRVLEKLKKTATGWMTTINGKELKVEGQITYYNRYKRQNVVKDLSVELDRLSEESVNNDISSWTKGRSGEALSLLKKRFSHRPVQEKFVCLNCGFETHADEQAALNIARSWLFLRSQEYKKYQTNKTTGNTDKRAFVETWQSFYRKKLKEVWKPAV

SEQ ID NO: 44639 - protein, 978 aa, synthetic construct
  REGION 1..978: note = engineered CasX variant
QEIKRINKIRRRLVKDSNTKKAGKTGPMKTLLVRVMTPDLRERLENLRKKPENIPQPISNTSRANLNKLLTDYTEMKKAILHVYWEEFQKDPVGLMSRVAQPASKKIDQNKLKPEMDEKGNLTTAGFACSQCGQPLFVYKLEQVSEKGKAYTNYFGRCNVAEHEKLILLAQLKPEKDSDEAVTYSLGKFGQRALDFYSIHVTKESTHPVKPLAQIAGNRYASPVGKALSDACMGTIASFLSKYQDIIIEHQKVVKGNQKRLESLRELAGKENLEYPSVTLPPQPHTKEGVDAYNEVIARVRMWVNLNLWQKLKLSRDDAKPLLRLKGFPSFPLVERQANEVDWWDMVCNVKKLINEKKEDGKVFWQNLAGYKRQEALRPYLSSEEDRKKGKKFARYQLGDLLLHLEKKHEGEDWGDVYDEAWERIDKKVEGLSKHIKLEEERRSEDAQSKAALTDWLRAKASFVIEGLKEADKDEFCRCELKLQKWYGDLRGKPFAIEAENSILDISGFSKQYNCAFIWQKDGVKKLNLYLIINYFKGGKLRFKKIKPEAFEANRFYTVINKKSGEIVPMEVNFNFDDPNLIILPLAFGKRQGREFIWNDLLSLETGSLKLANGRVIEKTLYNRRTRQDEPALFVALTFERREVLDSSNIKPMNLIGVDRGENIPAVIALTDPEGCPLSRFKDSLGNPTHILRIGESYKEKQRTIQAKKEVEQRRAGGYSRKYASKAKNLADDMVRNTARDLLYYAVTQDAMLIFENLSRGFGRQGKRTFMAERQYTRMEDWLTAKLAYEGLPSKTYLSKTLAQYTSKTCSNCGFTITSADYDRVLEKLKKTATGWMTTINGKELKVEGQITYYNRYKRQNVVKDLSVELDRLSEESVNNDISSWTKGRSGEALSLLKKRFSHRPVQEKFVCLNCGFETHADEQAALNIARSWLFLRSQEYKKYQTNKTTGNTDKRAFVETWQSFYRKKLKEVWKPAV

SEQ ID NO: 44640 - protein, 979 aa, synthetic construct
  REGION 1..979: note = engineered CasX variant
QEIKRINKIRRRLVKDSNTKKAGKTGPMKTLLVRVMTPDLRERLENLRKKPENIPQPISNTSRANLNKLLTDYTEMKKAILHVYWEEFQKDPVGLMSRVAQPASKKIDQNKLKPEMDEKGNLTTAGFACSQCGQPLFVYKLEQVSEKGKAYTNYFGRCNVAEHEKLILLAQLKPEKDSDEAVTYSLGKFGQRALDFYSIHVTKESTHPVKPLAQIAGNRYASYPVGKALSDACMGTIASFLSKYQDIIIEHQKVVKGNQKRLESLRELAGKENLEYPSVTLPPQPHTKEGVDAYNEVIARVRMWVNLNLWQKLKLSRDDAKPLLRLKGFPSFPLVERQANEVDWWDMVCNVKKLINEKKEDGKVFWQNLAGYKRQEALRPYLSSEEDRKKGKKFARYQLGDLLLHLEKKHEGEDWGKVYGEAWERIDKKVEGLSKHIKLEEERRSEDAQSKAALTDWLRAKASFVIEGLKEADKDEFCRCELKLQKWYGDLRGKPFAIEAENSILDISGFSKQYNCAFIWQKDGVKKLNLYLIINYFKGGKLRFKKIKPEAFEANRFYTVINKKSGEIVPMEVNFNFDDPNLIILPLAFGKRQGREFIWNDLLSLETGSLKLANGRVIEKTLYNRRTRQDEPALFVALTFERREVLDSSNIKPMNLIGVDRGENIPAVIALTDPEGCPLSRFKDSLGNPTHILRIGESYKEKQRTIQAKKEVEQRRAGGYSRKYASKAKNLADDMVRNTARDLLYYAVTQDAMLIFENLSRGFGRQGKRTFMAERQYTRMEDWLTAKLAYEGLPSKTYLSKTLAQYTSKTCSNCGFTITSADYDRVLEKLKKTATGWMTTINGKELKVEGQITYYNRYKRQNVVKDLSVELDRLSEESVNNDISSWTKGRSGEALSLLKKRFSHRPVQEKFVCLNCGFETHADEQAALNIARSWLFLRSQEYKKYQTNKTTGNTDKRAFVETWQSFYRKKLKEVWKPAV

SEQ ID NO: 44641 - protein, 979 aa, synthetic construct
  REGION 1..979: note = engineered CasX variant
QEIKRINKIRRRLVKDSNTKKAGKTGPMKTLLVRVMTPDLRERLENLRKKPENIPQPISNTSRANLNKLLTDYTEMKKAILHVYWEEFQKDPVGLMSRVAQPASKKIDQNKLKPEMDEKGNLTTAGFACSQCGQPLFVYKLEQVSEKGKAYTNYFGRCNVAEHEKLILLAQLKPEKDSDEAVTYSLGKFGQRALDFYSIHVTKESTHPVKPLAQIAGNRYASHPVGKALSDACMGTIASFLSKYQDIIIEHQKVVKGNQKRLESLRELAGKENLEYPSVTLPPQPHTKEGVDAYNEVIARVRMWVNLNLWQKLKLSRDDAKPLLRLKGFPSFPLVERQANEVDWWDMVCNVKKLINEKKEDGKVFWQNLAGYKRQEALRPYLSSEEDRKKGKKFARYQLGDLLLHLEKKHEGEDWGKVYGEAWERIDKKVEGLSKHIKLEEERRSEDAQSKAALTDWLRAKASFVIEGLKEADKDEFCRCELKLQKWYGDLRGKPFAIEAENSILDISGFSKQYNCAFIWQKDGVKKLNLYLIINYFKGGKLRFKKIKPEAFEANRFYTVINKKSGEIVPMEVNFNFDDPNLIILPLAFGKRQGREFIWNDLLSLETGSLKLANGRVIEKTLYNRRTRQDEPALFVALTFERREVLDSSNIKPMNLIGVDRGENIPAVIALTDPEGCPLSRFKDSLGNPTHILRIGESYKEKQRTIQAKKEVEQRRAGGYSRKYASKAKNLADDMVRNTARDLLYYAVTQDAMLIFENLSRGFGRQGKRTFMAERQYTRMEDWLTAKLAYEGLPSKTYLSKTLAQYTSKTCSNCGFTITSADYDRVLEKLKKTATGWMTTINGKELKVEGQITYYNRYKRQNVVKDLSVELDRLSEESVNNDISSWTKGRSGEALSLLKKRFSHRPVQEKFVCLNCGFETHADEQAALNIARSWLFLRSQEYKKYQTNKTTGNTDKRAFVETWQSFYRKKLKEVWKPAV

SEQ ID NO: 44642 - protein, 979 aa, synthetic construct
  REGION 1..979: note = engineered CasX variant
QEIKRINKIRRRLVKDSNTKKAGKTGPMKTLLVRVMTPDLRERLENLRKKPENIPQPISNTSRANLNKLLTDYTEMKKAILHVYWEEFQKDPVGLMSRVAQPASKKIDQNKLKPEMDEKGNLTTAGFACSQCGQPLFVYKLEQVSEKGKAYTNYFGRCNVAEHEKLILLAQLKPEKDSDEAVTYSLGKFGQRALDFYSIHVTKESTHPVKPLAQIAGNRYASSPVGKALSDACMGTIASFLSKYQDIIIEHQKVVKGNQKRLESLRELAGKENLEYPSVTLPPQPHTKEGVDAYNEVIARVRMWVNLNLWQKLKLSRDDAKPLLRLKGFPSFPLVERQANEVDWWDMVCNVKKLINEKKEDGKVFWQNLAGYKRQEALRPYLSSEEDRKKGKKFARYQLGDLLLHLEKKHEGEDWGKVYGEAWERIDKKVEGLSKHIKLEEERRSEDAQSKAALTDWLRAKASFVIEGLKEADKDEFCRCELKLQKWYGDLRGKPFAIEAENSILDISGFSKQYNCAFIWQKDGVKKLNLYLIINYFKGGKLRFKKIKPEAFEANRFYTVINKKSGEIVPMEVNFNFDDPNLIILPLAFGKRQGREFIWNDLLSLETGSLKLANGRVIEKTLYNRRTRQDEPALFVALTFERREVLDSSNIKPMNLIGVDRGENIPAVIALTDPEGCPLSRFKDSLGNPTHILRIGESYKEKQRTIQAKKEVEQRRAGGYSRKYASKAKNLADDMVRNTARDLLYYAVTQDAMLIFENLSRGFGRQGKRTFMAERQYTRMEDWLTAKLAYEGLPSKTYLSKTLAQYTSKTCSNCGFTITSADYDRVLEKLKKTATGWMTTINGKELKVEGQITYYNRYKRQNVVKDLSVELDRLSEESVNNDISSWTKGRSGEALSLLKKRFSHRPVQEKFVCLNCGFETHADEQAALNIARSWLFLRSQEYKKYQTNKTTGNTDKRAFVETWQSFYRKKLKEVWKPAV

SEQ ID NO: 44643 - protein, 979 aa, synthetic construct
  REGION 1..979: note = engineered CasX variant
QEIKRINKIRRRLVKDSNTKKAGKTGPMKTLLVRVMTPDLRERLENLRKKPENIPQPISNTSRANLNKLLTDYTEMKKAILHVYWEEFQKDPVGLMSRVAQPASKKIDQNKLKPEMDEKGNLTTAGFACSQCGQPLFVYKLEQVSEKGKAYTNYFGRCNVAEHEKLILLAQLKPEKDSDEAVTYSLGKFGQRALDFYSIHVTKESTHPVKPLAQIAGNRYASTPVGKALSDACMGTIASFLSKYQDIIIEHQKVVKGNQKRLESLRELAGKENLEYPSVTLPPQPHTKEGVDAYNEVIARVRMWVNLNLWQKLKLSRDDAKPLLRLKGFPSFPLVERQANEVDWWDMVCNVKKLINEKKEDGKVFWQNLAGYKRQEALRPYLSSEEDRKKGKKFARYQLGDLLLHLEKKHEGEDWGKVYGEAWERIDKKVEGLSKHIKLEEERRSEDAQSKAALTDWLRAKASFVIEGLKEADKDEFCRCELKLQKWYGDLRGKPFAIEAENSILDISGFSKQYNCAFIWQKDGVKKLNLYLIINYFKGGKLRFKKIKPEAFEANRFYTVINKKSGEIVPMEVNFNFDDPNLIILPLAFGKRQGREFIWNDLLSLETGSLKLANGRVIEKTLYNRRTRQDEPALFVALTFERREVLDSSNIKPMNLIGVDRGENIPAVIALTDPEGCPLSRFKDSLGNPTHILRIGESYKEKQRTIQAKKEVEQRRAGGYSRKYASKAKNLADDMVRNTARDLLYYAVTQDAMLIFENLSRGFGRQGKRTFMAERQYTRMEDWLTAKLAYEGLPSKTYLSKTLAQYTSKTCSNCGFTITSADYDRVLEKLKKTATGWMTTINGKELKVEGQITYYNRYKRQNVVKDLSVELDRLSEESVNNDISSWTKGRSGEALSLLKKRFSHRPVQEKFVCLNCGFETHADEQAALNIARSWLFLRSQEYKKYQTNKTTGNTDKRAFVETWQSFYRKKLKEVWKPAV

SEQ ID NO: 44644 - protein, 979 aa, synthetic construct
  REGION 1..979: note = engineered CasX variant
QEIKRINKIRRRLVKDSNTKKAGKTGPMKTLLVRVMTPDLRERLENLRKKPENIPQPISNTSRANLNKLLTDYTEMKKAILHVYWEEFQKDPVGLMSRVAQPASKKIDQNKLKPEMDEKGNLTTAGFACSQCGQPLFVYKLEQVSEKGKAYTNYFGRCNVAEHEKLILLAQLKPEKDSDEAVTYSLGKFGQRALDFYSIHVTKESTHPVKPLAQIAGNRYASAPVGKALSDACMGTIASFLSKYQDIIIEHQKVVKGNQKRLESLRELAGKENLEYPSVTLPPQPHTKEGVDAYNEVIARVRMWVNLNLWQKLKLSRDDAKPLLRLKGFPSFPLVERQANEVDWWDMVCNVKKLINEKKEDGKVFWQNLAGYKRQEALRPYLSSEEDRKKGKKFARYQLGDLLLHLEKKHEGEDWGKVYGEAWERIDKKVEGLSKHIKLEEERRSEDAQSKAALTDWLRAKASFVIEGLKEADKDEFCRCELKLQKWYGDLRGKPFAIEAENSILDISGFSKQYNCAFIWQKDGVKKLNLYLIINYFKGGKLRFKKIKPEAFEANRFYTVINKKSGEIVPMEVNFNFDDPNLIILPLAFGKRQGREFIWNDLLSLETGSLKLANGRVIEKTLYNRRTRQDEPALFVALTFERREVLDSSNIKPMNLIGVDRGENIPAVIALTDPEGCPLSRFKDSLGNPTHILRIGESYKEKQRTIQAKKEVEQRRAGGYSRKYASKAKNLADDMVRNTARDLLYYAVTQDAMLIFENLSRGFGRQGKRTFMAERQYTRMEDWLTAKLAYEGLPSKTYLSKTLAQYTSKTCSNCGFTITSADYDRVLEKLKKTATGWMTTINGKELKVEGQITYYNRYKRQNVVKDLSVELDRLSEESVNNDISSWTKGRSGEALSLLKKRFSHRPVQEKFVCLNCGFETHADEQAALNIARSWLFLRSQEYKKYQTNKTTGNTDKRAFVETWQSFYRKKLKEVWKPAV

SEQ ID NO: 44645 - protein, 979 aa, synthetic construct
  REGION 1..979: note = engineered CasX variant
QEIKRINKIRRRLVKDSNTKKAGKTGPMKTLLVRVMTPDLRERLENLRKKPENIPQPISNTSRANLNKLLTDYTEMKKAILHVYWEEFQKDPVGLMSRVAQPASKKIDQNKLKPEMDEKGNLTTAGFACSQCGQPLFVYKLEQVSEKGKAYTNYFGRCNVAEHEKLILLAQLKPEKDSDEAVTYSLGKFGQRALDFYSIHVTKESTHPVKPLAQIAGNRYASVPVGKALSDACMGTIASFLSKYQDIIIEHQKVVKGNQKRLESLRELAGKENLEYPSVTLPPQPHTKEGVDAYNEVIARVRMWVNLNLWQKLKLSRDDAKPLLRLKGFPSFPLVERQANEVDWWDMVCNVKKLINEKKEDGKVFWQNLAGYKRQEALRPYLSSEEDRKKGKKFARYQLGDLLLHLEKKHEGEDWGKVYGEAWERIDKKVEGLSKHIKLEEERRSEDAQSKAALTDWLRAKASFVIEGLKEADKDEFCRCELKLQKWYGDLRGKPFAIEAENSILDISGFSKQYNCAFIWQKDGVKKLNLYLIINYFKGGKLRFKKIKPEAFEANRFYTVINKKSGEIVPMEVNFNFDDPNLIILPLAFGKRQGREFIWNDLLSLETGSLKLANGRVIEKTLYNRRTRQDEPALFVALTFERREVLDSSNIKPMNLIGVDRGENIPAVIALTDPEGCPLSRFKDSLGNPTHILRIGESYKEKQRTIQAKKEVEQRRAGGYSRKYASKAKNLADDMVRNTARDLLYYAVTQDAMLIFENLSRGFGRQGKRTFMAERQYTRMEDWLTAKLAYEGLPSKTYLSKTLAQYTSKTCSNCGFTITSADYDRVLEKLKKTATGWMTTINGKELKVEGQITYYNRYKRQNVVKDLSVELDRLSEESVNNDISSWTKGRSGEALSLLKKRFSHRPVQEKFVCLNCGFETHADEQAALNIARSWLFLRSQEYKKYQTNKTTGNTDKRAFVETWQSFYRKKLKEVWKPAV

SEQ ID NO: 44646 - protein, 979 aa, synthetic construct
  REGION 1..979: note = engineered CasX variant
QEIKRINKIRRRLVKDSNTKKAGKTGPMKTLLVRVMTPDLRERLENLRKKPENIPQPISNTSRANLNKLLTDYTEMKKAILHVYWEEFQKDPVGLMSRVAQPASKKIDQNKLKPEMDEKGNLTTAGFACSQCGQPLFVYKLEQVSEKGKAYTNYFGRCNVAEHEKLIKLAQLKPEKDSDEAVTYSLGKFGQRALDFYSIHVTKESTHPVKPLAQIAGNRYASGPVGKALSDACMGTIASFLSKYQDIIIEHQKVVKGNQKRLESLRELAGKENLEYPSVTLPPQPHTKEGVDAYNEVIARVRMWVNLNLWQKLKLSRDDAKPLLRLKGFPSFPLVERQANEVDWWDMVCNVKKLINEKKEDGKVFWQNLAGYKRQEALRPYLSSEEDRKKGKKFARYQLGDLLLHLEKKHEGEDWGKVYGEAWERIDKKVEGLSKHIKLEEERRSEDAQSKAALTDWLRAKASFVIEGLKEADKDEFCRCELKLQKWYGDLRGKPFAIEAENSILDISGFSKQYNCAFIWQKDGVKKLNLYLIINYFKGGKLRFKKIKPEAFEANRFYTVINKKSGEIVPMEVNFNFDDPNLIILPLAFGKRQGREFIWNDLLSLETGSLKLANGRVIEKTLYNRRTRQDEPALFVALTFERREVLDSSNIKPMNLIGVDRGENIPAVIALTDPEGCPLSRFKDSLGNPTHILRIGESYKEKQRTIQAKKEVEQRRAGGYSRKYASKAKNLADDMVRNTARDLLYYAVTQDAMLIFENLSRGFGRQGKRTFMAERQYTRMEDWLTAKLAYEGLPSKTYLSKTLAQYTSKTCSNCGFTITSADYDRVLEKLKKTATGWMTTINGKELKVEGQITYYNRYKRQNVVKDLSVELDRLSEESVNNDISSWTKGRSGEALSLLKKRFSHRPVQEKFVCLNCGFETHADEQAALNIARSWLFLRSQEYKKYQTNKTTGNTDKRAFVETWQSFYRKKLKEVWKPAV

SEQ ID NO: 44647 - protein, 978 aa, synthetic construct
  REGION 1..978: note = engineered CasX variant
QEIKRINKIRRRLVKDSNTKKAGKTGPMKTLLVRVMTPDLRERLENLRKKPENIPQPISNTSRANLNKLLTDYTEMKKAILHVYWEEFQKDPVGLMSRVAQPASKKIDQNKLKPEMDEKGNLTTAGFACSQCGQPLFVYKLEQVSEKGKAYTNYFGRCNVAEHEKLILLAQLKPEKDSDEAVTYSLGKFGQRALDFYSIHVTKESTHPVKPLAQIAGNRYASPVGKALSDACMGTIASFLSKYQDIIIEHQKVVKGNQKRLESLRELAGKENLEYPSVTLPPQPHTKEGVDAYNEVIARVRMWVNLNLWQKLKLSRDDAKPLLRLKGFPSFPLVERQANEVDWWDMVCNVKKLINEKKEDGKVFWQNLAGYKRQEALRPYLSSEEDRKKGKKFARYQLGDLLLHLEKKHEGEDWGKVYGEAWERIDKKVEGLSKHIKLEEERRSEDAQSKAALTDWLRAKASFVIEGLKEADKDEFCRCELKLQKWYGDLRGKPFAIEAENSILDISGFSKQYNCAFIWQKDGVKKLNLYLIINYFKGGKLRFKKIKPEAFEANRFYTVINKKSGEIVPMEVNFNFDDPNLIILPLAFGKRQGREFIWNDLLSLETGSLKLANGRVIEKTLYNRRTRQDEPALFVALTFERREVLDSSNIKPMNLIGVDRGENIPAVIALTDPEGCPLSRFKDSLGNPTHILRIGESYKEKQRTIQAKKEVEQRRAGGYSRKYASKAKNLADDMVRNTARDLLYYAVTQDAMLIFENLSRGFGRQGKRTFMAERQYTRMEDWLTAKLAYEGLPSKTYLSKTLAQYTSKTCSNCGFTITSADYDRVLEKLKKTATGWMTTINGKELKVEGQITYYNRYKRQNVVKDLSVELDRLSEESVNNDISSWTKGRSGEALSLLKKRFSHRPVQEKFVCLNCGFETHADEQAALNIARSWLFLRSQEYKKYQTNKTTGNTDKRAFVETWQSFYRKKLKEVWKPAV

SEQ ID NO: 44648 - protein, 979 aa, synthetic construct
  REGION 1..979: note = engineered CasX variant
QEIKRINKIRRRLVKDSNTKKAGKTGPMKTLLVRVMTPDLRERLENLRKKPENIPQPISNTSRANLNKLLTDYTEMKKAILHVYWEEFQKDPVGLMSRVAQPASKKIDQNKLKPEMDEKGNLTTAGFACSQCGQPLFVYKLEQVSEKGKAYTNYFGRCNVAEHEKLILLAQLKPEKDSDEAVTYSLGKFGQRALDFYSIHVTKESTHPVKPLAQIAGNRYASYPVGKALSDACMGTIASFLSKYQDIIIEHQKVVKGNQKRLESLRELAGKENLEYPSVTLPPQPHTKEGVDAYNEVIARVRMWVNLNLWQKLKLSRDDAKPLLRLKGFPSFPLVERQANEVDWWDMVCNVKKLINEKKEDGKVFWQNLAGYKRQEALRPYLSSEEDRKKGKKFARYQLGDLLLHLEKKHEGEDWGKVYDEAWERIDKKVEGLSKHIKLEEERRSEDAQSKAALTDWLRAKASFVIEGKKEADKDEFCRCELKLQKWYGDLRGKPFAIEAENSILDISGFSKQYNCAFIWQKDGVKKLNLYLIINYFKGGKLRFKKIKPEAFEANRFYTVINKKSGEIVPMEVNFNFDDPNLIILPLAFGKRQGREFIWNDLLSLETGSLKLANGRVIEKTLYNRRTRQDEPALFVALTFERREVLDSSNIKPMNLIGVDRGENIPAVIALTDPEGCPLSRFKDSLGNPTHILRIGESYKEKQRTIQAKKEVEQRRAGGYSRKYASKAKNLADDMVRNTARDLLYYAVTQDAMLIFENLSRGFGRQGKRTFMAERQYTRMEDWLTAKLAYEGLPSKTYLSKTLAQYTSKTCSNCGFTITSADYDRVLEKLKKTATGWMTTINGKELKVEGQITYYNRYKRQNVVKDLSVELDRLSEESVNNDISSWTKGRSGEALSLLKKRFSHRPVQEKFVCLNCGFETHADEQAALNIARSWLFLRSQEYKKYQTNKTTGNTDKRAFVETWQSFYRKKLKEVWKPAV

SEQ ID NO: 44649 - protein, 979 aa, synthetic construct
  REGION 1..979: note = engineered CasX variant
QEIKRINKIRRRLVKDSNTKKAGKTGPMKTLLVRVMTPDLRERLENLRKKPENIPQPISNTSRANLNKLLTDYTEMKKAILHVYWEEFQKDPVGLMSRVAQPASKKIDQNKLKPEMDEKGNLTTAGFACSQCGQPLFVYKLEQVSEKGKAYTNYFGRCNVAEHEKLILLAQLKPEKDSDEAVTYSLGKFGQRALDFYSIHVTKESTHPVKPLAQIAGNRYASHPVGKALSDACMGTIASFLSKYQDIIIEHQKVVKGNQKRLESLRELAGKENLEYPSVTLPPQPHTKEGVDAYNEVIARVRMWVNLNLWQKLKLSRDDAKPLLRLKGFPSFPLVERQANEVDWWDMVCNVKKLINEKKEDGKVFWQNLAGYKRQEALRPYLSSEEDRKKGKKFARYQLGDLLLHLEKKHEGEDWGKVYDEAWERIDKKVEGLSKHIKLEEERRSEDAQSKAALTDWLRAKASFVIEGKKEADKDEFCRCELKLQKWYGDLRGKPFAIEAENSILDISGFSKQYNCAFIWQKDGVKKLNLYLIINYFKGGKLRFKKIKPEAFEANRFYTVINKKSGEIVPMEVNFNFDDPNLIILPLAFGKRQGREFIWNDLLSLETGSLKLANGRVIEKTLYNRRTRQDEPALFVALTFERREVLDSSNIKPMNLIGVDRGENIPAVIALTDPEGCPLSRFKDSLGNPTHILRIGESYKEKQRTIQAKKEVEQRRAGGYSRKYASKAKNLADDMVRNTARDLLYYAVTQDAMLIFENLSRGFGRQGKRTFMAERQYTRMEDWLTAKLAYEGLPSKTYLSKTLAQYTSKTCSNCGFTITSADYDRVLEKLKKTATGWMTTINGKELKVEGQITYYNRYKRQNVVKDLSVELDRLSEESVNNDISSWTKGRSGEALSLLKKRFSHRPVQEKFVCLNCGFETHADEQAALNIARSWLFLRSQEYKKYQTNKTTGNTDKRAFVETWQSFYRKKLKEVWKPAV

SEQ ID NO: 44650 - protein, 979 aa, synthetic construct
  REGION 1..979: note = engineered CasX variant
QEIKRINKIRRRLVKDSNTKKAGKTGPMKTLLVRVMTPDLRERLENLRKKPENIPQPISNTSRANLNKLLTDYTEMKKAILHVYWEEFQKDPVGLMSRVAQPASKKIDQNKLKPEMDEKGNLTTAGFACSQCGQPLFVYKLEQVSEKGKAYTNYFGRCNVAEHEKLILLAQLKPEKDSDEAVTYSLGKFGQRALDFYSIHVTKESTHPVKPLAQIAGNRYASSPVGKALSDACMGTIASFLSKYQDIIIEHQKVVKGNQKRLESLRELAGKENLEYPSVTLPPQPHTKEGVDAYNEVIARVRMWVNLNLWQKLKLSRDDAKPLLRLKGFPSFPLVERQANEVDWWDMVCNVKKLINEKKEDGKVFWQNLAGYKRQEALRPYLSSEEDRKKGKKFARYQLGDLLLHLEKKHEGEDWGKVYDEAWERIDKKVEGLSKHIKLEEERRSEDAQSKAALTDWLRAKASFVIEGKKEADKDEFCRCELKLQKWYGDLRGKPFAIEAENSILDISGFSKQYNCAFIWQKDGVKKLNLYLIINYFKGGKLRFKKIKPEAFEANRFYTVINKKSGEIVPMEVNFNFDDPNLIILPLAFGKRQGREFIWNDLLSLETGSLKLANGRVIEKTLYNRRTRQDEPALFVALTFERREVLDSSNIKPMNLIGVDRGENIPAVIALTDPEGCPLSRFKDSLGNPTHILRIGESYKEKQRTIQAKKEVEQRRAGGYSRKYASKAKNLADDMVRNTARDLLYYAVTQDAMLIFENLSRGFGRQGKRTFMAERQYTRMEDWLTAKLAYEGLPSKTYLSKTLAQYTSKTCSNCGFTITSADYDRVLEKLKKTATGWMTTINGKELKVEGQITYYNRYKRQNVVKDLSVELDRLSEESVNNDISSWTKGRSGEALSLLKKRFSHRPVQEKFVCLNCGFETHADEQAALNIARSWLFLRSQEYKKYQTNKTTGNTDKRAFVETWQSFYRKKLKEVWKPAV

SEQ ID NO: 44651 - protein, 979 aa, synthetic construct
  REGION 1..979: note = engineered CasX variant
QEIKRINKIRRRLVKDSNTKKAGKTGPMKTLLVRVMTPDLRERLENLRKKPENIPQPISNTSRANLNKLLTDYTEMKKAILHVYWEEFQKDPVGLMSRVAQPASKKIDQNKLKPEMDEKGNLTTAGFACSQCGQPLFVYKLEQVSEKGKAYTNYFGRCNVAEHEKLILLAQLKPEKDSDEAVTYSLGKFGQRALDFYSIHVTKESTHPVKPLAQIAGNRYASTPVGKALSDACMGTIASFLSKYQDIIIEHQKVVKGNQKRLESLRELAGKENLEYPSVTLPPQPHTKEGVDAYNEVIARVRMWVNLNLWQKLKLSRDDAKPLLRLKGFPSFPLVERQANEVDWWDMVCNVKKLINEKKEDGKVFWQNLAGYKRQEALRPYLSSEEDRKKGKKFARYQLGDLLLHLEKKHEGEDWGKVYDEAWERIDKKVEGLSKHIKLEEERRSEDAQSKAALTDWLRAKASFVIEGKKEADKDEFCRCELKLQKWYGDLRGKPFAIEAENSILDISGFSKQYNCAFIWQKDGVKKLNLYLIINYFKGGKLRFKKIKPEAFEANRFYTVINKKSGEIVPMEVNFNFDDPNLIILPLAFGKRQGREFIWNDLLSLETGSLKLANGRVIEKTLYNRRTRQDEPALFVALTFERREVLDSSNIKPMNLIGVDRGENIPAVIALTDPEGCPLSRFKDSLGNPTHILRIGESYKEKQRTIQAKKEVEQRRAGGYSRKYASKAKNLADDMVRNTARDLLYYAVTQDAMLIFENLSRGFGRQGKRTFMAERQYTRMEDWLTAKLAYEGLPSKTYLSKTLAQYTSKTCSNCGFTITSADYDRVLEKLKKTATGWMTTINGKELKVEGQITYYNRYKRQNVVKDLSVELDRLSEESVNNDISSWTKGRSGEALSLLKKRFSHRPVQEKFVCLNCGFETHADEQAALNIARSWLFLRSQEYKKYQTNKTTGNTDKRAFVETWQSFYRKKLKEVWKPAV

SEQ ID NO: 44652 - protein, 979 aa, synthetic construct
  REGION 1..979: note = engineered CasX variant
QEIKRINKIRRRLVKDSNTKKAGKTGPMKTLLVRVMTPDLRERLENLRKKPENIPQPISNTSRANLNKLLTDYTEMKKAILHVYWEEFQKDPVGLMSRVAQPASKKIDQNKLKPEMDEKGNLTTAGFACSQCGQPLFVYKLEQVSEKGKAYTNYFGRCNVAEHEKLILLAQLKPEKDSDEAVTYSLGKFGQRALDFYSIHVTKESTHPVKPLAQIAGNRYASAPVGKALSDACMGTIASFLSKYQDIIIEHQKVVKGNQKRLESLRELAGKENLEYPSVTLPPQPHTKEGVDAYNEVIARVRMWVNLNLWQKLKLSRDDAKPLLRLKGFPSFPLVERQANEVDWWDMVCNVKKLINEKKEDGKVFWQNLAGYKRQEALRPYLSSEEDRKKGKKFARYQLGDLLLHLEKKHEGEDWGKVYDEAWERIDKKVEGLSKHIKLEEERRSEDAQSKAALTDWLRAKASFVIEGKKEADKDEFCRCELKLQKWYGDLRGKPFAIEAENSILDISGFSKQYNCAFIWQKDGVKKLNLYLIINYFKGGKLRFKKIKPEAFEANRFYTVINKKSGEIVPMEVNFNFDDPNLIILPLAFGKRQGREFIWNDLLSLETGSLKLANGRVIEKTLYNRRTRQDEPALFVALTFERREVLDSSNIKPMNLIGVDRGENIPAVIALTDPEGCPLSRFKDSLGNPTHILRIGESYKEKQRTIQAKKEVEQRRAGGYSRKYASKAKNLADDMVRNTARDLLYYAVTQDAMLIFENLSRGFGRQGKRTFMAERQYTRMEDWLTAKLAYEGLPSKTYLSKTLAQYTSKTCSNCGFTITSADYDRVLEKLKKTATGWMTTINGKELKVEGQITYYNRYKRQNVVKDLSVELDRLSEESVNNDISSWTKGRSGEALSLLKKRFSHRPVQEKFVCLNCGFETHADEQAALNIARSWLFLRSQEYKKYQTNKTTGNTDKRAFVETWQSFYRKKLKEVWKPAV

SEQ ID NO: 44653 - protein, 979 aa, synthetic construct
  REGION 1..979: note = engineered CasX variant
QEIKRINKIRRRLVKDSNTKKAGKTGPMKTLLVRVMTPDLRERLENLRKKPENIPQPISNTSRANLNKLLTDYTEMKKAILHVYWEEFQKDPVGLMSRVAQPASKKIDQNKLKPEMDEKGNLTTAGFACSQCGQPLFVYKLEQVSEKGKAYTNYFGRCNVAEHEKLILLAQLKPEKDSDEAVTYSLGKFGQRALDFYSIHVTKESTHPVKPLAQIAGNRYASVPVGKALSDACMGTIASFLSKYQDIIIEHQKVVKGNQKRLESLRELAGKENLEYPSVTLPPQPHTKEGVDAYNEVIARVRMWVNLNLWQKLKLSRDDAKPLLRLKGFPSFPLVERQANEVDWWDMVCNVKKLINEKKEDGKVFWQNLAGYKRQEALRPYLSSEEDRKKGKKFARYQLGDLLLHLEKKHEGEDWGKVYDEAWERIDKKVEGLSKHIKLEEERRSEDAQSKAALTDWLRAKASFVIEGKKEADKDEFCRCELKLQKWYGDLRGKPFAIEAENSILDISGFSKQYNCAFIWQKDGVKKLNLYLIINYFKGGKLRFKKIKPEAFEANRFYTVINKKSGEIVPMEVNFNFDDPNLIILPLAFGKRQGREFIWNDLLSLETGSLKLANGRVIEKTLYNRRTRQDEPALFVALTFERREVLDSSNIKPMNLIGVDRGENIPAVIALTDPEGCPLSRFKDSLGNPTHILRIGESYKEKQRTIQAKKEVEQRRAGGYSRKYASKAKNLADDMVRNTARDLLYYAVTQDAMLIFENLSRGFGRQGKRTFMAERQYTRMEDWLTAKLAYEGLPSKTYLSKTLAQYTSKTCSNCGFTITSADYDRVLEKLKKTATGWMTTINGKELKVEGQITYYNRYKRQNVVKDLSVELDRLSEESVNNDISSWTKGRSGEALSLLKKRFSHRPVQEKFVCLNCGFETHADEQAALNIARSWLFLRSQEYKKYQTNKTTGNTDKRAFVETWQSFYRKKLKEVWKPAV

SEQ ID NO: 44654 - protein, 979 aa, synthetic construct
  REGION 1..979: note = engineered CasX variant
QEIKRINKIRRRLVKDSNTKKAGKTGPMKTLLVRVMTPDLRERLENLRKKPENIPQPISNTSRANLNKLLTDYTEMKKAILHVYWEEFQKDPVGLMSRVAQPASKKIDQNKLKPEMDEKGNLTTAGFACSQCGQPLFVYKLEQVSEKGKAYTNYFGRCNVAEHEKLIKLAQLKPEKDSDEAVTYSLGKFGQRALDFYSIHVTKESTHPVKPLAQIAGNRYASGPVGKALSDACMGTIASFLSKYQDIIIEHQKVVKGNQKRLESLRELAGKENLEYPSVTLPPQPHTKEGVDAYNEVIARVRMWVNLNLWQKLKLSRDDAKPLLRLKGFPSFPLVERQANEVDWWDMVCNVKKLINEKKEDGKVFWQNLAGYKRQEALRPYLSSEEDRKKGKKFARYQLGDLLLHLEKKHEGEDWGKVYDEAWERIDKKVEGLSKHIKLEEERRSEDAQSKAALTDWLRAKASFVIEGKKEADKDEFCRCELKLQKWYGDLRGKPFAIEAENSILDISGFSKQYNCAFIWQKDGVKKLNLYLIINYFKGGKLRFKKIKPEAFEANRFYTVINKKSGEIVPMEVNFNFDDPNLIILPLAFGKRQGREFIWNDLLSLETGSLKLANGRVIEKTLYNRRTRQDEPALFVALTFERREVLDSSNIKPMNLIGVDRGENIPAVIALTDPEGCPLSRFKDSLGNPTHILRIGESYKEKQRTIQAKKEVEQRRAGGYSRKYASKAKNLADDMVRNTARDLLYYAVTQDAMLIFENLSRGFGRQGKRTFMAERQYTRMEDWLTAKLAYEGLPSKTYLSKTLAQYTSKTCSNCGFTITSADYDRVLEKLKKTATGWMTTINGKELKVEGQITYYNRYKRQNVVKDLSVELDRLSEESVNNDISSWTKGRSGEALSLLKKRFSHRPVQEKFVCLNCGFETHADEQAALNIARSWLFLRSQEYKKYQTNKTTGNTDKRAFVETWQSFYRKKLKEVWKPAV

SEQ ID NO: 44655 - protein, 978 aa, synthetic construct
  REGION 1..978: note = engineered CasX variant
QEIKRINKIRRRLVKDSNTKKAGKTGPMKTLLVRVMTPDLRERLENLRKKPENIPQPISNTSRANLNKLLTDYTEMKKAILHVYWEEFQKDPVGLMSRVAQPASKKIDQNKLKPEMDEKGNLTTAGFACSQCGQPLFVYKLEQVSEKGKAYTNYFGRCNVAEHEKLILLAQLKPEKDSDEAVTYSLGKFGQRALDFYSIHVTKESTHPVKPLAQIAGNRYASPVGKALSDACMGTIASFLSKYQDIIIEHQKVVKGNQKRLESLRELAGKENLEYPSVTLPPQPHTKEGVDAYNEVIARVRMWVNLNLWQKLKLSRDDAKPLLRLKGFPSFPLVERQANEVDWWDMVCNVKKLINEKKEDGKVFWQNLAGYKRQEALRPYLSSEEDRKKGKKFARYQLGDLLLHLEKKHEGEDWGKVYDEAWERIDKKVEGLSKHIKLEEERRSEDAQSKAALTDWLRAKASFVIEGKKEADKDEFCRCELKLQKWYGDLRGKPFAIEAENSILDISGFSKQYNCAFIWQKDGVKKLNLYLIINYFKGGKLRFKKIKPEAFEANRFYTVINKKSGEIVPMEVNFNFDDPNLIILPLAFGKRQGREFIWNDLLSLETGSLKLANGRVIEKTLYNRRTRQDEPALFVALTFERREVLDSSNIKPMNLIGVDRGENIPAVIALTDPEGCPLSRFKDSLGNPTHILRIGESYKEKQRTIQAKKEVEQRRAGGYSRKYASKAKNLADDMVRNTARDLLYYAVTQDAMLIFENLSRGFGRQGKRTFMAERQYTRMEDWLTAKLAYEGLPSKTYLSKTLAQYTSKTCSNCGFTITSADYDRVLEKLKKTATGWMTTINGKELKVEGQITYYNRYKRQNVVKDLSVELDRLSEESVNNDISSWTKGRSGEALSLLKKRFSHRPVQEKFVCLNCGFETHADEQAALNIARSWLFLRSQEYKKYQTNKTTGNTDKRAFVETWQSFYRKKLKEVWKPAV

SEQ ID NO: 44656 - protein, 979 aa, synthetic construct
  REGION 1..979: note = engineered CasX variant
QEIKRINKIRRRLVKDSNTKKAGKTGPMKTLLVRVMTPDLRERLENLRKKPENIPQPISNTSRANLNKLLTDYTEMKKAILHVYWEEFQKDPVGLMSRVAQPASKKIDQNKLKPEMDEKGNLTTAGFACSQCGQPLFVYKLEQVSEKGKAYTNYFGRCNVAEHEKLILLAQLKPEKDSDEAVTYSLGKFGQRALDFYSIHVTKESTHPVKPLAQIAGNRYASYPVGKALSDACMGTIASFLSKYQDIIIEHQKVVKGNQKRLESLRELAGKENLEYPSVTLPPQPHTKEGVDAYNEVIARVRMWVNLNLWQKLKLSRDDAKPLLRLKGFPSFPLVERQANEVDWWDMVCNVKKLINEKKEDGKVFWQNLAGYKRQEALRPYLSSEEDRKKGKKFARYQLGDLLLHLEKKHEGEDWGKVYDEAWERIDKKVEGLSKHIKLEEERRSEDAQSKAALTDWLRAKASFVIEGSKEADKDEFCRCELKLQKWYGDLRGKPFAIEAENSILDISGFSKQYNCAFIWQKDGVKKLNLYLIINYFKGGKLRFKKIKPEAFEANRFYTVINKKSGEIVPMEVNFNFDDPNLIILPLAFGKRQGREFIWNDLLSLETGSLKLANGRVIEKTLYNRRTRQDEPALFVALTFERREVLDSSNIKPMNLIGVDRGENIPAVIALTDPEGCPLSRFKDSLGNPTHILRIGESYKEKQRTIQAKKEVEQRRAGGYSRKYASKAKNLADDMVRNTARDLLYYAVTQDAMLIFENLSRGFGRQGKRTFMAERQYTRMEDWLTAKLAYEGLPSKTYLSKTLAQYTSKTCSNCGFTITSADYDRVLEKLKKTATGWMTTINGKELKVEGQITYYNRYKRQNVVKDLSVELDRLSEESVNNDISSWTKGRSGEALSLLKKRFSHRPVQEKFVCLNCGFETHADEQAALNIARSWLFLRSQEYKKYQTNKTTGNTDKRAFVETWQSFYRKKLKEVWKPAV

SEQ ID NO: 44657 - protein, 979 aa, synthetic construct
  REGION 1..979: note = engineered CasX variant
QEIKRINKIRRRLVKDSNTKKAGKTGPMKTLLVRVMTPDLRERLENLRKKPENIPQPISNTSRANLNKLLTDYTEMKKAILHVYWEEFQKDPVGLMSRVAQPASKKIDQNKLKPEMDEKGNLTTAGFACSQCGQPLFVYKLEQVSEKGKAYTNYFGRCNVAEHEKLILLAQLKPEKDSDEAVTYSLGKFGQRALDFYSIHVTKESTHPVKPLAQIAGNRYASHPVGKALSDACMGTIASFLSKYQDIIIEHQKVVKGNQKRLESLRELAGKENLEYPSVTLPPQPHTKEGVDAYNEVIARVRMWVNLNLWQKLKLSRDDAKPLLRLKGFPSFPLVERQANEVDWWDMVCNVKKLINEKKEDGKVFWQNLAGYKRQEALRPYLSSEEDRKKGKKFARYQLGDLLLHLEKKHEGEDWGKVYDEAWERIDKKVEGLSKHIKLEEERRSEDAQSKAALTDWLRAKASFVIEGSKEADKDEFCRCELKLQKWYGDLRGKPFAIEAENSILDISGFSKQYNCAFIWQKDGVKKLNLYLIINYFKGGKLRFKKIKPEAFEANRFYTVINKKSGEIVPMEVNFNFDDPNLIILPLAFGKRQGREFIWNDLLSLETGSLKLANGRVIEKTLYNRRTRQDEPALFVALTFERREVLDSSNIKPMNLIGVDRGENIPAVIALTDPEGCPLSRFKDSLGNPTHILRIGESYKEKQRTIQAKKEVEQRRAGGYSRKYASKAKNLADDMVRNTARDLLYYAVTQDAMLIFENLSRGFGRQGKRTFMAERQYTRMEDWLTAKLAYEGLPSKTYLSKTLAQYTSKTCSNCGFTITSADYDRVLEKLKKTATGWMTTINGKELKVEGQITYYNRYKRQNVVKDLSVELDRLSEESVNNDISSWTKGRSGEALSLLKKRFSHRPVQEKFVCLNCGFETHADEQAALNIARSWLFLRSQEYKKYQTNKTTGNTDKRAFVETWQSFYRKKLKEVWKPAV

SEQ ID NO: 44658 - protein, 979 aa, synthetic construct
  REGION 1..979: note = engineered CasX variant
QEIKRINKIRRRLVKDSNTKKAGKTGPMKTLLVRVMTPDLRERLENLRKKPENIPQPISNTSRANLNKLLTDYTEMKKAILHVYWEEFQKDPVGLMSRVAQPASKKIDQNKLKPEMDEKGNLTTAGFACSQCGQPLFVYKLEQVSEKGKAYTNYFGRCNVAEHEKLILLAQLKPEKDSDEAVTYSLGKFGQRALDFYSIHVTKESTHPVKPLAQIAGNRYASSPVGKALSDACMGTIASFLSKYQDIIIEHQKVVKGNQKRLESLRELAGKENLEYPSVTLPPQPHTKEGVDAYNEVIARVRMWVNLNLWQKLKLSRDDAKPLLRLKGFPSFPLVERQANEVDWWDMVCNVKKLINEKKEDGKVFWQNLAGYKRQEALRPYLSSEEDRKKGKKFARYQLGDLLLHLEKKHEGEDWGKVYDEAWERIDKKVEGLSKHIKLEEERRSEDAQSKAALTDWLRAKASFVIEGSKEADKDEFCRCELKLQKWYGDLRGKPFAIEAENSILDISGFSKQYNCAFIWQKDGVKKLNLYLIINYFKGGKLRFKKIKPEAFEANRFYTVINKKSGEIVPMEVNFNFDDPNLIILPLAFGKRQGREFIWNDLLSLETGSLKLANGRVIEKTLYNRRTRQDEPALFVALTFERREVLDSSNIKPMNLIGVDRGENIPAVIALTDPEGCPLSRFKDSLGNPTHILRIGESYKEKQRTIQAKKEVEQRRAGGYSRKYASKAKNLADDMVRNTARDLLYYAVTQDAMLIFENLSRGFGRQGKRTFMAERQYTRMEDWLTAKLAYEGLPSKTYLSKTLAQYTSKTCSNCGFTITSADYDRVLEKLKKTATGWMTTINGKELKVEGQITYYNRYKRQNVVKDLSVELDRLSEESVNNDISSWTKGRSGEALSLLKKRFSHRPVQEKFVCLNCGFETHADEQAALNIARSWLFLRSQEYKKYQTNKTTGNTDKRAFVETWQSFYRKKLKEVWKPAV

SEQ ID NO: 44659 - protein, 979 aa, synthetic construct
  REGION 1..979: note = engineered CasX variant
QEIKRINKIRRRLVKDSNTKKAGKTGPMKTLLVRVMTPDLRERLENLRKKPENIPQPISNTSRANLNKLLTDYTEMKKAILHVYWEEFQKDPVGLMSRVAQPASKKIDQNKLKPEMDEKGNLTTAGFACSQCGQPLFVYKLEQVSEKGKAYTNYFGRCNVAEHEKLILLAQLKPEKDSDEAVTYSLGKFGQRALDFYSIHVTKESTHPVKPLAQIAGNRYASTPVGKALSDACMGTIASFLSKYQDIIIEHQKVVKGNQKRLESLRELAGKENLEYPSVTLPPQPHTKEGVDAYNEVIARVRMWVNLNLWQKLKLSRDDAKPLLRLKGFPSFPLVERQANEVDWWDMVCNVKKLINEKKEDGKVFWQNLAGYKRQEALRPYLSSEEDRKKGKKFARYQLGDLLLHLEKKHEGEDWGKVYDEAWERIDKKVEGLSKHIKLEEERRSEDAQSKAALTDWLRAKASFVIEGSKEADKDEFCRCELKLQKWYGDLRGKPFAIEAENSILDISGFSKQYNCAFIWQKDGVKKLNLYLIINYFKGGKLRFKKIKPEAFEANRFYTVINKKSGEIVPMEVNFNFDDPNLIILPLAFGKRQGREFIWNDLLSLETGSLKLANGRVIEKTLYNRRTRQDEPALFVALTFERREVLDSSNIKPMNLIGVDRGENIPAVIALTDPEGCPLSRFKDSLGNPTHILRIGESYKEKQRTIQAKKEVEQRRAGGYSRKYASKAKNLADDMVRNTARDLLYYAVTQDAMLIFENLSRGFGRQGKRTFMAERQYTRMEDWLTAKLAYEGLPSKTYLSKTLAQYTSKTCSNCGFTITSADYDRVLEKLKKTATGWMTTINGKELKVEGQITYYNRYKRQNVVKDLSVELDRLSEESVNNDISSWTKGRSGEALSLLKKRFSHRPVQEKFVCLNCGFETHADEQAALNIARSWLFLRSQEYKKYQTNKTTGNTDKRAFVETWQSFYRKKLKEVWKPAV

SEQ ID NO: 44660 - protein, 979 aa, synthetic construct
  REGION 1..979: note = engineered CasX variant
QEIKRINKIRRRLVKDSNTKKAGKTGPMKTLLVRVMTPDLRERLENLRKKPENIPQPISNTSRANLNKLLTDYTEMKKAILHVYWEEFQKDPVGLMSRVAQPASKKIDQNKLKPEMDEKGNLTTAGFACSQCGQPLFVYKLEQVSEKGKAYTNYFGRCNVAEHEKLILLAQLKPEKDSDEAVTYSLGKFGQRALDFYSIHVTKESTHPVKPLAQIAGNRYASAPVGKALSDACMGTIASFLSKYQDIIIEHQKVVKGNQKRLESLRELAGKENLEYPSVTLPPQPHTKEGVDAYNEVIARVRMWVNLNLWQKLKLSRDDAKPLLRLKGFPSFPLVERQANEVDWWDMVCNVKKLINEKKEDGKVFWQNLAGYKRQEALRPYLSSEEDRKKGKKFARYQLGDLLLHLEKKHEGEDWGKVYDEAWERIDKKVEGLSKHIKLEEERRSEDAQSKAALTDWLRAKASFVIEGSKEADKDEFCRCELKLQKWYGDLRGKPFAIEAENSILDISGFSKQYNCAFIWQKDGVKKLNLYLIINYFKGGKLRFKKIKPEAFEANRFYTVINKKSGEIVPMEVNFNFDDPNLIILPLAFGKRQGREFIWNDLLSLETGSLKLANGRVIEKTLYNRRTRQDEPALFVALTFERREVLDSSNIKPMNLIGVDRGENIPAVIALTDPEGCPLSRFKDSLGNPTHILRIGESYKEKQRTIQAKKEVEQRRAGGYSRKYASKAKNLADDMVRNTARDLLYYAVTQDAMLIFENLSRGFGRQGKRTFMAERQYTRMEDWLTAKLAYEGLPSKTYLSKTLAQYTSKTCSNCGFTITSADYDRVLEKLKKTATGWMTTINGKELKVEGQITYYNRYKRQNVVKDLSVELDRLSEESVNNDISSWTKGRSGEALSLLKKRFSHRPVQEKFVCLNCGFETHADEQAALNIARSWLFLRSQEYKKYQTNKTTGNTDKRAFVETWQSFYRKKLKEVWKPAV

SEQ ID NO: 44661 - protein, 979 aa, synthetic construct
  REGION 1..979: note = engineered CasX variant
QEIKRINKIRRRLVKDSNTKKAGKTGPMKTLLVRVMTPDLRERLENLRKKPENIPQPISNTSRANLNKLLTDYTEMKKAILHVYWEEFQKDPVGLMSRVAQPASKKIDQNKLKPEMDEKGNLTTAGFACSQCGQPLFVYKLEQVSEKGKAYTNYFGRCNVAEHEKLILLAQLKPEKDSDEAVTYSLGKFGQRALDFYSIHVTKESTHPVKPLAQIAGNRYASVPVGKALSDACMGTIASFLSKYQDIIIEHQKVVKGNQKRLESLRELAGKENLEYPSVTLPPQPHTKEGVDAYNEVIARVRMWVNLNLWQKLKLSRDDAKPLLRLKGFPSFPLVERQANEVDWWDMVCNVKKLINEKKEDGKVFWQNLAGYKRQEALRPYLSSEEDRKKGKKFARYQLGDLLLHLEKKHEGEDWGKVYDEAWERIDKKVEGLSKHIKLEEERRSEDAQSKAALTDWLRAKASFVIEGSKEADKDEFCRCELKLQKWYGDLRGKPFAIEAENSILDISGFSKQYNCAFIWQKDGVKKLNLYLIINYFKGGKLRFKKIKPEAFEANRFYTVINKKSGEIVPMEVNFNFDDPNLIILPLAFGKRQGREFIWNDLLSLETGSLKLANGRVIEKTLYNRRTRQDEPALFVALTFERREVLDSSNIKPMNLIGVDRGENIPAVIALTDPEGCPLSRFKDSLGNPTHILRIGESYKEKQRTIQAKKEVEQRRAGGYSRKYASKAKNLADDMVRNTARDLLYYAVTQDAMLIFENLSRGFGRQGKRTFMAERQYTRMEDWLTAKLAYEGLPSKTYLSKTLAQYTSKTCSNCGFTITSADYDRVLEKLKKTATGWMTTINGKELKVEGQITYYNRYKRQNVVKDLSVELDRLSEESVNNDISSWTKGRSGEALSLLKKRFSHRPVQEKFVCLNCGFETHADEQAALNIARSWLFLRSQEYKKYQTNKTTGNTDKRAFVETWQSFYRKKLKEVWKPAV

SEQ ID NO: 44662 - protein, 979 aa, synthetic construct
  REGION 1..979: note = engineered CasX variant
QEIKRINKIRRRLVKDSNTKKAGKTGPMKTLLVRVMTPDLRERLENLRKKPENIPQPISNTSRANLNKLLTDYTEMKKAILHVYWEEFQKDPVGLMSRVAQPASKKIDQNKLKPEMDEKGNLTTAGFACSQCGQPLFVYKLEQVSEKGKAYTNYFGRCNVAEHEKLIKLAQLKPEKDSDEAVTYSLGKFGQRALDFYSIHVTKESTHPVKPLAQIAGNRYASGPVGKALSDACMGTIASFLSKYQDIIIEHQKVVKGNQKRLESLRELAGKENLEYPSVTLPPQPHTKEGVDAYNEVIARVRMWVNLNLWQKLKLSRDDAKPLLRLKGFPSFPLVERQANEVDWWDMVCNVKKLINEKKEDGKVFWQNLAGYKRQEALRPYLSSEEDRKKGKKFARYQLGDLLLHLEKKHEGEDWGKVYDEAWERIDKKVEGLSKHIKLEEERRSEDAQSKAALTDWLRAKASFVIEGSKEADKDEFCRCELKLQKWYGDLRGKPFAIEAENSILDISGFSKQYNCAFIWQKDGVKKLNLYLIINYFKGGKLRFKKIKPEAFEANRFYTVINKKSGEIVPMEVNFNFDDPNLIILPLAFGKRQGREFIWNDLLSLETGSLKLANGRVIEKTLYNRRTRQDEPALFVALTFERREVLDSSNIKPMNLIGVDRGENIPAVIALTDPEGCPLSRFKDSLGNPTHILRIGESYKEKQRTIQAKKEVEQRRAGGYSRKYASKAKNLADDMVRNTARDLLYYAVTQDAMLIFENLSRGFGRQGKRTFMAERQYTRMEDWLTAKLAYEGLPSKTYLSKTLAQYTSKTCSNCGFTITSADYDRVLEKLKKTATGWMTTINGKELKVEGQITYYNRYKRQNVVKDLSVELDRLSEESVNNDISSWTKGRSGEALSLLKKRFSHRPVQEKFVCLNCGFETHADEQAALNIARSWLFLRSQEYKKYQTNKTTGNTDKRAFVETWQSFYRKKLKEVWKPAV

SEQ ID NO: 44663 - protein, 978 aa, synthetic construct
  REGION 1..978: note = engineered CasX variant
QEIKRINKIRRRLVKDSNTKKAGKTGPMKTLLVRVMTPDLRERLENLRKKPENIPQPISNTSRANLNKLLTDYTEMKKAILHVYWEEFQKDPVGLMSRVAQPASKKIDQNKLKPEMDEKGNLTTAGFACSQCGQPLFVYKLEQVSEKGKAYTNYFGRCNVAEHEKLILLAQLKPEKDSDEAVTYSLGKFGQRALDFYSIHVTKESTHPVKPLAQIAGNRYASPVGKALSDACMGTIASFLSKYQDIIIEHQKVVKGNQKRLESLRELAGKENLEYPSVTLPPQPHTKEGVDAYNEVIARVRMWVNLNLWQKLKLSRDDAKPLLRLKGFPSFPLVERQANEVDWWDMVCNVKKLINEKKEDGKVFWQNLAGYKRQEALRPYLSSEEDRKKGKKFARYQLGDLLLHLEKKHEGEDWGKVYDEAWERIDKKVEGLSKHIKLEEERRSEDAQSKAALTDWLRAKASFVIEGSKEADKDEFCRCELKLQKWYGDLRGKPFAIEAENSILDISGFSKQYNCAFIWQKDGVKKLNLYLIINYFKGGKLRFKKIKPEAFEANRFYTVINKKSGEIVPMEVNFNFDDPNLIILPLAFGKRQGREFIWNDLLSLETGSLKLANGRVIEKTLYNRRTRQDEPALFVALTFERREVLDSSNIKPMNLIGVDRGENIPAVIALTDPEGCPLSRFKDSLGNPTHILRIGESYKEKQRTIQAKKEVEQRRAGGYSRKYASKAKNLADDMVRNTARDLLYYAVTQDAMLIFENLSRGFGRQGKRTFMAERQYTRMEDWLTAKLAYEGLPSKTYLSKTLAQYTSKTCSNCGFTITSADYDRVLEKLKKTATGWMTTINGKELKVEGQITYYNRYKRQNVVKDLSVELDRLSEESVNNDISSWTKGRSGEALSLLKKRFSHRPVQEKFVCLNCGFETHADEQAALNIARSWLFLRSQEYKKYQTNKTTGNTDKRAFVETWQSFYRKKLKEVWKPAV

SEQ ID NO: 44664 - protein, 980 aa, synthetic construct
  REGION 1..980: note = engineered CasX variant
QEIKRINKIRRRLVKDSNTKKAGKTGPMKTLLVRVMTPDLRERLENLRKKPENIPQPISNTSRANLNKLLTDYTEMKKAILHVYWEEFQKDPVGLMSRVAQPASKKIDQNKLKPEMDEKGNLTTAGFACSQCGQPLFVYKLEQVSEKGKAYTNYFGRCNVAEHEKLILLAQLKPEKDSDEAVTYSLGKFGQRALDFYSIHVTKESTHPVKPLAQIAGNRYASYPVGKALSDACMGTIASFLSKYQDIIIEHQKVVKGNQKRLESLRELAGKENLEYPSVTLPPQPHTKEGVDAYNEVIARVRMWVNLNLWQKLKLSRDDAKPLLRLKGFPSFPLVERQANEVDWWDMVCNVKKLINEKKEDGKVFWQNLAGYKRQEALRPYLSSEEDRKKGKKFARYQLGDLLLHLEKKHEGEDWGKVYDEAWERIDKKVEGLSKHIKLEEERRSEDAQSKAALTDWLRAKASFVIEGLKEADDKDEFCRCELKLQKWYGDLRGKPFAIEAENSILDISGFSKQYNCAFIWQKDGVKKLNLYLIINYFKGGKLRFKKIKPEAFEANRFYTVINKKSGEIVPMEVNFNFDDPNLIILPLAFGKRQGREFIWNDLLSLETGSLKLANGRVIEKTLYNRRTRQDEPALFVALTFERREVLDSSNIKPMNLIGVDRGENIPAVIALTDPEGCPLSRFKDSLGNPTHILRIGESYKEKQRTIQAKKEVEQRRAGGYSRKYASKAKNLADDMVRNTARDLLYYAVTQDAMLIFENLSRGFGRQGKRTFMAERQYTRMEDWLTAKLAYEGLPSKTYLSKTLAQYTSKTCSNCGFTITSADYDRVLEKLKKTATGWMTTINGKELKVEGQITYYNRYKRQNVVKDLSVELDRLSEESVNNDISSWTKGRSGEALSLLKKRFSHRPVQEKFVCLNCGFETHADEQAALNIARSWLFLRSQEYKKYQTNKTTGNTDKRAFVETWQSFYRKKLKEVWKPAV

SEQ ID NO: 44665 - protein, 980 aa, synthetic construct
  REGION 1..980: note = engineered CasX variant
QEIKRINKIRRRLVKDSNTKKAGKTGPMKTLLVRVMTPDLRERLENLRKKPENIPQPISNTSRANLNKLLTDYTEMKKAILHVYWEEFQKDPVGLMSRVAQPASKKIDQNKLKPEMDEKGNLTTAGFACSQCGQPLFVYKLEQVSEKGKAYTNYFGRCNVAEHEKLILLAQLKPEKDSDEAVTYSLGKFGQRALDFYSIHVTKESTHPVKPLAQIAGNRYASHPVGKALSDACMGTIASFLSKYQDIIIEHQKVVKGNQKRLESLRELAGKENLEYPSVTLPPQPHTKEGVDAYNEVIARVRMWVNLNLWQKLKLSRDDAKPLLRLKGFPSFPLVERQANEVDWWDMVCNVKKLINEKKEDGKVFWQNLAGYKRQEALRPYLSSEEDRKKGKKFARYQLGDLLLHLEKKHEGEDWGKVYDEAWERIDKKVEGLSKHIKLEEERRSEDAQSKAALTDWLRAKASFVIEGLKEADDKDEFCRCELKLQKWYGDLRGKPFAIEAENSILDISGFSKQYNCAFIWQKDGVKKLNLYLIINYFKGGKLRFKKIKPEAFEANRFYTVINKKSGEIVPMEVNFNFDDPNLIILPLAFGKRQGREFIWNDLLSLETGSLKLANGRVIEKTLYNRRTRQDEPALFVALTFERREVLDSSNIKPMNLIGVDRGENIPAVIALTDPEGCPLSRFKDSLGNPTHILRIGESYKEKQRTIQAKKEVEQRRAGGYSRKYASKAKNLADDMVRNTARDLLYYAVTQDAMLIFENLSRGFGRQGKRTFMAERQYTRMEDWLTAKLAYEGLPSKTYLSKTLAQYTSKTCSNCGFTITSADYDRVLEKLKKTATGWMTTINGKELKVEGQITYYNRYKRQNVVKDLSVELDRLSEESVNNDISSWTKGRSGEALSLLKKRFSHRPVQEKFVCLNCGFETHADEQAALNIARSWLFLRSQEYKKYQTNKTTGNTDKRAFVETWQSFYRKKLKEVWKPAV

SEQ ID NO: 44666 - protein, 980 aa, synthetic construct
  REGION 1..980: note = engineered CasX variant
QEIKRINKIRRRLVKDSNTKKAGKTGPMKTLLVRVMTPDLRERLENLRKKPENIPQPISNTSRANLNKLLTDYTEMKKAILHVYWEEFQKDPVGLMSRVAQPASKKIDQNKLKPEMDEKGNLTTAGFACSQCGQPLFVYKLEQVSEKGKAYTNYFGRCNVAEHEKLILLAQLKPEKDSDEAVTYSLGKFGQRALDFYSIHVTKESTHPVKPLAQIAGNRYASSPVGKALSDACMGTIASFLSKYQDIIIEHQKVVKGNQKRLESLRELAGKENLEYPSVTLPPQPHTKEGVDAYNEVIARVRMWVNLNLWQKLKLSRDDAKPLLRLKGFPSFPLVERQANEVDWWDMVCNVKKLINEKKEDGKVFWQNLAGYKRQEALRPYLSSEEDRKKGKKFARYQLGDLLLHLEKKHEGEDWGKVYDEAWERIDKKVEGLSKHIKLEEERRSEDAQSKAALTDWLRAKASFVIEGLKEADDKDEFCRCELKLQKWYGDLRGKPFAIEAENSILDISGFSKQYNCAFIWQKDGVKKLNLYLIINYFKGGKLRFKKIKPEAFEANRFYTVINKKSGEIVPMEVNFNFDDPNLIILPLAFGKRQGREFIWNDLLSLETGSLKLANGRVIEKTLYNRRTRQDEPALFVALTFERREVLDSSNIKPMNLIGVDRGENIPAVIALTDPEGCPLSRFKDSLGNPTHILRIGESYKEKQRTIQAKKEVEQRRAGGYSRKYASKAKNLADDMVRNTARDLLYYAVTQDAMLIFENLSRGFGRQGKRTFMAERQYTRMEDWLTAKLAYEGLPSKTYLSKTLAQYTSKTCSNCGFTITSADYDRVLEKLKKTATGWMTTINGKELKVEGQITYYNRYKRQNVVKDLSVELDRLSEESVNNDISSWTKGRSGEALSLLKKRFSHRPVQEKFVCLNCGFETHADEQAALNIARSWLFLRSQEYKKYQTNKTTGNTDKRAFVETWQSFYRKKLKEVWKPAV

SEQ ID NO: 44667 - protein, 980 aa, synthetic construct
  REGION 1..980: note = engineered CasX variant
QEIKRINKIRRRLVKDSNTKKAGKTGPMKTLLVRVMTPDLRERLENLRKKPENIPQPISNTSRANLNKLLTDYTEMKKAILHVYWEEFQKDPVGLMSRVAQPASKKIDQNKLKPEMDEKGNLTTAGFACSQCGQPLFVYKLEQVSEKGKAYTNYFGRCNVAEHEKLILLAQLKPEKDSDEAVTYSLGKFGQRALDFYSIHVTKESTHPVKPLAQIAGNRYASTPVGKALSDACMGTIASFLSKYQDIIIEHQKVVKGNQKRLESLRELAGKENLEYPSVTLPPQPHTKEGVDAYNEVIARVRMWVNLNLWQKLKLSRDDAKPLLRLKGFPSFPLVERQANEVDWWDMVCNVKKLINEKKEDGKVFWQNLAGYKRQEALRPYLSSEEDRKKGKKFARYQLGDLLLHLEKKHEGEDWGKVYDEAWERIDKKVEGLSKHIKLEEERRSEDAQSKAALTDWLRAKASFVIEGLKEADDKDEFCRCELKLQKWYGDLRGKPFAIEAENSILDISGFSKQYNCAFIWQKDGVKKLNLYLIINYFKGGKLRFKKIKPEAFEANRFYTVINKKSGEIVPMEVNFNFDDPNLIILPLAFGKRQGREFIWNDLLSLETGSLKLANGRVIEKTLYNRRTRQDEPALFVALTFERREVLDSSNIKPMNLIGVDRGENIPAVIALTDPEGCPLSRFKDSLGNPTHILRIGESYKEKQRTIQAKKEVEQRRAGGYSRKYASKAKNLADDMVRNTARDLLYYAVTQDAMLIFENLSRGFGRQGKRTFMAERQYTRMEDWLTAKLAYEGLPSKTYLSKTLAQYTSKTCSNCGFTITSADYDRVLEKLKKTATGWMTTINGKELKVEGQITYYNRYKRQNVVKDLSVELDRLSEESVNNDISSWTKGRSGEALSLLKKRFSHRPVQEKFVCLNCGFETHADEQAALNIARSWLFLRSQEYKKYQTNKTTGNTDKRAFVETWQSFYRKKLKEVWKPAV

SEQ ID NO: 44668 - protein, 980 aa, synthetic construct
  REGION 1..980: note = engineered CasX variant
QEIKRINKIRRRLVKDSNTKKAGKTGPMKTLLVRVMTPDLRERLENLRKKPENIPQPISNTSRANLNKLLTDYTEMKKAILHVYWEEFQKDPVGLMSRVAQPASKKIDQNKLKPEMDEKGNLTTAGFACSQCGQPLFVYKLEQVSEKGKAYTNYFGRCNVAEHEKLILLAQLKPEKDSDEAVTYSLGKFGQRALDFYSIHVTKESTHPVKPLAQIAGNRYASAPVGKALSDACMGTIASFLSKYQDIIIEHQKVVKGNQKRLESLRELAGKENLEYPSVTLPPQPHTKEGVDAYNEVIARVRMWVNLNLWQKLKLSRDDAKPLLRLKGFPSFPLVERQANEVDWWDMVCNVKKLINEKKEDGKVFWQNLAGYKRQEALRPYLSSEEDRKKGKKFARYQLGDLLLHLEKKHEGEDWGKVYDEAWERIDKKVEGLSKHIKLEEERRSEDAQSKAALTDWLRAKASFVIEGLKEADDKDEFCRCELKLQKWYGDLRGKPFAIEAENSILDISGFSKQYNCAFIWQKDGVKKLNLYLIINYFKGGKLRFKKIKPEAFEANRFYTVINKKSGEIVPMEVNFNFDDPNLIILPLAFGKRQGREFIWNDLLSLETGSLKLANGRVIEKTLYNRRTRQDEPALFVALTFERREVLDSSNIKPMNLIGVDRGENIPAVIALTDPEGCPLSRFKDSLGNPTHILRIGESYKEKQRTIQAKKEVEQRRAGGYSRKYASKAKNLADDMVRNTARDLLYYAVTQDAMLIFENLSRGFGRQGKRTFMAERQYTRMEDWLTAKLAYEGLPSKTYLSKTLAQYTSKTCSNCGFTITSADYDRVLEKLKKTATGWMTTINGKELKVEGQITYYNRYKRQNVVKDLSVELDRLSEESVNNDISSWTKGRSGEALSLLKKRFSHRPVQEKFVCLNCGFETHADEQAALNIARSWLFLRSQEYKKYQTNKTTGNTDKRAFVETWQSFYRKKLKEVWKPAV

SEQ ID NO: 44669 - protein, 980 aa, synthetic construct
  REGION 1..980: note = engineered CasX variant
QEIKRINKIRRRLVKDSNTKKAGKTGPMKTLLVRVMTPDLRERLENLRKKPENIPQPISNTSRANLNKLLTDYTEMKKAILHVYWEEFQKDPVGLMSRVAQPASKKIDQNKLKPEMDEKGNLTTAGFACSQCGQPLFVYKLEQVSEKGKAYTNYFGRCNVAEHEKLILLAQLKPEKDSDEAVTYSLGKFGQRALDFYSIHVTKESTHPVKPLAQIAGNRYASVPVGKALSDACMGTIASFLSKYQDIIIEHQKVVKGNQKRLESLRELAGKENLEYPSVTLPPQPHTKEGVDAYNEVIARVRMWVNLNLWQKLKLSRDDAKPLLRLKGFPSFPLVERQANEVDWWDMVCNVKKLINEKKEDGKVFWQNLAGYKRQEALRPYLSSEEDRKKGKKFARYQLGDLLLHLEKKHEGEDWGKVYDEAWERIDKKVEGLSKHIKLEEERRSEDAQSKAALTDWLRAKASFVIEGLKEADDKDEFCRCELKLQKWYGDLRGKPFAIEAENSILDISGFSKQYNCAFIWQKDGVKKLNLYLIINYFKGGKLRFKKIKPEAFEANRFYTVINKKSGEIVPMEVNFNFDDPNLIILPLAFGKRQGREFIWNDLLSLETGSLKLANGRVIEKTLYNRRTRQDEPALFVALTFERREVLDSSNIKPMNLIGVDRGENIPAVIALTDPEGCPLSRFKDSLGNPTHILRIGESYKEKQRTIQAKKEVEQRRAGGYSRKYASKAKNLADDMVRNTARDLLYYAVTQDAMLIFENLSRGFGRQGKRTFMAERQYTRMEDWLTAKLAYEGLPSKTYLSKTLAQYTSKTCSNCGFTITSADYDRVLEKLKKTATGWMTTINGKELKVEGQITYYNRYKRQNVVKDLSVELDRLSEESVNNDISSWTKGRSGEALSLLKKRFSHRPVQEKFVCLNCGFETHADEQAALNIARSWLFLRSQEYKKYQTNKTTGNTDKRAFVETWQSFYRKKLKEVWKPAV

SEQ ID NO: 44670 - protein, 980 aa, synthetic construct
  REGION 1..980: note = engineered CasX variant
QEIKRINKIRRRLVKDSNTKKAGKTGPMKTLLVRVMTPDLRERLENLRKKPENIPQPISNTSRANLNKLLTDYTEMKKAILHVYWEEFQKDPVGLMSRVAQPASKKIDQNKLKPEMDEKGNLTTAGFACSQCGQPLFVYKLEQVSEKGKAYTNYFGRCNVAEHEKLIKLAQLKPEKDSDEAVTYSLGKFGQRALDFYSIHVTKESTHPVKPLAQIAGNRYASGPVGKALSDACMGTIASFLSKYQDIIIEHQKVVKGNQKRLESLRELAGKENLEYPSVTLPPQPHTKEGVDAYNEVIARVRMWVNLNLWQKLKLSRDDAKPLLRLKGFPSFPLVERQANEVDWWDMVCNVKKLINEKKEDGKVFWQNLAGYKRQEALRPYLSSEEDRKKGKKFARYQLGDLLLHLEKKHEGEDWGKVYDEAWERIDKKVEGLSKHIKLEEERRSEDAQSKAALTDWLRAKASFVIEGLKEADDKDEFCRCELKLQKWYGDLRGKPFAIEAENSILDISGFSKQYNCAFIWQKDGVKKLNLYLIINYFKGGKLRFKKIKPEAFEANRFYTVINKKSGEIVPMEVNFNFDDPNLIILPLAFGKRQGREFIWNDLLSLETGSLKLANGRVIEKTLYNRRTRQDEPALFVALTFERREVLDSSNIKPMNLIGVDRGENIPAVIALTDPEGCPLSRFKDSLGNPTHILRIGESYKEKQRTIQAKKEVEQRRAGGYSRKYASKAKNLADDMVRNTARDLLYYAVTQDAMLIFENLSRGFGRQGKRTFMAERQYTRMEDWLTAKLAYEGLPSKTYLSKTLAQYTSKTCSNCGFTITSADYDRVLEKLKKTATGWMTTINGKELKVEGQITYYNRYKRQNVVKDLSVELDRLSEESVNNDISSWTKGRSGEALSLLKKRFSHRPVQEKFVCLNCGFETHADEQAALNIARSWLFLRSQEYKKYQTNKTTGNTDKRAFVETWQSFYRKKLKEVWKPAV

SEQ ID NO: 44671 - protein, 979 aa, synthetic construct
  REGION 1..979: note = engineered CasX variant
QEIKRINKIRRRLVKDSNTKKAGKTGPMKTLLVRVMTPDLRERLENLRKKPENIPQPISNTSRANLNKLLTDYTEMKKAILHVYWEEFQKDPVGLMSRVAQPASKKIDQNKLKPEMDEKGNLTTAGFACSQCGQPLFVYKLEQVSEKGKAYTNYFGRCNVAEHEKLILLAQLKPEKDSDEAVTYSLGKFGQRALDFYSIHVTKESTHPVKPLAQIAGNRYASPVGKALSDACMGTIASFLSKYQDIIIEHQKVVKGNQKRLESLRELAGKENLEYPSVTLPPQPHTKEGVDAYNEVIARVRMWVNLNLWQKLKLSRDDAKPLLRLKGFPSFPLVERQANEVDWWDMVCNVKKLINEKKEDGKVFWQNLAGYKRQEALRPYLSSEEDRKKGKKFARYQLGDLLLHLEKKHEGEDWGKVYDEAWERIDKKVEGLSKHIKLEEERRSEDAQSKAALTDWLRAKASFVIEGLKEADDKDEFCRCELKLQKWYGDLRGKPFAIEAENSILDISGFSKQYNCAFIWQKDGVKKLNLYLIINYFKGGKLRFKKIKPEAFEANRFYTVINKKSGEIVPMEVNFNFDDPNLIILPLAFGKRQGREFIWNDLLSLETGSLKLANGRVIEKTLYNRRTRQDEPALFVALTFERREVLDSSNIKPMNLIGVDRGENIPAVIALTDPEGCPLSRFKDSLGNPTHILRIGESYKEKQRTIQAKKEVEQRRAGGYSRKYASKAKNLADDMVRNTARDLLYYAVTQDAMLIFENLSRGFGRQGKRTFMAERQYTRMEDWLTAKLAYEGLPSKTYLSKTLAQYTSKTCSNCGFTITSADYDRVLEKLKKTATGWMTTINGKELKVEGQITYYNRYKRQNVVKDLSVELDRLSEESVNNDISSWTKGRSGEALSLLKKRFSHRPVQEKFVCLNCGFETHADEQAALNIARSWLFLRSQEYKKYQTNKTTGNTDKRAFVETWQSFYRKKLKEVWKPAV

SEQ ID NO: 44672 - protein, 980 aa, synthetic construct
  REGION 1..980: note = engineered CasX variant
QEIKRINKIRRRLVKDSNTKKAGKTGPMKTLLVRVMTPDLRERLENLRKKPENIPQPISNTSRANLNKLLTDYTEMKKAILHVYWEEFQKDPVGLMSRVAQPASKKIDQNKLKPEMDEKGNLTTAGFACSQCGQPLFVYKLEQVSEKGKAYTNYFGRCNVAEHEKLILLAQLKPEKDSDEAVTYSLGKFGQRALDFYSIHVTKESTHPVKPLAQIAGNRYASYPVGKALSDACMGTIASFLSKYQDIIIEHQKVVKGNQKRLESLRELAGKENLEYPSVTLPPQPHTKEGVDAYNEVIARVRMWVNLNLWQKLKLSRDDAKPLLRLKGFPSFPLVERQANEVDWWDMVCNVKKLINEKKEDGKVFWQNLAGYKRQEALRPYLSSEEDRKKGKKFARYQLGDLLLHLEKKHEGEDWGKVYDEAWERIDKKVEGLSKHIKLEEERRSEDAQSKAALTDWLRAKASFVIEGLKEADKDEFCRCELKLQKWYGDLRGKPFAIEAENSILDISGFSKQYNCAFIWQKDGVKKLNLYLIINYFKGGKLRFKKIKPEAFEANRFYTVINKKSGEIVPMEVNFNFDDPNLIILPLAFGKRQGREFIWNDLLSLETGSLKLANGRVIEKTLYNRRTRQDEPALFVALTFERREVLDSSNIKPMNLIGVDRGENIPAVIALTDPEGCPLSRFKDSLGNPTHILRIGESYKEKQRTIQAKKEVEQRRAGGYSRKYASKAKNLADDMVRNTARDLLYYAVTQDAMLIFENLSRGFGRQGKRTFMAERQYTRMEDWLTAKLAYEGLPSKTYLSKTLAQYTSKTCSNCGFTITSADYDRVLEKLKKTATGWMTTINGKELKVEGQITYYNRYKRQNVVKDLSVELDRLSEESVNNDISSWTKGRSGNEALSLLKKRFSHRPVQEKFVCLNCGFETHADEQAALNIARSWLFLRSQEYKKYQTNKTTGNTDKRAFVETWQSFYRKKLKEVWKPAV

SEQ ID NO: 44673 - protein, 980 aa, synthetic construct
  REGION 1..980: note = engineered CasX variant
QEIKRINKIRRRLVKDSNTKKAGKTGPMKTLLVRVMTPDLRERLENLRKKPENIPQPISNTSRANLNKLLTDYTEMKKAILHVYWEEFQKDPVGLMSRVAQPASKKIDQNKLKPEMDEKGNLTTAGFACSQCGQPLFVYKLEQVSEKGKAYTNYFGRCNVAEHEKLILLAQLKPEKDSDEAVTYSLGKFGQRALDFYSIHVTKESTHPVKPLAQIAGNRYASHPVGKALSDACMGTIASFLSKYQDIIIEHQKVVKGNQKRLESLRELAGKENLEYPSVTLPPQPHTKEGVDAYNEVIARVRMWVNLNLWQKLKLSRDDAKPLLRLKGFPSFPLVERQANEVDWWDMVCNVKKLINEKKEDGKVFWQNLAGYKRQEALRPYLSSEEDRKKGKKFARYQLGDLLLHLEKKHEGEDWGKVYDEAWERIDKKVEGLSKHIKLEEERRSEDAQSKAALTDWLRAKASFVIEGLKEADKDEFCRCELKLQKWYGDLRGKPFAIEAENSILDISGFSKQYNCAFIWQKDGVKKLNLYLIINYFKGGKLRFKKIKPEAFEANRFYTVINKKSGEIVPMEVNFNFDDPNLIILPLAFGKRQGREFIWNDLLSLETGSLKLANGRVIEKTLYNRRTRQDEPALFVALTFERREVLDSSNIKPMNLIGVDRGENIPAVIALTDPEGCPLSRFKDSLGNPTHILRIGESYKEKQRTIQAKKEVEQRRAGGYSRKYASKAKNLADDMVRNTARDLLYYAVTQDAMLIFENLSRGFGRQGKRTFMAERQYTRMEDWLTAKLAYEGLPSKTYLSKTLAQYTSKTCSNCGFTITSADYDRVLEKLKKTATGWMTTINGKELKVEGQITYYNRYKRQNVVKDLSVELDRLSEESVNNDISSWTKGRSGNEALSLLKKRFSHRPVQEKFVCLNCGFETHADEQAALNIARSWLFLRSQEYKKYQTNKTTGNTDKRAFVETWQSFYRKKLKEVWKPAV

SEQ ID NO: 44674 - protein, 980 aa, synthetic construct
  REGION 1..980: note = engineered CasX variant
QEIKRINKIRRRLVKDSNTKKAGKTGPMKTLLVRVMTPDLRERLENLRKKPENIPQPISNTSRANLNKLLTDYTEMKKAILHVYWEEFQKDPVGLMSRVAQPASKKIDQNKLKPEMDEKGNLTTAGFACSQCGQPLFVYKLEQVSEKGKAYTNYFGRCNVAEHEKLILLAQLKPEKDSDEAVTYSLGKFGQRALDFYSIHVTKESTHPVKPLAQIAGNRYASSPVGKALSDACMGTIASFLSKYQDIIIEHQKVVKGNQKRLESLRELAGKENLEYPSVTLPPQPHTKEGVDAYNEVIARVRMWVNLNLWQKLKLSRDDAKPLLRLKGFPSFPLVERQANEVDWWDMVCNVKKLINEKKEDGKVFWQNLAGYKRQEALRPYLSSEEDRKKGKKFARYQLGDLLLHLEKKHEGEDWGKVYDEAWERIDKKVEGLSKHIKLEEERRSEDAQSKAALTDWLRAKASFVIEGLKEADKDEFCRCELKLQKWYGDLRGKPFAIEAENSILDISGFSKQYNCAFIWQKDGVKKLNLYLIINYFKGGKLRFKKIKPEAFEANRFYTVINKKSGEIVPMEVNFNFDDPNLIILPLAFGKRQGREFIWNDLLSLETGSLKLANGRVIEKTLYNRRTRQDEPALFVALTFERREVLDSSNIKPMNLIGVDRGENIPAVIALTDPEGCPLSRFKDSLGNPTHILRIGESYKEKQRTIQAKKEVEQRRAGGYSRKYASKAKNLADDMVRNTARDLLYYAVTQDAMLIFENLSRGFGRQGKRTFMAERQYTRMEDWLTAKLAYEGLPSKTYLSKTLAQYTSKTCSNCGFTITSADYDRVLEKLKKTATGWMTTINGKELKVEGQITYYNRYKRQNVVKDLSVELDRLSEESVNNDISSWTKGRSGNEALSLLKKRFSHRPVQEKFVCLNCGFETHADEQAALNIARSWLFLRSQEYKKYQTNKTTGNTDKRAFVETWQSFYRKKLKEVWKPAV

SEQ ID NO: 44675 - protein, 980 aa, synthetic construct
  REGION 1..980: note = engineered CasX variant
QEIKRINKIRRRLVKDSNTKKAGKTGPMKTLLVRVMTPDLRERLENLRKKPENIPQPISNTSRANLNKLLTDYTEMKKAILHVYWEEFQKDPVGLMSRVAQPASKKIDQNKLKPEMDEKGNLTTAGFACSQCGQPLFVYKLEQVSEKGKAYTNYFGRCNVAEHEKLILLAQLKPEKDSDEAVTYSLGKFGQRALDFYSIHVTKESTHPVKPLAQIAGNRYASTPVGKALSDACMGTIASFLSKYQDIIIEHQKVVKGNQKRLESLRELAGKENLEYPSVTLPPQPHTKEGVDAYNEVIARVRMWVNLNLWQKLKLSRDDAKPLLRLKGFPSFPLVERQANEVDWWDMVCNVKKLINEKKEDGKVFWQNLAGYKRQEALRPYLSSEEDRKKGKKFARYQLGDLLLHLEKKHEGEDWGKVYDEAWERIDKKVEGLSKHIKLEEERRSEDAQSKAALTDWLRAKASFVIEGLKEADKDEFCRCELKLQKWYGDLRGKPFAIEAENSILDISGFSKQYNCAFIWQKDGVKKLNLYLIINYFKGGKLRFKKIKPEAFEANRFYTVINKKSGEIVPMEVNFNFDDPNLIILPLAFGKRQGREFIWNDLLSLETGSLKLANGRVIEKTLYNRRTRQDEPALFVALTFERREVLDSSNIKPMNLIGVDRGENIPAVIALTDPEGCPLSRFKDSLGNPTHILRIGESYKEKQRTIQAKKEVEQRRAGGYSRKYASKAKNLADDMVRNTARDLLYYAVTQDAMLIFENLSRGFGRQGKRTFMAERQYTRMEDWLTAKLAYEGLPSKTYLSKTLAQYTSKTCSNCGFTITSADYDRVLEKLKKTATGWMTTINGKELKVEGQITYYNRYKRQNVVKDLSVELDRLSEESVNNDISSWTKGRSGNEALSLLKKRFSHRPVQEKFVCLNCGFETHADEQAALNIARSWLFLRSQEYKKYQTNKTTGNTDKRAFVETWQSFYRKKLKEVWKPAV

SEQ ID NO: 44676 - protein, 980 aa, synthetic construct
  REGION 1..980: note = engineered CasX variant
QEIKRINKIRRRLVKDSNTKKAGKTGPMKTLLVRVMTPDLRERLENLRKKPENIPQPISNTSRANLNKLLTDYTEMKKAILHVYWEEFQKDPVGLMSRVAQPASKKIDQNKLKPEMDEKGNLTTAGFACSQCGQPLFVYKLEQVSEKGKAYTNYFGRCNVAEHEKLILLAQLKPEKDSDEAVTYSLGKFGQRALDFYSIHVTKESTHPVKPLAQIAGNRYASAPVGKALSDACMGTIASFLSKYQDIIIEHQKVVKGNQKRLESLRELAGKENLEYPSVTLPPQPHTKEGVDAYNEVIARVRMWVNLNLWQKLKLSRDDAKPLLRLKGFPSFPLVERQANEVDWWDMVCNVKKLINEKKEDGKVFWQNLAGYKRQEALRPYLSSEEDRKKGKKFARYQLGDLLLHLEKKHEGEDWGKVYDEAWERIDKKVEGLSKHIKLEEERRSEDAQSKAALTDWLRAKASFVIEGLKEADKDEFCRCELKLQKWYGDLRGKPFAIEAENSILDISGFSKQYNCAFIWQKDGVKKLNLYLIINYFKGGKLRFKKIKPEAFEANRFYTVINKKSGEIVPMEVNFNFDDPNLIILPLAFGKRQGREFIWNDLLSLETGSLKLANGRVIEKTLYNRRTRQDEPALFVALTFERREVLDSSNIKPMNLIGVDRGENIPAVIALTDPEGCPLSRFKDSLGNPTHILRIGESYKEKQRTIQAKKEVEQRRAGGYSRKYASKAKNLADDMVRNTARDLLYYAVTQDAMLIFENLSRGFGRQGKRTFMAERQYTRMEDWLTAKLAYEGLPSKTYLSKTLAQYTSKTCSNCGFTITSADYDRVLEKLKKTATGWMTTINGKELKVEGQITYYNRYKRQNVVKDLSVELDRLSEESVNNDISSWTKGRSGNEALSLLKKRFSHRPVQEKFVCLNCGFETHADEQAALNIARSWLFLRSQEYKKYQTNKTTGNTDKRAFVETWQSFYRKKLKEVWKPAV

SEQ ID NO: 44677 - protein, 980 aa, synthetic construct
  REGION 1..980: note = engineered CasX variant
QEIKRINKIRRRLVKDSNTKKAGKTGPMKTLLVRVMTPDLRERLENLRKKPENIPQPISNTSRANLNKLLTDYTEMKKAILHVYWEEFQKDPVGLMSRVAQPASKKIDQNKLKPEMDEKGNLTTAGFACSQCGQPLFVYKLEQVSEKGKAYTNYFGRCNVAEHEKLILLAQLKPEKDSDEAVTYSLGKFGQRALDFYSIHVTKESTHPVKPLAQIAGNRYASVPVGKALSDACMGTIASFLSKYQDIIIEHQKVVKGNQKRLESLRELAGKENLEYPSVTLPPQPHTKEGVDAYNEVIARVRMWVNLNLWQKLKLSRDDAKPLLRLKGFPSFPLVERQANEVDWWDMVCNVKKLINEKKEDGKVFWQNLAGYKRQEALRPYLSSEEDRKKGKKFARYQLGDLLLHLEKKHEGEDWGKVYDEAWERIDKKVEGLSKHIKLEEERRSEDAQSKAALTDWLRAKASFVIEGLKEADKDEFCRCELKLQKWYGDLRGKPFAIEAENSILDISGFSKQYNCAFIWQKDGVKKLNLYLIINYFKGGKLRFKKIKPEAFEANRFYTVINKKSGEIVPMEVNFNFDDPNLIILPLAFGKRQGREFIWNDLLSLETGSLKLANGRVIEKTLYNRRTRQDEPALFVALTFERREVLDSSNIKPMNLIGVDRGENIPAVIALTDPEGCPLSRFKDSLGNPTHILRIGESYKEKQRTIQAKKEVEQRRAGGYSRKYASKAKNLADDMVRNTARDLLYYAVTQDAMLIFENLSRGFGRQGKRTFMAERQYTRMEDWLTAKLAYEGLPSKTYLSKTLAQYTSKTCSNCGFTITSADYDRVLEKLKKTATGWMTTINGKELKVEGQITYYNRYKRQNVVKDLSVELDRLSEESVNNDISSWTKGRSGNEALSLLKKRFSHRPVQEKFVCLNCGFETHADEQAALNIARSWLFLRSQEYKKYQTNKTTGNTDKRAFVETWQSFYRKKLKEVWKPAV

SEQ ID NO: 44678 - protein, 980 aa, synthetic construct
  REGION 1..980: note = engineered CasX variant
QEIKRINKIRRRLVKDSNTKKAGKTGPMKTLLVRVMTPDLRERLENLRKKPENIPQPISNTSRANLNKLLTDYTEMKKAILHVYWEEFQKDPVGLMSRVAQPASKKIDQNKLKPEMDEKGNLTTAGFACSQCGQPLFVYKLEQVSEKGKAYTNYFGRCNVAEHEKLIKLAQLKPEKDSDEAVTYSLGKFGQRALDFYSIHVTKESTHPVKPLAQIAGNRYASGPVGKALSDACMGTIASFLSKYQDIIIEHQKVVKGNQKRLESLRELAGKENLEYPSVTLPPQPHTKEGVDAYNEVIARVRMWVNLNLWQKLKLSRDDAKPLLRLKGFPSFPLVERQANEVDWWDMVCNVKKLINEKKEDGKVFWQNLAGYKRQEALRPYLSSEEDRKKGKKFARYQLGDLLLHLEKKHEGEDWGKVYDEAWERIDKKVEGLSKHIKLEEERRSEDAQSKAALTDWLRAKASFVIEGLKEADKDEFCRCELKLQKWYGDLRGKPFAIEAENSILDISGFSKQYNCAFIWQKDGVKKLNLYLIINYFKGGKLRFKKIKPEAFEANRFYTVINKKSGEIVPMEVNFNFDDPNLIILPLAFGKRQGREFIWNDLLSLETGSLKLANGRVIEKTLYNRRTRQDEPALFVALTFERREVLDSSNIKPMNLIGVDRGENIPAVIALTDPEGCPLSRFKDSLGNPTHILRIGESYKEKQRTIQAKKEVEQRRAGGYSRKYASKAKNLADDMVRNTARDLLYYAVTQDAMLIFENLSRGFGRQGKRTFMAERQYTRMEDWLTAKLAYEGLPSKTYLSKTLAQYTSKTCSNCGFTITSADYDRVLEKLKKTATGWMTTINGKELKVEGQITYYNRYKRQNVVKDLSVELDRLSEESVNNDISSWTKGRSGNEALSLLKKRFSHRPVQEKFVCLNCGFETHADEQAALNIARSWLFLRSQEYKKYQTNKTTGNTDKRAFVETWQSFYRKKLKEVWKPAV

SEQ ID NO: 44679 - protein, 979 aa, synthetic construct
  REGION 1..979: note = engineered CasX variant
QEIKRINKIRRRLVKDSNTKKAGKTGPMKTLLVRVMTPDLRERLENLRKKPENIPQPISNTSRANLNKLLTDYTEMKKAILHVYWEEFQKDPVGLMSRVAQPASKKIDQNKLKPEMDEKGNLTTAGFACSQCGQPLFVYKLEQVSEKGKAYTNYFGRCNVAEHEKLILLAQLKPEKDSDEAVTYSLGKFGQRALDFYSIHVTKESTHPVKPLAQIAGNRYASPVGKALSDACMGTIASFLSKYQDIIIEHQKVVKGNQKRLESLRELAGKENLEYPSVTLPPQPHTKEGVDAYNEVIARVRMWVNLNLWQKLKLSRDDAKPLLRLKGFPSFPLVERQANEVDWWDMVCNVKKLINEKKEDGKVFWQNLAGYKRQEALRPYLSSEEDRKKGKKFARYQLGDLLLHLEKKHEGEDWGKVYDEAWERIDKKVEGLSKHIKLEEERRSEDAQSKAALTDWLRAKASFVIEGLKEADKDEFCRCELKLQKWYGDLRGKPFAIEAENSILDISGFSKQYNCAFIWQKDGVKKLNLYLIINYFKGGKLRFKKIKPEAFEANRFYTVINKKSGEIVPMEVNFNFDDPNLIILPLAFGKRQGREFIWNDLLSLETGSLKLANGRVIEKTLYNRRTRQDEPALFVALTFERREVLDSSNIKPMNLIGVDRGENIPAVIALTDPEGCPLSRFKDSLGNPTHILRIGESYKEKQRTIQAKKEVEQRRAGGYSRKYASKAKNLADDMVRNTARDLLYYAVTQDAMLIFENLSRGFGRQGKRTFMAERQYTRMEDWLTAKLAYEGLPSKTYLSKTLAQYTSKTCSNCGFTITSADYDRVLEKLKKTATGWMTTINGKELKVEGQITYYNRYKRQNVVKDLSVELDRLSEESVNNDISSWTKGRSGNEALSLLKKRFSHRPVQEKFVCLNCGFETHADEQAALNIARSWLFLRSQEYKKYQTNKTTGNTDKRAFVETWQSFYRKKLKEVWKPAV

SEQ ID NO: 44680 - protein, 979 aa, synthetic construct
  REGION 1..979: note = engineered CasX variant
QEIKRINKIRRRLVKDSNTKKAGKTGPMKTLLVRVMTPDLRERLENLRKKPENIPQPISNTSRANLNKLLTDYTEMKKAILHVYWEEFQKDPVGLMSRVAQPASKKIDQNKLKPEMDEKGNLTTAGFACSQCGQPLFVYKLEQVSEKGKAYTNYFGRCNVAEHEKLILLAQLKPEKDSDEAVTYSLGKFGQRALDFYSIHVTKESTHPVKPLAQIAGNRYASYPVGKALSDACMGTIASFLSKYQDIIIEHQKVVKGNQKRLESLRELAGKENLEYPSVTLPPQPHTKEGVDAYNEVIARVRMWVNLNLWQKLKLSRDDAKPLLRLKGFPSFPLVERQANEVDWWDMVCNVKKLINEKKEDGKVFWQNLAGYKRQEALRPYLSSEEDRQKGKKFARYQLGDLLLHLEKKHEGEDWGKVYDEAWERIDKKVEGLSKHIKLEEERRSEDAQSKAALTDWLRAKASFVIEGLKEADKDEFCRCELKLQKWYGDLRGKPFAIEAENSILDISGFSKQYNCAFIWQKDGVKKLNLYLIINYFKGGKLRFKKIKPEAFEANRFYTVINKKSGEIVPMEVNFNFDDPNLIILPLAFGKRQGREFIWNDLLSLETGSLKLANGRVIEKTLYNRRTRQDEPALFVALTFERREVLDSSNIKPMNLIGVDRGENIPAVIALTDPEGCPLSRFKDSLGNPTHILRIGESYKEKQRTIQAKKEVEQRRAGGYSRKYASKAKNLADDMVRNTARDLLYYAVTQDAMLIFENLSRGFGRQGKRTFMAERQYTRMEDWLTAKLAYEGLPSKTYLSKTLAQYTSKTCSNCGFTITSADYDRVLEKLKKTATGWMTTINGKELKVEGQITYYNRYKRQNVVKDLSVELDRLSEESVNNDISSWTKGRSGEALSLLKKRFSHRPVQEKFVCLNCGFETHADEQAALNIARSWLFLRSQEYKKYQTNKTTGNTDKRAFVETWQSFYRKKLKEVWKPAV

SEQ ID NO: 44681 - protein, 979 aa, synthetic construct
  REGION 1..979: note = engineered CasX variant
QEIKRINKIRRRLVKDSNTKKAGKTGPMKTLLVRVMTPDLRERLENLRKKPENIPQPISNTSRANLNKLLTDYTEMKKAILHVYWEEFQKDPVGLMSRVAQPASKKIDQNKLKPEMDEKGNLTTAGFACSQCGQPLFVYKLEQVSEKGKAYTNYFGRCNVAEHEKLILLAQLKPEKDSDEAVTYSLGKFGQRALDFYSIHVTKESTHPVKPLAQIAGNRYASHPVGKALSDACMGTIASFLSKYQDIIIEHQKVVKGNQKRLESLRELAGKENLEYPSVTLPPQPHTKEGVDAYNEVIARVRMWVNLNLWQKLKLSRDDAKPLLRLKGFPSFPLVERQANEVDWWDMVCNVKKLINEKKEDGKVFWQNLAGYKRQEALRPYLSSEEDRQKGKKFARYQLGDLLLHLEKKHEGEDWGKVYDEAWERIDKKVEGLSKHIKLEEERRSEDAQSKAALTDWLRAKASFVIEGLKEADKDEFCRCELKLQKWYGDLRGKPFAIEAENSILDISGFSKQYNCAFIWQKDGVKKLNLYLIINYFKGGKLRFKKIKPEAFEANRFYTVINKKSGEIVPMEVNFNFDDPNLIILPLAFGKRQGREFIWNDLLSLETGSLKLANGRVIEKTLYNRRTRQDEPALFVALTFERREVLDSSNIKPMNLIGVDRGENIPAVIALTDPEGCPLSRFKDSLGNPTHILRIGESYKEKQRTIQAKKEVEQRRAGGYSRKYASKAKNLADDMVRNTARDLLYYAVTQDAMLIFENLSRGFGRQGKRTFMAERQYTRMEDWLTAKLAYEGLPSKTYLSKTLAQYTSKTCSNCGFTITSADYDRVLEKLKKTATGWMTTINGKELKVEGQITYYNRYKRQNVVKDLSVELDRLSEESVNNDISSWTKGRSGEALSLLKKRFSHRPVQEKFVCLNCGFETHADEQAALNIARSWLFLRSQEYKKYQTNKTTGNTDKRAFVETWQSFYRKKLKEVWKPAV

SEQ ID NO: 44682 - protein, 979 aa, synthetic construct
  REGION 1..979: note = engineered CasX variant
QEIKRINKIRRRLVKDSNTKKAGKTGPMKTLLVRVMTPDLRERLENLRKKPENIPQPISNTSRANLNKLLTDYTEMKKAILHVYWEEFQKDPVGLMSRVAQPASKKIDQNKLKPEMDEKGNLTTAGFACSQCGQPLFVYKLEQVSEKGKAYTNYFGRCNVAEHEKLILLAQLKPEKDSDEAVTYSLGKFGQRALDFYSIHVTKESTHPVKPLAQIAGNRYASSPVGKALSDACMGTIASFLSKYQDIIIEHQKVVKGNQKRLESLRELAGKENLEYPSVTLPPQPHTKEGVDAYNEVIARVRMWVNLNLWQKLKLSRDDAKPLLRLKGFPSFPLVERQANEVDWWDMVCNVKKLINEKKEDGKVFWQNLAGYKRQEALRPYLSSEEDRQKGKKFARYQLGDLLLHLEKKHEGEDWGKVYDEAWERIDKKVEGLSKHIKLEEERRSEDAQSKAALTDWLRAKASFVIEGLKEADKDEFCRCELKLQKWYGDLRGKPFAIEAENSILDISGFSKQYNCAFIWQKDGVKKLNLYLIINYFKGGKLRFKKIKPEAFEANRFYTVINKKSGEIVPMEVNFNFDDPNLIILPLAFGKRQGREFIWNDLLSLETGSLKLANGRVIEKTLYNRRTRQDEPALFVALTFERREVLDSSNIKPMNLIGVDRGENIPAVIALTDPEGCPLSRFKDSLGNPTHILRIGESYKEKQRTIQAKKEVEQRRAGGYSRKYASKAKNLADDMVRNTARDLLYYAVTQDAMLIFENLSRGFGRQGKRTFMAERQYTRMEDWLTAKLAYEGLPSKTYLSKTLAQYTSKTCSNCGFTITSADYDRVLEKLKKTATGWMTTINGKELKVEGQITYYNRYKRQNVVKDLSVELDRLSEESVNNDISSWTKGRSGEALSLLKKRFSHRPVQEKFVCLNCGFETHADEQAALNIARSWLFLRSQEYKKYQTNKTTGNTDKRAFVETWQSFYRKKLKEVWKPAV

SEQ ID NO: 44683 - protein, 979 aa, synthetic construct
  REGION 1..979: note = engineered CasX variant
QEIKRINKIRRRLVKDSNTKKAGKTGPMKTLLVRVMTPDLRERLENLRKKPENIPQPISNTSRANLNKLLTDYTEMKKAILHVYWEEFQKDPVGLMSRVAQPASKKIDQNKLKPEMDEKGNLTTAGFACSQCGQPLFVYKLEQVSEKGKAYTNYFGRCNVAEHEKLILLAQLKPEKDSDEAVTYSLGKFGQRALDFYSIHVTKESTHPVKPLAQIAGNRYASTPVGKALSDACMGTIASFLSKYQDIIIEHQKVVKGNQKRLESLRELAGKENLEYPSVTLPPQPHTKEGVDAYNEVIARVRMWVNLNLWQKLKLSRDDAKPLLRLKGFPSFPLVERQANEVDWWDMVCNVKKLINEKKEDGKVFWQNLAGYKRQEALRPYLSSEEDRQKGKKFARYQLGDLLLHLEKKHEGEDWGKVYDEAWERIDKKVEGLSKHIKLEEERRSEDAQSKAALTDWLRAKASFVIEGLKEADKDEFCRCELKLQKWYGDLRGKPFAIEAENSILDISGFSKQYNCAFIWQKDGVKKLNLYLIINYFKGGKLRFKKIKPEAFEANRFYTVINKKSGEIVPMEVNFNFDDPNLIILPLAFGKRQGREFIWNDLLSLETGSLKLANGRVIEKTLYNRRTRQDEPALFVALTFERREVLDSSNIKPMNLIGVDRGENIPAVIALTDPEGCPLSRFKDSLGNPTHILRIGESYKEKQRTIQAKKEVEQRRAGGYSRKYASKAKNLADDMVRNTARDLLYYAVTQDAMLIFENLSRGFGRQGKRTFMAERQYTRMEDWLTAKLAYEGLPSKTYLSKTLAQYTSKTCSNCGFTITSADYDRVLEKLKKTATGWMTTINGKELKVEGQITYYNRYKRQNVVKDLSVELDRLSEESVNNDISSWTKGRSGEALSLLKKRFSHRPVQEKFVCLNCGFETHADEQAALNIARSWLFLRSQEYKKYQTNKTTGNTDKRAFVETWQSFYRKKLKEVWKPAV

SEQ ID NO: 44684 - protein, 979 aa, synthetic construct
  REGION 1..979: note = engineered CasX variant
QEIKRINKIRRRLVKDSNTKKAGKTGPMKTLLVRVMTPDLRERLENLRKKPENIPQPISNTSRANLNKLLTDYTEMKKAILHVYWEEFQKDPVGLMSRVAQPASKKIDQNKLKPEMDEKGNLTTAGFACSQCGQPLFVYKLEQVSEKGKAYTNYFGRCNVAEHEKLILLAQLKPEKDSDEAVTYSLGKFGQRALDFYSIHVTKESTHPVKPLAQIAGNRYASAPVGKALSDACMGTIASFLSKYQDIIIEHQKVVKGNQKRLESLRELAGKENLEYPSVTLPPQPHTKEGVDAYNEVIARVRMWVNLNLWQKLKLSRDDAKPLLRLKGFPSFPLVERQANEVDWWDMVCNVKKLINEKKEDGKVFWQNLAGYKRQEALRPYLSSEEDRQKGKKFARYQLGDLLLHLEKKHEGEDWGKVYDEAWERIDKKVEGLSKHIKLEEERRSEDAQSKAALTDWLRAKASFVIEGLKEADKDEFCRCELKLQKWYGDLRGKPFAIEAENSILDISGFSKQYNCAFIWQKDGVKKLNLYLIINYFKGGKLRFKKIKPEAFEANRFYTVINKKSGEIVPMEVNFNFDDPNLIILPLAFGKRQGREFIWNDLLSLETGSLKLANGRVIEKTLYNRRTRQDEPALFVALTFERREVLDSSNIKPMNLIGVDRGENIPAVIALTDPEGCPLSRFKDSLGNPTHILRIGESYKEKQRTIQAKKEVEQRRAGGYSRKYASKAKNLADDMVRNTARDLLYYAVTQDAMLIFENLSRGFGRQGKRTFMAERQYTRMEDWLTAKLAYEGLPSKTYLSKTLAQYTSKTCSNCGFTITSADYDRVLEKLKKTATGWMTTINGKELKVEGQITYYNRYKRQNVVKDLSVELDRLSEESVNNDISSWTKGRSGEALSLLKKRFSHRPVQEKFVCLNCGFETHADEQAALNIARSWLFLRSQEYKKYQTNKTTGNTDKRAFVETWQSFYRKKLKEVWKPAV

SEQ ID NO: 44685 - protein, 979 aa, synthetic construct
  REGION 1..979: note = engineered CasX variant
QEIKRINKIRRRLVKDSNTKKAGKTGPMKTLLVRVMTPDLRERLENLRKKPENIPQPISNTSRANLNKLLTDYTEMKKAILHVYWEEFQKDPVGLMSRVAQPASKKIDQNKLKPEMDEKGNLTTAGFACSQCGQPLFVYKLEQVSEKGKAYTNYFGRCNVAEHEKLILLAQLKPEKDSDEAVTYSLGKFGQRALDFYSIHVTKESTHPVKPLAQIAGNRYASVPVGKALSDACMGTIASFLSKYQDIIIEHQKVVKGNQKRLESLRELAGKENLEYPSVTLPPQPHTKEGVDAYNEVIARVRMWVNLNLWQKLKLSRDDAKPLLRLKGFPSFPLVERQANEVDWWDMVCNVKKLINEKKEDGKVFWQNLAGYKRQEALRPYLSSEEDRQKGKKFARYQLGDLLLHLEKKHEGEDWGKVYDEAWERIDKKVEGLSKHIKLEEERRSEDAQSKAALTDWLRAKASFVIEGLKEADKDEFCRCELKLQKWYGDLRGKPFAIEAENSILDISGFSKQYNCAFIWQKDGVKKLNLYLIINYFKGGKLRFKKIKPEAFEANRFYTVINKKSGEIVPMEVNFNFDDPNLIILPLAFGKRQGREFIWNDLLSLETGSLKLANGRVIEKTLYNRRTRQDEPALFVALTFERREVLDSSNIKPMNLIGVDRGENIPAVIALTDPEGCPLSRFKDSLGNPTHILRIGESYKEKQRTIQAKKEVEQRRAGGYSRKYASKAKNLADDMVRNTARDLLYYAVTQDAMLIFENLSRGFGRQGKRTFMAERQYTRMEDWLTAKLAYEGLPSKTYLSKTLAQYTSKTCSNCGFTITSADYDRVLEKLKKTATGWMTTINGKELKVEGQITYYNRYKRQNVVKDLSVELDRLSEESVNNDISSWTKGRSGEALSLLKKRFSHRPVQEKFVCLNCGFETHADEQAALNIARSWLFLRSQEYKKYQTNKTTGNTDKRAFVETWQSFYRKKLKEVWKPAV

SEQ ID NO: 44686 - protein, 979 aa, synthetic construct
  REGION 1..979: note = engineered CasX variant
QEIKRINKIRRRLVKDSNTKKAGKTGPMKTLLVRVMTPDLRERLENLRKKPENIPQPISNTSRANLNKLLTDYTEMKKAILHVYWEEFQKDPVGLMSRVAQPASKKIDQNKLKPEMDEKGNLTTAGFACSQCGQPLFVYKLEQVSEKGKAYTNYFGRCNVAEHEKLIKLAQLKPEKDSDEAVTYSLGKFGQRALDFYSIHVTKESTHPVKPLAQIAGNRYASGPVGKALSDACMGTIASFLSKYQDIIIEHQKVVKGNQKRLESLRELAGKENLEYPSVTLPPQPHTKEGVDAYNEVIARVRMWVNLNLWQKLKLSRDDAKPLLRLKGFPSFPLVERQANEVDWWDMVCNVKKLINEKKEDGKVFWQNLAGYKRQEALRPYLSSEEDRQKGKKFARYQLGDLLLHLEKKHEGEDWGKVYDEAWERIDKKVEGLSKHIKLEEERRSEDAQSKAALTDWLRAKASFVIEGLKEADKDEFCRCELKLQKWYGDLRGKPFAIEAENSILDISGFSKQYNCAFIWQKDGVKKLNLYLIINYFKGGKLRFKKIKPEAFEANRFYTVINKKSGEIVPMEVNFNFDDPNLIILPLAFGKRQGREFIWNDLLSLETGSLKLANGRVIEKTLYNRRTRQDEPALFVALTFERREVLDSSNIKPMNLIGVDRGENIPAVIALTDPEGCPLSRFKDSLGNPTHILRIGESYKEKQRTIQAKKEVEQRRAGGYSRKYASKAKNLADDMVRNTARDLLYYAVTQDAMLIFENLSRGFGRQGKRTFMAERQYTRMEDWLTAKLAYEGLPSKTYLSKTLAQYTSKTCSNCGFTITSADYDRVLEKLKKTATGWMTTINGKELKVEGQITYYNRYKRQNVVKDLSVELDRLSEESVNNDISSWTKGRSGEALSLLKKRFSHRPVQEKFVCLNCGFETHADEQAALNIARSWLFLRSQEYKKYQTNKTTGNTDKRAFVETWQSFYRKKLKEVWKPAV

SEQ ID NO: 44687 - protein, 978 aa, synthetic construct
  REGION 1..978: note = engineered CasX variant
QEIKRINKIRRRLVKDSNTKKAGKTGPMKTLLVRVMTPDLRERLENLRKKPENIPQPISNTSRANLNKLLTDYTEMKKAILHVYWEEFQKDPVGLMSRVAQPASKKIDQNKLKPEMDEKGNLTTAGFACSQCGQPLFVYKLEQVSEKGKAYTNYFGRCNVAEHEKLILLAQLKPEKDSDEAVTYSLGKFGQRALDFYSIHVTKESTHPVKPLAQIAGNRYASPVGKALSDACMGTIASFLSKYQDIIIEHQKVVKGNQKRLESLRELAGKENLEYPSVTLPPQPHTKEGVDAYNEVIARVRMWVNLNLWQKLKLSRDDAKPLLRLKGFPSFPLVERQANEVDWWDMVCNVKKLINEKKEDGKVFWQNLAGYKRQEALRPYLSSEEDRQKGKKFARYQLGDLLLHLEKKHEGEDWGKVYDEAWERIDKKVEGLSKHIKLEEERRSEDAQSKAALTDWLRAKASFVIEGLKEADKDEFCRCELKLQKWYGDLRGKPFAIEAENSILDISGFSKQYNCAFIWQKDGVKKLNLYLIINYFKGGKLRFKKIKPEAFEANRFYTVINKKSGEIVPMEVNFNFDDPNLIILPLAFGKRQGREFIWNDLLSLETGSLKLANGRVIEKTLYNRRTRQDEPALFVALTFERREVLDSSNIKPMNLIGVDRGENIPAVIALTDPEGCPLSRFKDSLGNPTHILRIGESYKEKQRTIQAKKEVEQRRAGGYSRKYASKAKNLADDMVRNTARDLLYYAVTQDAMLIFENLSRGFGRQGKRTFMAERQYTRMEDWLTAKLAYEGLPSKTYLSKTLAQYTSKTCSNCGFTITSADYDRVLEKLKKTATGWMTTINGKELKVEGQITYYNRYKRQNVVKDLSVELDRLSEESVNNDISSWTKGRSGEALSLLKKRFSHRPVQEKFVCLNCGFETHADEQAALNIARSWLFLRSQEYKKYQTNKTTGNTDKRAFVETWQSFYRKKLKEVWKPAV

SEQ ID NO: 44688 - protein, 979 aa, synthetic construct
  REGION 1..979: note = engineered CasX variant
QEIKRINKIRRRLVKDSNTKKAGKTGPMKTLLVRVMTPDLRERLENLRKKPENIPQPISNTSRANLNKLLTDYTEMKKAILHVYWEEFQKDPVGLMSRVAQPASKKIDQNKLKPEMDEKGNLTTAGFACSQCGQPLFVYKLEQVSEKGKAYTNYFGRCNVAEHEKLILLAQLKPEKDSDEAVTYSLGKFGQRALDFYSIHVTKESTHPVKPLAQIAGNRYASYPVGKALSDACMGTIASFLSKYQDIIIEHQKVVKGNQKRLESLRELAGKENLEYPSVTLPPQPHTKEGVDAYNEVIARVRMWVNLNLWQKLKLSRDDAKPLLRLKGFPSFPLVERQANEVDWWDMVCNVKKLINEKKEDGKVFWQNLAGYKRQEALRPYLSSEEDRKKGKKFARYQLGDLLLHLEKKHEGEDWGKVYDEAWERIDKKVEGLSKHIKLEEERRSEDAQSKAALTDWLRAKASFVIEGLKEADKDEFCRCELKLQKWYGDLRGKPFAIEAENSILDISGFSKQYNCAFIWQKDGVKKLNLYLIINYFKGGKLRFKKIKPEAFEANRFYTVINKKSGEIVPMEVNFNFDDPNLIILPLAFGKRQGREFIWNDLLSLETGSLKLANGRVIEKTLYNRRTRQDEPALFVALTFERREVLDSSNIKPMNLIGVDRGENIPAVIALTDPEGCPLSRFKDSLGNPTHILRIGESYKEKQRTIQAKKEVEQRRAGGYSRKYASKAKNLADDMVRNTARDLLYYAVTQDAMLIFENLSRGFGRQGKRTFMAERQYTRMEDWLTAKLAYEGLPSQTYLSKTLAQYTSKTCSNCGFTITSADYDRVLEKLKKTATGWMTTINGKELKVEGQITYYNRYKRQNVVKDLSVELDRLSEESVNNDISSWTKGRSGEALSLLKKRFSHRPVQEKFVCLNCGFETHADEQAALNIARSWLFLRSQEYKKYQTNKTTGNTDKRAFVETWQSFYRKKLKEVWKPAV

SEQ ID NO: 44689 - protein, 979 aa, synthetic construct
  REGION 1..979: note = engineered CasX variant
QEIKRINKIRRRLVKDSNTKKAGKTGPMKTLLVRVMTPDLRERLENLRKKPENIPQPISNTSRANLNKLLTDYTEMKKAILHVYWEEFQKDPVGLMSRVAQPASKKIDQNKLKPEMDEKGNLTTAGFACSQCGQPLFVYKLEQVSEKGKAYTNYFGRCNVAEHEKLILLAQLKPEKDSDEAVTYSLGKFGQRALDFYSIHVTKESTHPVKPLAQIAGNRYASHPVGKALSDACMGTIASFLSKYQDIIIEHQKVVKGNQKRLESLRELAGKENLEYPSVTLPPQPHTKEGVDAYNEVIARVRMWVNLNLWQKLKLSRDDAKPLLRLKGFPSFPLVERQANEVDWWDMVCNVKKLINEKKEDGKVFWQNLAGYKRQEALRPYLSSEEDRKKGKKFARYQLGDLLLHLEKKHEGEDWGKVYDEAWERIDKKVEGLSKHIKLEEERRSEDAQSKAALTDWLRAKASFVIEGLKEADKDEFCRCELKLQKWYGDLRGKPFAIEAENSILDISGFSKQYNCAFIWQKDGVKKLNLYLIINYFKGGKLRFKKIKPEAFEANRFYTVINKKSGEIVPMEVNFNFDDPNLIILPLAFGKRQGREFIWNDLLSLETGSLKLANGRVIEKTLYNRRTRQDEPALFVALTFERREVLDSSNIKPMNLIGVDRGENIPAVIALTDPEGCPLSRFKDSLGNPTHILRIGESYKEKQRTIQAKKEVEQRRAGGYSRKYASKAKNLADDMVRNTARDLLYYAVTQDAMLIFENLSRGFGRQGKRTFMAERQYTRMEDWLTAKLAYEGLPSQTYLSKTLAQYTSKTCSNCGFTITSADYDRVLEKLKKTATGWMTTINGKELKVEGQITYYNRYKRQNVVKDLSVELDRLSEESVNNDISSWTKGRSGEALSLLKKRFSHRPVQEKFVCLNCGFETHADEQAALNIARSWLFLRSQEYKKYQTNKTTGNTDKRAFVETWQSFYRKKLKEVWKPAV

SEQ ID NO: 44690 - protein, 979 aa, synthetic construct
  REGION 1..979: note = engineered CasX variant
QEIKRINKIRRRLVKDSNTKKAGKTGPMKTLLVRVMTPDLRERLENLRKKPENIPQPISNTSRANLNKLLTDYTEMKKAILHVYWEEFQKDPVGLMSRVAQPASKKIDQNKLKPEMDEKGNLTTAGFACSQCGQPLFVYKLEQVSEKGKAYTNYFGRCNVAEHEKLILLAQLKPEKDSDEAVTYSLGKFGQRALDFYSIHVTKESTHPVKPLAQIAGNRYASSPVGKALSDACMGTIASFLSKYQDIIIEHQKVVKGNQKRLESLRELAGKENLEYPSVTLPPQPHTKEGVDAYNEVIARVRMWVNLNLWQKLKLSRDDAKPLLRLKGFPSFPLVERQANEVDWWDMVCNVKKLINEKKEDGKVFWQNLAGYKRQEALRPYLSSEEDRKKGKKFARYQLGDLLLHLEKKHEGEDWGKVYDEAWERIDKKVEGLSKHIKLEEERRSEDAQSKAALTDWLRAKASFVIEGLKEADKDEFCRCELKLQKWYGDLRGKPFAIEAENSILDISGFSKQYNCAFIWQKDGVKKLNLYLIINYFKGGKLRFKKIKPEAFEANRFYTVINKKSGEIVPMEVNFNFDDPNLIILPLAFGKRQGREFIWNDLLSLETGSLKLANGRVIEKTLYNRRTRQDEPALFVALTFERREVLDSSNIKPMNLIGVDRGENIPAVIALTDPEGCPLSRFKDSLGNPTHILRIGESYKEKQRTIQAKKEVEQRRAGGYSRKYASKAKNLADDMVRNTARDLLYYAVTQDAMLIFENLSRGFGRQGKRTFMAERQYTRMEDWLTAKLAYEGLPSQTYLSKTLAQYTSKTCSNCGFTITSADYDRVLEKLKKTATGWMTTINGKELKVEGQITYYNRYKRQNVVKDLSVELDRLSEESVNNDISSWTKGRSGEALSLLKKRFSHRPVQEKFVCLNCGFETHADEQAALNIARSWLFLRSQEYKKYQTNKTTGNTDKRAFVETWQSFYRKKLKEVWKPAV

SEQ ID NO: 44691 - protein, 979 aa, synthetic construct
  REGION 1..979: note = engineered CasX variant
QEIKRINKIRRRLVKDSNTKKAGKTGPMKTLLVRVMTPDLRERLENLRKKPENIPQPISNTSRANLNKLLTDYTEMKKAILHVYWEEFQKDPVGLMSRVAQPASKKIDQNKLKPEMDEKGNLTTAGFACSQCGQPLFVYKLEQVSEKGKAYTNYFGRCNVAEHEKLILLAQLKPEKDSDEAVTYSLGKFGQRALDFYSIHVTKESTHPVKPLAQIAGNRYASTPVGKALSDACMGTIASFLSKYQDIIIEHQKVVKGNQKRLESLRELAGKENLEYPSVTLPPQPHTKEGVDAYNEVIARVRMWVNLNLWQKLKLSRDDAKPLLRLKGFPSFPLVERQANEVDWWDMVCNVKKLINEKKEDGKVFWQNLAGYKRQEALRPYLSSEEDRKKGKKFARYQLGDLLLHLEKKHEGEDWGKVYDEAWERIDKKVEGLSKHIKLEEERRSEDAQSKAALTDWLRAKASFVIEGLKEADKDEFCRCELKLQKWYGDLRGKPFAIEAENSILDISGFSKQYNCAFIWQKDGVKKLNLYLIINYFKGGKLRFKKIKPEAFEANRFYTVINKKSGEIVPMEVNFNFDDPNLIILPLAFGKRQGREFIWNDLLSLETGSLKLANGRVIEKTLYNRRTRQDEPALFVALTFERREVLDSSNIKPMNLIGVDRGENIPAVIALTDPEGCPLSRFKDSLGNPTHILRIGESYKEKQRTIQAKKEVEQRRAGGYSRKYASKAKNLADDMVRNTARDLLYYAVTQDAMLIFENLSRGFGRQGKRTFMAERQYTRMEDWLTAKLAYEGLPSQTYLSKTLAQYTSKTCSNCGFTITSADYDRVLEKLKKTATGWMTTINGKELKVEGQITYYNRYKRQNVVKDLSVELDRLSEESVNNDISSWTKGRSGEALSLLKKRFSHRPVQEKFVCLNCGFETHADEQAALNIARSWLFLRSQEYKKYQTNKTTGNTDKRAFVETWQSFYRKKLKEVWKPAV

SEQ ID NO: 44692 - protein, 979 aa, synthetic construct
  REGION 1..979: note = engineered CasX variant
QEIKRINKIRRRLVKDSNTKKAGKTGPMKTLLVRVMTPDLRERLENLRKKPENIPQPISNTSRANLNKLLTDYTEMKKAILHVYWEEFQKDPVGLMSRVAQPASKKIDQNKLKPEMDEKGNLTTAGFACSQCGQPLFVYKLEQVSEKGKAYTNYFGRCNVAEHEKLILLAQLKPEKDSDEAVTYSLGKFGQRALDFYSIHVTKESTHPVKPLAQIAGNRYASAPVGKALSDACMGTIASFLSKYQDIIIEHQKVVKGNQKRLESLRELAGKENLEYPSVTLPPQPHTKEGVDAYNEVIARVRMWVNLNLWQKLKLSRDDAKPLLRLKGFPSFPLVERQANEVDWWDMVCNVKKLINEKKEDGKVFWQNLAGYKRQEALRPYLSSEEDRKKGKKFARYQLGDLLLHLEKKHEGEDWGKVYDEAWERIDKKVEGLSKHIKLEEERRSEDAQSKAALTDWLRAKASFVIEGLKEADKDEFCRCELKLQKWYGDLRGKPFAIEAENSILDISGFSKQYNCAFIWQKDGVKKLNLYLIINYFKGGKLRFKKIKPEAFEANRFYTVINKKSGEIVPMEVNFNFDDPNLIILPLAFGKRQGREFIWNDLLSLETGSLKLANGRVIEKTLYNRRTRQDEPALFVALTFERREVLDSSNIKPMNLIGVDRGENIPAVIALTDPEGCPLSRFKDSLGNPTHILRIGESYKEKQRTIQAKKEVEQRRAGGYSRKYASKAKNLADDMVRNTARDLLYYAVTQDAMLIFENLSRGFGRQGKRTFMAERQYTRMEDWLTAKLAYEGLPSQTYLSKTLAQYTSKTCSNCGFTITSADYDRVLEKLKKTATGWMTTINGKELKVEGQITYYNRYKRQNVVKDLSVELDRLSEESVNNDISSWTKGRSGEALSLLKKRFSHRPVQEKFVCLNCGFETHADEQAALNIARSWLFLRSQEYKKYQTNKTTGNTDKRAFVETWQSFYRKKLKEVWKPAV

SEQ ID NO: 44693 - protein, 979 aa, synthetic construct
  REGION 1..979: note = engineered CasX variant
QEIKRINKIRRRLVKDSNTKKAGKTGPMKTLLVRVMTPDLRERLENLRKKPENIPQPISNTSRANLNKLLTDYTEMKKAILHVYWEEFQKDPVGLMSRVAQPASKKIDQNKLKPEMDEKGNLTTAGFACSQCGQPLFVYKLEQVSEKGKAYTNYFGRCNVAEHEKLILLAQLKPEKDSDEAVTYSLGKFGQRALDFYSIHVTKESTHPVKPLAQIAGNRYASVPVGKALSDACMGTIASFLSKYQDIIIEHQKVVKGNQKRLESLRELAGKENLEYPSVTLPPQPHTKEGVDAYNEVIARVRMWVNLNLWQKLKLSRDDAKPLLRLKGFPSFPLVERQANEVDWWDMVCNVKKLINEKKEDGKVFWQNLAGYKRQEALRPYLSSEEDRKKGKKFARYQLGDLLLHLEKKHEGEDWGKVYDEAWERIDKKVEGLSKHIKLEEERRSEDAQSKAALTDWLRAKASFVIEGLKEADKDEFCRCELKLQKWYGDLRGKPFAIEAENSILDISGFSKQYNCAFIWQKDGVKKLNLYLIINYFKGGKLRFKKIKPEAFEANRFYTVINKKSGEIVPMEVNFNFDDPNLIILPLAFGKRQGREFIWNDLLSLETGSLKLANGRVIEKTLYNRRTRQDEPALFVALTFERREVLDSSNIKPMNLIGVDRGENIPAVIALTDPEGCPLSRFKDSLGNPTHILRIGESYKEKQRTIQAKKEVEQRRAGGYSRKYASKAKNLADDMVRNTARDLLYYAVTQDAMLIFENLSRGFGRQGKRTFMAERQYTRMEDWLTAKLAYEGLPSQTYLSKTLAQYTSKTCSNCGFTITSADYDRVLEKLKKTATGWMTTINGKELKVEGQITYYNRYKRQNVVKDLSVELDRLSEESVNNDISSWTKGRSGEALSLLKKRFSHRPVQEKFVCLNCGFETHADEQAALNIARSWLFLRSQEYKKYQTNKTTGNTDKRAFVETWQSFYRKKLKEVWKPAV

SEQ ID NO: 44694 - protein, 979 aa, synthetic construct
  REGION 1..979: note = engineered CasX variant
QEIKRINKIRRRLVKDSNTKKAGKTGPMKTLLVRVMTPDLRERLENLRKKPENIPQPISNTSRANLNKLLTDYTEMKKAILHVYWEEFQKDPVGLMSRVAQPASKKIDQNKLKPEMDEKGNLTTAGFACSQCGQPLFVYKLEQVSEKGKAYTNYFGRCNVAEHEKLIKLAQLKPEKDSDEAVTYSLGKFGQRALDFYSIHVTKESTHPVKPLAQIAGNRYASGPVGKALSDACMGTIASFLSKYQDIIIEHQKVVKGNQKRLESLRELAGKENLEYPSVTLPPQPHTKEGVDAYNEVIARVRMWVNLNLWQKLKLSRDDAKPLLRLKGFPSFPLVERQANEVDWWDMVCNVKKLINEKKEDGKVFWQNLAGYKRQEALRPYLSSEEDRKKGKKFARYQLGDLLLHLEKKHEGEDWGKVYDEAWERIDKKVEGLSKHIKLEEERRSEDAQSKAALTDWLRAKASFVIEGLKEADKDEFCRCELKLQKWYGDLRGKPFAIEAENSILDISGFSKQYNCAFIWQKDGVKKLNLYLIINYFKGGKLRFKKIKPEAFEANRFYTVINKKSGEIVPMEVNFNFDDPNLIILPLAFGKRQGREFIWNDLLSLETGSLKLANGRVIEKTLYNRRTRQDEPALFVALTFERREVLDSSNIKPMNLIGVDRGENIPAVIALTDPEGCPLSRFKDSLGNPTHILRIGESYKEKQRTIQAKKEVEQRRAGGYSRKYASKAKNLADDMVRNTARDLLYYAVTQDAMLIFENLSRGFGRQGKRTFMAERQYTRMEDWLTAKLAYEGLPSQTYLSKTLAQYTSKTCSNCGFTITSADYDRVLEKLKKTATGWMTTINGKELKVEGQITYYNRYKRQNVVKDLSVELDRLSEESVNNDISSWTKGRSGEALSLLKKRFSHRPVQEKFVCLNCGFETHADEQAALNIARSWLFLRSQEYKKYQTNKTTGNTDKRAFVETWQSFYRKKLKEVWKPAV

SEQ ID NO: 44695 - protein, 978 aa, synthetic construct
  REGION 1..978: note = engineered CasX variant
QEIKRINKIRRRLVKDSNTKKAGKTGPMKTLLVRVMTPDLRERLENLRKKPENIPQPISNTSRANLNKLLTDYTEMKKAILHVYWEEFQKDPVGLMSRVAQPASKKIDQNKLKPEMDEKGNLTTAGFACSQCGQPLFVYKLEQVSEKGKAYTNYFGRCNVAEHEKLILLAQLKPEKDSDEAVTYSLGKFGQRALDFYSIHVTKESTHPVKPLAQIAGNRYASPVGKALSDACMGTIASFLSKYQDIIIEHQKVVKGNQKRLESLRELAGKENLEYPSVTLPPQPHTKEGVDAYNEVIARVRMWVNLNLWQKLKLSRDDAKPLLRLKGFPSFPLVERQANEVDWWDMVCNVKKLINEKKEDGKVFWQNLAGYKRQEALRPYLSSEEDRKKGKKFARYQLGDLLLHLEKKHEGEDWGKVYDEAWERIDKKVEGLSKHIKLEEERRSEDAQSKAALTDWLRAKASFVIEGLKEADKDEFCRCELKLQKWYGDLRGKPFAIEAENSILDISGFSKQYNCAFIWQKDGVKKLNLYLIINYFKGGKLRFKKIKPEAFEANRFYTVINKKSGEIVPMEVNFNFDDPNLIILPLAFGKRQGREFIWNDLLSLETGSLKLANGRVIEKTLYNRRTRQDEPALFVALTFERREVLDSSNIKPMNLIGVDRGENIPAVIALTDPEGCPLSRFKDSLGNPTHILRIGESYKEKQRTIQAKKEVEQRRAGGYSRKYASKAKNLADDMVRNTARDLLYYAVTQDAMLIFENLSRGFGRQGKRTFMAERQYTRMEDWLTAKLAYEGLPSQTYLSKTLAQYTSKTCSNCGFTITSADYDRVLEKLKKTATGWMTTINGKELKVEGQITYYNRYKRQNVVKDLSVELDRLSEESVNNDISSWTKGRSGEALSLLKKRFSHRPVQEKFVCLNCGFETHADEQAALNIARSWLFLRSQEYKKYQTNKTTGNTDKRAFVETWQSFYRKKLKEVWKPAV

SEQ ID NO: 44696 - protein, 979 aa, synthetic construct
  REGION 1..979: note = engineered CasX variant
QEIKRINKIRRRLVKDSNTKKAGKTGPMKTLLVRVMTPDLRERLENLRKKPENIPQPISNTSRANLNKLLTDYTEMKKAILHVYWEEFQKDPVGLMSRVAQPASKKIDQNKLKPEMDEKGNLTTAGFACSQCGQPLFVYKLEQVSEKGKAYTNYFGRCNVAEHEKLILLAQLKPEKDSDEAVTYSLGKFGQRALDFYSIHVTKESTHPVKPLAQIAGNRYASYPVGKALSDACMGTIASFLSKYQDIIIEHQKVVKGNQKRLESLRELAGKENLEYPSVTLPPQPHTKEGVDAYNEVIARVRMWVNLNLWQKLKLSRDDAKPLLRLKGFPSFPLVERQANEVDWWDMVCNVKKLINEKKEDGKVFWQNLAGYKRQEALRPYLSSEEDRKKGKKFARYQLGDLLLHLEKKHEGEDWGKVYDEAWERIDKKVEGLSKHIKLEEERRSEDAQSKAALTDWLRAKASFVIEGLKEADKDEFCRCELKLQKWYGDLRGKPFAIEAENSILDISGFSKQYNCAFIWQKDGVKKLNLYLIINYFKGGKLRFKKIKPEAFEANRFYTVINKKSGEIVPMEVNFNFDDPNLIILPLAFGKRQGREFIWNDLLSLETGSLKLANGRVIEKTLYNRRTRQDEPALFVALTFERREVLDSSNIKPMNLIGVDRGENIPAVIALTDPEGCPLSRFKDSLGNPTHILRIGESYKEKQRTIQAKKEVEQRRAGGYSRKYASKAKNLADDMVRNTARDLLYYAVTQDAMLIFENLSRGFGRQGKRTFMAERQYTRMEDWLTAKLAYNGLPSKTYLSKTLAQYTSKTCSNCGFTITSADYDRVLEKLKKTATGWMTTINGKELKVEGQITYYNRYKRQNVVKDLSVELDRLSEESVNNDISSWTKGRSGEALSLLKKRFSHRPVQEKFVCLNCGFETHADEQAALNIARSWLFLRSQEYKKYQTNKTTGNTDKRAFVETWQSFYRKKLKEVWKPAV

SEQ ID NO: 44697 - protein, 979 aa, synthetic construct
  REGION 1..979: note = engineered CasX variant
QEIKRINKIRRRLVKDSNTKKAGKTGPMKTLLVRVMTPDLRERLENLRKKPENIPQPISNTSRANLNKLLTDYTEMKKAILHVYWEEFQKDPVGLMSRVAQPASKKIDQNKLKPEMDEKGNLTTAGFACSQCGQPLFVYKLEQVSEKGKAYTNYFGRCNVAEHEKLILLAQLKPEKDSDEAVTYSLGKFGQRALDFYSIHVTKESTHPVKPLAQIAGNRYASHPVGKALSDACMGTIASFLSKYQDIIIEHQKVVKGNQKRLESLRELAGKENLEYPSVTLPPQPHTKEGVDAYNEVIARVRMWVNLNLWQKLKLSRDDAKPLLRLKGFPSFPLVERQANEVDWWDMVCNVKKLINEKKEDGKVFWQNLAGYKRQEALRPYLSSEEDRKKGKKFARYQLGDLLLHLEKKHEGEDWGKVYDEAWERIDKKVEGLSKHIKLEEERRSEDAQSKAALTDWLRAKASFVIEGLKEADKDEFCRCELKLQKWYGDLRGKPFAIEAENSILDISGFSKQYNCAFIWQKDGVKKLNLYLIINYFKGGKLRFKKIKPEAFEANRFYTVINKKSGEIVPMEVNFNFDDPNLIILPLAFGKRQGREFIWNDLLSLETGSLKLANGRVIEKTLYNRRTRQDEPALFVALTFERREVLDSSNIKPMNLIGVDRGENIPAVIALTDPEGCPLSRFKDSLGNPTHILRIGESYKEKQRTIQAKKEVEQRRAGGYSRKYASKAKNLADDMVRNTARDLLYYAVTQDAMLIFENLSRGFGRQGKRTFMAERQYTRMEDWLTAKLAYNGLPSKTYLSKTLAQYTSKTCSNCGFTITSADYDRVLEKLKKTATGWMTTINGKELKVEGQITYYNRYKRQNVVKDLSVELDRLSEESVNNDISSWTKGRSGEALSLLKKRFSHRPVQEKFVCLNCGFETHADEQAALNIARSWLFLRSQEYKKYQTNKTTGNTDKRAFVETWQSFYRKKLKEVWKPAV

SEQ ID NO: 44698 - protein, 979 aa, synthetic construct
  REGION 1..979: note = engineered CasX variant
QEIKRINKIRRRLVKDSNTKKAGKTGPMKTLLVRVMTPDLRERLENLRKKPENIPQPISNTSRANLNKLLTDYTEMKKAILHVYWEEFQKDPVGLMSRVAQPASKKIDQNKLKPEMDEKGNLTTAGFACSQCGQPLFVYKLEQVSEKGKAYTNYFGRCNVAEHEKLILLAQLKPEKDSDEAVTYSLGKFGQRALDFYSIHVTKESTHPVKPLAQIAGNRYASSPVGKALSDACMGTIASFLSKYQDIIIEHQKVVKGNQKRLESLRELAGKENLEYPSVTLPPQPHTKEGVDAYNEVIARVRMWVNLNLWQKLKLSRDDAKPLLRLKGFPSFPLVERQANEVDWWDMVCNVKKLINEKKEDGKVFWQNLAGYKRQEALRPYLSSEEDRKKGKKFARYQLGDLLLHLEKKHEGEDWGKVYDEAWERIDKKVEGLSKHIKLEEERRSEDAQSKAALTDWLRAKASFVIEGLKEADKDEFCRCELKLQKWYGDLRGKPFAIEAENSILDISGFSKQYNCAFIWQKDGVKKLNLYLIINYFKGGKLRFKKIKPEAFEANRFYTVINKKSGEIVPMEVNFNFDDPNLIILPLAFGKRQGREFIWNDLLSLETGSLKLANGRVIEKTLYNRRTRQDEPALFVALTFERREVLDSSNIKPMNLIGVDRGENIPAVIALTDPEGCPLSRFKDSLGNPTHILRIGESYKEKQRTIQAKKEVEQRRAGGYSRKYASKAKNLADDMVRNTARDLLYYAVTQDAMLIFENLSRGFGRQGKRTFMAERQYTRMEDWLTAKLAYNGLPSKTYLSKTLAQYTSKTCSNCGFTITSADYDRVLEKLKKTATGWMTTINGKELKVEGQITYYNRYKRQNVVKDLSVELDRLSEESVNNDISSWTKGRSGEALSLLKKRFSHRPVQEKFVCLNCGFETHADEQAALNIARSWLFLRSQEYKKYQTNKTTGNTDKRAFVETWQSFYRKKLKEVWKPAV

SEQ ID NO: 44699 - protein, 979 aa, synthetic construct
  REGION 1..979: note = engineered CasX variant
QEIKRINKIRRRLVKDSNTKKAGKTGPMKTLLVRVMTPDLRERLENLRKKPENIPQPISNTSRANLNKLLTDYTEMKKAILHVYWEEFQKDPVGLMSRVAQPASKKIDQNKLKPEMDEKGNLTTAGFACSQCGQPLFVYKLEQVSEKGKAYTNYFGRCNVAEHEKLILLAQLKPEKDSDEAVTYSLGKFGQRALDFYSIHVTKESTHPVKPLAQIAGNRYASTPVGKALSDACMGTIASFLSKYQDIIIEHQKVVKGNQKRLESLRELAGKENLEYPSVTLPPQPHTKEGVDAYNEVIARVRMWVNLNLWQKLKLSRDDAKPLLRLKGFPSFPLVERQANEVDWWDMVCNVKKLINEKKEDGKVFWQNLAGYKRQEALRPYLSSEEDRKKGKKFARYQLGDLLLHLEKKHEGEDWGKVYDEAWERIDKKVEGLSKHIKLEEERRSEDAQSKAALTDWLRAKASFVIEGLKEADKDEFCRCELKLQKWYGDLRGKPFAIEAENSILDISGFSKQYNCAFIWQKDGVKKLNLYLIINYFKGGKLRFKKIKPEAFEANRFYTVINKKSGEIVPMEVNFNFDDPNLIILPLAFGKRQGREFIWNDLLSLETGSLKLANGRVIEKTLYNRRTRQDEPALFVALTFERREVLDSSNIKPMNLIGVDRGENIPAVIALTDPEGCPLSRFKDSLGNPTHILRIGESYKEKQRTIQAKKEVEQRRAGGYSRKYASKAKNLADDMVRNTARDLLYYAVTQDAMLIFENLSRGFGRQGKRTFMAERQYTRMEDWLTAKLAYNGLPSKTYLSKTLAQYTSKTCSNCGFTITSADYDRVLEKLKKTATGWMTTINGKELKVEGQITYYNRYKRQNVVKDLSVELDRLSEESVNNDISSWTKGRSGEALSLLKKRFSHRPVQEKFVCLNCGFETHADEQAALNIARSWLFLRSQEYKKYQTNKTTGNTDKRAFVETWQSFYRKKLKEVWKPAV

SEQ ID NO: 44700 - protein, 979 aa, synthetic construct
  REGION 1..979: note = engineered CasX variant
QEIKRINKIRRRLVKDSNTKKAGKTGPMKTLLVRVMTPDLRERLENLRKKPENIPQPISNTSRANLNKLLTDYTEMKKAILHVYWEEFQKDPVGLMSRVAQPASKKIDQNKLKPEMDEKGNLTTAGFACSQCGQPLFVYKLEQVSEKGKAYTNYFGRCNVAEHEKLILLAQLKPEKDSDEAVTYSLGKFGQRALDFYSIHVTKESTHPVKPLAQIAGNRYASAPVGKALSDACMGTIASFLSKYQDIIIEHQKVVKGNQKRLESLRELAGKENLEYPSVTLPPQPHTKEGVDAYNEVIARVRMWVNLNLWQKLKLSRDDAKPLLRLKGFPSFPLVERQANEVDWWDMVCNVKKLINEKKEDGKVFWQNLAGYKRQEALRPYLSSEEDRKKGKKFARYQLGDLLLHLEKKHEGEDWGKVYDEAWERIDKKVEGLSKHIKLEEERRSEDAQSKAALTDWLRAKASFVIEGLKEADKDEFCRCELKLQKWYGDLRGKPFAIEAENSILDISGFSKQYNCAFIWQKDGVKKLNLYLIINYFKGGKLRFKKIKPEAFEANRFYTVINKKSGEIVPMEVNFNFDDPNLIILPLAFGKRQGREFIWNDLLSLETGSLKLANGRVIEKTLYNRRTRQDEPALFVALTFERREVLDSSNIKPMNLIGVDRGENIPAVIALTDPEGCPLSRFKDSLGNPTHILRIGESYKEKQRTIQAKKEVEQRRAGGYSRKYASKAKNLADDMVRNTARDLLYYAVTQDAMLIFENLSRGFGRQGKRTFMAERQYTRMEDWLTAKLAYNGLPSKTYLSKTLAQYTSKTCSNCGFTITSADYDRVLEKLKKTATGWMTTINGKELKVEGQITYYNRYKRQNVVKDLSVELDRLSEESVNNDISSWTKGRSGEALSLLKKRFSHRPVQEKFVCLNCGFETHADEQAALNIARSWLFLRSQEYKKYQTNKTTGNTDKRAFVETWQSFYRKKLKEVWKPAV

SEQ ID NO: 44701 - protein, 979 aa, synthetic construct
  REGION 1..979: note = engineered CasX variant
QEIKRINKIRRRLVKDSNTKKAGKTGPMKTLLVRVMTPDLRERLENLRKKPENIPQPISNTSRANLNKLLTDYTEMKKAILHVYWEEFQKDPVGLMSRVAQPASKKIDQNKLKPEMDEKGNLTTAGFACSQCGQPLFVYKLEQVSEKGKAYTNYFGRCNVAEHEKLILLAQLKPEKDSDEAVTYSLGKFGQRALDFYSIHVTKESTHPVKPLAQIAGNRYASVPVGKALSDACMGTIASFLSKYQDIIIEHQKVVKGNQKRLESLRELAGKENLEYPSVTLPPQPHTKEGVDAYNEVIARVRMWVNLNLWQKLKLSRDDAKPLLRLKGFPSFPLVERQANEVDWWDMVCNVKKLINEKKEDGKVFWQNLAGYKRQEALRPYLSSEEDRKKGKKFARYQLGDLLLHLEKKHEGEDWGKVYDEAWERIDKKVEGLSKHIKLEEERRSEDAQSKAALTDWLRAKASFVIEGLKEADKDEFCRCELKLQKWYGDLRGKPFAIEAENSILDISGFSKQYNCAFIWQKDGVKKLNLYLIINYFKGGKLRFKKIKPEAFEANRFYTVINKKSGEIVPMEVNFNFDDPNLIILPLAFGKRQGREFIWNDLLSLETGSLKLANGRVIEKTLYNRRTRQDEPALFVALTFERREVLDSSNIKPMNLIGVDRGENIPAVIALTDPEGCPLSRFKDSLGNPTHILRIGESYKEKQRTIQAKKEVEQRRAGGYSRKYASKAKNLADDMVRNTARDLLYYAVTQDAMLIFENLSRGFGRQGKRTFMAERQYTRMEDWLTAKLAYNGLPSKTYLSKTLAQYTSKTCSNCGFTITSADYDRVLEKLKKTATGWMTTINGKELKVEGQITYYNRYKRQNVVKDLSVELDRLSEESVNNDISSWTKGRSGEALSLLKKRFSHRPVQEKFVCLNCGFETHADEQAALNIARSWLFLRSQEYKKYQTNKTTGNTDKRAFVETWQSFYRKKLKEVWKPAV

SEQ ID NO: 44702 - protein, 979 aa, synthetic construct
  REGION 1..979: note = engineered CasX variant
QEIKRINKIRRRLVKDSNTKKAGKTGPMKTLLVRVMTPDLRERLENLRKKPENIPQPISNTSRANLNKLLTDYTEMKKAILHVYWEEFQKDPVGLMSRVAQPASKKIDQNKLKPEMDEKGNLTTAGFACSQCGQPLFVYKLEQVSEKGKAYTNYFGRCNVAEHEKLIKLAQLKPEKDSDEAVTYSLGKFGQRALDFYSIHVTKESTHPVKPLAQIAGNRYASGPVGKALSDACMGTIASFLSKYQDIIIEHQKVVKGNQKRLESLRELAGKENLEYPSVTLPPQPHTKEGVDAYNEVIARVRMWVNLNLWQKLKLSRDDAKPLLRLKGFPSFPLVERQANEVDWWDMVCNVKKLINEKKEDGKVFWQNLAGYKRQEALRPYLSSEEDRKKGKKFARYQLGDLLLHLEKKHEGEDWGKVYDEAWERIDKKVEGLSKHIKLEEERRSEDAQSKAALTDWLRAKASFVIEGLKEADKDEFCRCELKLQKWYGDLRGKPFAIEAENSILDISGFSKQYNCAFIWQKDGVKKLNLYLIINYFKGGKLRFKKIKPEAFEANRFYTVINKKSGEIVPMEVNFNFDDPNLIILPLAFGKRQGREFIWNDLLSLETGSLKLANGRVIEKTLYNRRTRQDEPALFVALTFERREVLDSSNIKPMNLIGVDRGENIPAVIALTDPEGCPLSRFKDSLGNPTHILRIGESYKEKQRTIQAKKEVEQRRAGGYSRKYASKAKNLADDMVRNTARDLLYYAVTQDAMLIFENLSRGFGRQGKRTFMAERQYTRMEDWLTAKLAYNGLPSKTYLSKTLAQYTSKTCSNCGFTITSADYDRVLEKLKKTATGWMTTINGKELKVEGQITYYNRYKRQNVVKDLSVELDRLSEESVNNDISSWTKGRSGEALSLLKKRFSHRPVQEKFVCLNCGFETHADEQAALNIARSWLFLRSQEYKKYQTNKTTGNTDKRAFVETWQSFYRKKLKEVWKPAV

SEQ ID NO: 44703 - protein, 978 aa, synthetic construct
  REGION 1..978: note = engineered CasX variant
QEIKRINKIRRRLVKDSNTKKAGKTGPMKTLLVRVMTPDLRERLENLRKKPENIPQPISNTSRANLNKLLTDYTEMKKAILHVYWEEFQKDPVGLMSRVAQPASKKIDQNKLKPEMDEKGNLTTAGFACSQCGQPLFVYKLEQVSEKGKAYTNYFGRCNVAEHEKLILLAQLKPEKDSDEAVTYSLGKFGQRALDFYSIHVTKESTHPVKPLAQIAGNRYASPVGKALSDACMGTIASFLSKYQDIIIEHQKVVKGNQKRLESLRELAGKENLEYPSVTLPPQPHTKEGVDAYNEVIARVRMWVNLNLWQKLKLSRDDAKPLLRLKGFPSFPLVERQANEVDWWDMVCNVKKLINEKKEDGKVFWQNLAGYKRQEALRPYLSSEEDRKKGKKFARYQLGDLLLHLEKKHEGEDWGKVYDEAWERIDKKVEGLSKHIKLEEERRSEDAQSKAALTDWLRAKASFVIEGLKEADKDEFCRCELKLQKWYGDLRGKPFAIEAENSILDISGFSKQYNCAFIWQKDGVKKLNLYLIINYFKGGKLRFKKIKPEAFEANRFYTVINKKSGEIVPMEVNFNFDDPNLIILPLAFGKRQGREFIWNDLLSLETGSLKLANGRVIEKTLYNRRTRQDEPALFVALTFERREVLDSSNIKPMNLIGVDRGENIPAVIALTDPEGCPLSRFKDSLGNPTHILRIGESYKEKQRTIQAKKEVEQRRAGGYSRKYASKAKNLADDMVRNTARDLLYYAVTQDAMLIFENLSRGFGRQGKRTFMAERQYTRMEDWLTAKLAYNGLPSKTYLSKTLAQYTSKTCSNCGFTITSADYDRVLEKLKKTATGWMTTINGKELKVEGQITYYNRYKRQNVVKDLSVELDRLSEESVNNDISSWTKGRSGEALSLLKKRFSHRPVQEKFVCLNCGFETHADEQAALNIARSWLFLRSQEYKKYQTNKTTGNTDKRAFVETWQSFYRKKLKEVWKPAV

SEQ ID NO: 44704 - protein, 979 aa, synthetic construct
  REGION 1..979: note = engineered CasX variant
QEIKRINKIRRRLVKDSNTKKAGKTGPMKTLLVRVMTPDLRERLENLRKKPENIPQPISNTSRANLNKLLTDYTEMKKAILHVYWEEFQKDPVGLMSRVAQPASKKIDQNKLKPEMDEKGNLTTAGFACSQCGQPLFVYKLEQVSEKGKAYTNYFGRCNVAEHEKLIQLAQLKPEKDSDEAVTYSLGKFGQRALDFYSIHVTKESTHPVKPLAQIAGNRYASYPVGKALSDACMGTIASFLSKYQDIIIEHQKVVKGNQKRLESLRELAGKENLEYPSVTLPPQPHTKEGVDAYNEVIARVRMWVNLNLWQKLKLSRDDAKPLLRLKGFPSFPLVERQANEVDWWDMVCNVKKLINEKKEDGKVFWQNLAGYKRQEALRPYLSSEEDRKKGKKFARYQLGDLLLHLEKKHEGEDWGKVYDEAWERIDKKVEGLSKHIKLEEERRSEDAQSKAALTDWLRAKASFVIEGLKEADKDEFCRCELKLQKWYGDLRGKPFAIEAENSILDISGFSKQYNCAFIWQKDGVKKLNLYLIINYFKGGKLRFKKIKPEAFEANRFYTVINKKSGEIVPMEVNFNFDDPNLIILPLAFGKRQGREFIWNDLLSLETGSLKLANGRVIEKTLYNRRTRQDEPALFVALTFERREVLDSSNIKPMNLIGVDRGENIPAVIALTDPEGCPLSRFKDSLGNPTHILRIGESYKEKQRTIQAKKEVEQRRAGGYSRKYASKAKNLADDMVRNTARDLLYYAVTQDAMLIFENLSRGFGRQGKRTFMAERQYTRMEDWLTAKLAYEGLPSKTYLSKTLAQYTSKTCSNCGFTITSADYDRVLEKLKKTATGWMTTINGKELKVEGQITYYNRYKRQNVVKDLSVELDRLSEESVNNDISSWTKGRSGEALSLLKKRFSHRPVQEKFVCLNCGFETHADEQAALNIARSWLFLRSQEYKKYQTNKTTGNTDKRAFVETWQSFYRKKLKEVWKPAV

SEQ ID NO: 44705 - protein, 979 aa, synthetic construct
  REGION 1..979: note = engineered CasX variant
QEIKRINKIRRRLVKDSNTKKAGKTGPMKTLLVRVMTPDLRERLENLRKKPENIPQPISNTSRANLNKLLTDYTEMKKAILHVYWEEFQKDPVGLMSRVAQPASKKIDQNKLKPEMDEKGNLTTAGFACSQCGQPLFVYKLEQVSEKGKAYTNYFGRCNVAEHEKLIQLAQLKPEKDSDEAVTYSLGKFGQRALDFYSIHVTKESTHPVKPLAQIAGNRYASHPVGKALSDACMGTIASFLSKYQDIIIEHQKVVKGNQKRLESLRELAGKENLEYPSVTLPPQPHTKEGVDAYNEVIARVRMWVNLNLWQKLKLSRDDAKPLLRLKGFPSFPLVERQANEVDWWDMVCNVKKLINEKKEDGKVFWQNLAGYKRQEALRPYLSSEEDRKKGKKFARYQLGDLLLHLEKKHEGEDWGKVYDEAWERIDKKVEGLSKHIKLEEERRSEDAQSKAALTDWLRAKASFVIEGLKEADKDEFCRCELKLQKWYGDLRGKPFAIEAENSILDISGFSKQYNCAFIWQKDGVKKLNLYLIINYFKGGKLRFKKIKPEAFEANRFYTVINKKSGEIVPMEVNFNFDDPNLIILPLAFGKRQGREFIWNDLLSLETGSLKLANGRVIEKTLYNRRTRQDEPALFVALTFERREVLDSSNIKPMNLIGVDRGENIPAVIALTDPEGCPLSRFKDSLGNPTHILRIGESYKEKQRTIQAKKEVEQRRAGGYSRKYASKAKNLADDMVRNTARDLLYYAVTQDAMLIFENLSRGFGRQGKRTFMAERQYTRMEDWLTAKLAYEGLPSKTYLSKTLAQYTSKTCSNCGFTITSADYDRVLEKLKKTATGWMTTINGKELKVEGQITYYNRYKRQNVVKDLSVELDRLSEESVNNDISSWTKGRSGEALSLLKKRFSHRPVQEKFVCLNCGFETHADEQAALNIARSWLFLRSQEYKKYQTNKTTGNTDKRAFVETWQSFYRKKLKEVWKPAV

SEQ ID NO: 44706 - protein, 979 aa, synthetic construct
  REGION 1..979: note = engineered CasX variant
QEIKRINKIRRRLVKDSNTKKAGKTGPMKTLLVRVMTPDLRERLENLRKKPENIPQPISNTSRANLNKLLTDYTEMKKAILHVYWEEFQKDPVGLMSRVAQPASKKIDQNKLKPEMDEKGNLTTAGFACSQCGQPLFVYKLEQVSEKGKAYTNYFGRCNVAEHEKLIQLAQLKPEKDSDEAVTYSLGKFGQRALDFYSIHVTKESTHPVKPLAQIAGNRYASSPVGKALSDACMGTIASFLSKYQDIIIEHQKVVKGNQKRLESLRELAGKENLEYPSVTLPPQPHTKEGVDAYNEVIARVRMWVNLNLWQKLKLSRDDAKPLLRLKGFPSFPLVERQANEVDWWDMVCNVKKLINEKKEDGKVFWQNLAGYKRQEALRPYLSSEEDRKKGKKFARYQLGDLLLHLEKKHEGEDWGKVYDEAWERIDKKVEGLSKHIKLEEERRSEDAQSKAALTDWLRAKASFVIEGLKEADKDEFCRCELKLQKWYGDLRGKPFAIEAENSILDISGFSKQYNCAFIWQKDGVKKLNLYLIINYFKGGKLRFKKIKPEAFEANRFYTVINKKSGEIVPMEVNFNFDDPNLIILPLAFGKRQGREFIWNDLLSLETGSLKLANGRVIEKTLYNRRTRQDEPALFVALTFERREVLDSSNIKPMNLIGVDRGENIPAVIALTDPEGCPLSRFKDSLGNPTHILRIGESYKEKQRTIQAKKEVEQRRAGGYSRKYASKAKNLADDMVRNTARDLLYYAVTQDAMLIFENLSRGFGRQGKRTFMAERQYTRMEDWLTAKLAYEGLPSKTYLSKTLAQYTSKTCSNCGFTITSADYDRVLEKLKKTATGWMTTINGKELKVEGQITYYNRYKRQNVVKDLSVELDRLSEESVNNDISSWTKGRSGEALSLLKKRFSHRPVQEKFVCLNCGFETHADEQAALNIARSWLFLRSQEYKKYQTNKTTGNTDKRAFVETWQSFYRKKLKEVWKPAV

SEQ ID NO: 44707 - protein, 979 aa, synthetic construct
  REGION 1..979: note = engineered CasX variant
QEIKRINKIRRRLVKDSNTKKAGKTGPMKTLLVRVMTPDLRERLENLRKKPENIPQPISNTSRANLNKLLTDYTEMKKAILHVYWEEFQKDPVGLMSRVAQPASKKIDQNKLKPEMDEKGNLTTAGFACSQCGQPLFVYKLEQVSEKGKAYTNYFGRCNVAEHEKLIQLAQLKPEKDSDEAVTYSLGKFGQRALDFYSIHVTKESTHPVKPLAQIAGNRYASTPVGKALSDACMGTIASFLSKYQDIIIEHQKVVKGNQKRLESLRELAGKENLEYPSVTLPPQPHTKEGVDAYNEVIARVRMWVNLNLWQKLKLSRDDAKPLLRLKGFPSFPLVERQANEVDWWDMVCNVKKLINEKKEDGKVFWQNLAGYKRQEALRPYLSSEEDRKKGKKFARYQLGDLLLHLEKKHEGEDWGKVYDEAWERIDKKVEGLSKHIKLEEERRSEDAQSKAALTDWLRAKASFVIEGLKEADKDEFCRCELKLQKWYGDLRGKPFAIEAENSILDISGFSKQYNCAFIWQKDGVKKLNLYLIINYFKGGKLRFKKIKPEAFEANRFYTVINKKSGEIVPMEVNFNFDDPNLIILPLAFGKRQGREFIWNDLLSLETGSLKLANGRVIEKTLYNRRTRQDEPALFVALTFERREVLDSSNIKPMNLIGVDRGENIPAVIALTDPEGCPLSRFKDSLGNPTHILRIGESYKEKQRTIQAKKEVEQRRAGGYSRKYASKAKNLADDMVRNTARDLLYYAVTQDAMLIFENLSRGFGRQGKRTFMAERQYTRMEDWLTAKLAYEGLPSKTYLSKTLAQYTSKTCSNCGFTITSADYDRVLEKLKKTATGWMTTINGKELKVEGQITYYNRYKRQNVVKDLSVELDRLSEESVNNDISSWTKGRSGEALSLLKKRFSHRPVQEKFVCLNCGFETHADEQAALNIARSWLFLRSQEYKKYQTNKTTGNTDKRAFVETWQSFYRKKLKEVWKPAV

SEQ ID NO: 44708 - protein, 979 aa, synthetic construct
  REGION 1..979: note = engineered CasX variant
QEIKRINKIRRRLVKDSNTKKAGKTGPMKTLLVRVMTPDLRERLENLRKKPENIPQPISNTSRANLNKLLTDYTEMKKAILHVYWEEFQKDPVGLMSRVAQPASKKIDQNKLKPEMDEKGNLTTAGFACSQCGQPLFVYKLEQVSEKGKAYTNYFGRCNVAEHEKLIQLAQLKPEKDSDEAVTYSLGKFGQRALDFYSIHVTKESTHPVKPLAQIAGNRYASAPVGKALSDACMGTIASFLSKYQDIIIEHQKVVKGNQKRLESLRELAGKENLEYPSVTLPPQPHTKEGVDAYNEVIARVRMWVNLNLWQKLKLSRDDAKPLLRLKGFPSFPLVERQANEVDWWDMVCNVKKLINEKKEDGKVFWQNLAGYKRQEALRPYLSSEEDRKKGKKFARYQLGDLLLHLEKKHEGEDWGKVYDEAWERIDKKVEGLSKHIKLEEERRSEDAQSKAALTDWLRAKASFVIEGLKEADKDEFCRCELKLQKWYGDLRGKPFAIEAENSILDISGFSKQYNCAFIWQKDGVKKLNLYLIINYFKGGKLRFKKIKPEAFEANRFYTVINKKSGEIVPMEVNFNFDDPNLIILPLAFGKRQGREFIWNDLLSLETGSLKLANGRVIEKTLYNRRTRQDEPALFVALTFERREVLDSSNIKPMNLIGVDRGENIPAVIALTDPEGCPLSRFKDSLGNPTHILRIGESYKEKQRTIQAKKEVEQRRAGGYSRKYASKAKNLADDMVRNTARDLLYYAVTQDAMLIFENLSRGFGRQGKRTFMAERQYTRMEDWLTAKLAYEGLPSKTYLSKTLAQYTSKTCSNCGFTITSADYDRVLEKLKKTATGWMTTINGKELKVEGQITYYNRYKRQNVVKDLSVELDRLSEESVNNDISSWTKGRSGEALSLLKKRFSHRPVQEKFVCLNCGFETHADEQAALNIARSWLFLRSQEYKKYQTNKTTGNTDKRAFVETWQSFYRKKLKEVWKPAV

SEQ ID NO: 44709 - protein, 979 aa, synthetic construct
  REGION 1..979: note = engineered CasX variant
QEIKRINKIRRRLVKDSNTKKAGKTGPMKTLLVRVMTPDLRERLENLRKKPENIPQPISNTSRANLNKLLTDYTEMKKAILHVYWEEFQKDPVGLMSRVAQPASKKIDQNKLKPEMDEKGNLTTAGFACSQCGQPLFVYKLEQVSEKGKAYTNYFGRCNVAEHEKLIQLAQLKPEKDSDEAVTYSLGKFGQRALDFYSIHVTKESTHPVKPLAQIAGNRYASVPVGKALSDACMGTIASFLSKYQDIIIEHQKVVKGNQKRLESLRELAGKENLEYPSVTLPPQPHTKEGVDAYNEVIARVRMWVNLNLWQKLKLSRDDAKPLLRLKGFPSFPLVERQANEVDWWDMVCNVKKLINEKKEDGKVFWQNLAGYKRQEALRPYLSSEEDRKKGKKFARYQLGDLLLHLEKKHEGEDWGKVYDEAWERIDKKVEGLSKHIKLEEERRSEDAQSKAALTDWLRAKASFVIEGLKEADKDEFCRCELKLQKWYGDLRGKPFAIEAENSILDISGFSKQYNCAFIWQKDGVKKLNLYLIINYFKGGKLRFKKIKPEAFEANRFYTVINKKSGEIVPMEVNFNFDDPNLIILPLAFGKRQGREFIWNDLLSLETGSLKLANGRVIEKTLYNRRTRQDEPALFVALTFERREVLDSSNIKPMNLIGVDRGENIPAVIALTDPEGCPLSRFKDSLGNPTHILRIGESYKEKQRTIQAKKEVEQRRAGGYSRKYASKAKNLADDMVRNTARDLLYYAVTQDAMLIFENLSRGFGRQGKRTFMAERQYTRMEDWLTAKLAYEGLPSKTYLSKTLAQYTSKTCSNCGFTITSADYDRVLEKLKKTATGWMTTINGKELKVEGQITYYNRYKRQNVVKDLSVELDRLSEESVNNDISSWTKGRSGEALSLLKKRFSHRPVQEKFVCLNCGFETHADEQAALNIARSWLFLRSQEYKKYQTNKTTGNTDKRAFVETWQSFYRKKLKEVWKPAV

SEQ ID NO: 44710 - protein, 980 aa, synthetic construct
  REGION 1..980: note = engineered CasX variant
QEIKRINKIRRRLVKDSNTKKAGKTGPMKTLLVRVMTPDLRERLENLRKKPENIPQPISNTSRANLNKLLTDYTEMKKAILHVYWEEFQKDPVGLMSRVAQPASKKIDQNKLKPEMDEKGNLTTAGFACSQCGQPLFVYKLEQVSEKGKAYTNYFGRCNVAEHEKLIQKLAQLKPEKDSDEAVTYSLGKFGQRALDFYSIHVTKESTHPVKPLAQIAGNRYASGPVGKALSDACMGTIASFLSKYQDIIIEHQKVVKGNQKRLESLRELAGKENLEYPSVTLPPQPHTKEGVDAYNEVIARVRMWVNLNLWQKLKLSRDDAKPLLRLKGFPSFPLVERQANEVDWWDMVCNVKKLINEKKEDGKVFWQNLAGYKRQEALRPYLSSEEDRKKGKKFARYQLGDLLLHLEKKHEGEDWGKVYDEAWERIDKKVEGLSKHIKLEEERRSEDAQSKAALTDWLRAKASFVIEGLKEADKDEFCRCELKLQKWYGDLRGKPFAIEAENSILDISGFSKQYNCAFIWQKDGVKKLNLYLIINYFKGGKLRFKKIKPEAFEANRFYTVINKKSGEIVPMEVNFNFDDPNLIILPLAFGKRQGREFIWNDLLSLETGSLKLANGRVIEKTLYNRRTRQDEPALFVALTFERREVLDSSNIKPMNLIGVDRGENIPAVIALTDPEGCPLSRFKDSLGNPTHILRIGESYKEKQRTIQAKKEVEQRRAGGYSRKYASKAKNLADDMVRNTARDLLYYAVTQDAMLIFENLSRGFGRQGKRTFMAERQYTRMEDWLTAKLAYEGLPSKTYLSKTLAQYTSKTCSNCGFTITSADYDRVLEKLKKTATGWMTTINGKELKVEGQITYYNRYKRQNVVKDLSVELDRLSEESVNNDISSWTKGRSGEALSLLKKRFSHRPVQEKFVCLNCGFETHADEQAALNIARSWLFLRSQEYKKYQTNKTTGNTDKRAFVETWQSFYRKKLKEVWKPAV

SEQ ID NO: 44711 - protein, 978 aa, synthetic construct
  REGION 1..978: note = engineered CasX variant
QEIKRINKIRRRLVKDSNTKKAGKTGPMKTLLVRVMTPDLRERLENLRKKPENIPQPISNTSRANLNKLLTDYTEMKKAILHVYWEEFQKDPVGLMSRVAQPASKKIDQNKLKPEMDEKGNLTTAGFACSQCGQPLFVYKLEQVSEKGKAYTNYFGRCNVAEHEKLIQLAQLKPEKDSDEAVTYSLGKFGQRALDFYSIHVTKESTHPVKPLAQIAGNRYASPVGKALSDACMGTIASFLSKYQDIIIEHQKVVKGNQKRLESLRELAGKENLEYPSVTLPPQPHTKEGVDAYNEVIARVRMWVNLNLWQKLKLSRDDAKPLLRLKGFPSFPLVERQANEVDWWDMVCNVKKLINEKKEDGKVFWQNLAGYKRQEALRPYLSSEEDRKKGKKFARYQLGDLLLHLEKKHEGEDWGKVYDEAWERIDKKVEGLSKHIKLEEERRSEDAQSKAALTDWLRAKASFVIEGLKEADKDEFCRCELKLQKWYGDLRGKPFAIEAENSILDISGFSKQYNCAFIWQKDGVKKLNLYLIINYFKGGKLRFKKIKPEAFEANRFYTVINKKSGEIVPMEVNFNFDDPNLIILPLAFGKRQGREFIWNDLLSLETGSLKLANGRVIEKTLYNRRTRQDEPALFVALTFERREVLDSSNIKPMNLIGVDRGENIPAVIALTDPEGCPLSRFKDSLGNPTHILRIGESYKEKQRTIQAKKEVEQRRAGGYSRKYASKAKNLADDMVRNTARDLLYYAVTQDAMLIFENLSRGFGRQGKRTFMAERQYTRMEDWLTAKLAYEGLPSKTYLSKTLAQYTSKTCSNCGFTITSADYDRVLEKLKKTATGWMTTINGKELKVEGQITYYNRYKRQNVVKDLSVELDRLSEESVNNDISSWTKGRSGEALSLLKKRFSHRPVQEKFVCLNCGFETHADEQAALNIARSWLFLRSQEYKKYQTNKTTGNTDKRAFVETWQSFYRKKLKEVWKPAV

SEQ ID NO: 44712 - protein, 979 aa, synthetic construct
  REGION 1..979: note = engineered CasX variant
QEIKRINKIRRRLVKDSNTKKAGKTGPMKTLLVRVMTPDLRERLENLRKKPENIPQPISNTSRANLNKLLTDYTEMKKAILHVYWEEFQKDPVGLMSRVAQPASKKIDQNKLKPEMDEKGNLTTAGFACSQCGQPLFVYKLEQVSEKGKAYTNYFGRCNVAEHEKLILLAQLKPEKDSDEAVTYSLGKFGQRALDFYSIHVTKESTHPVKPLAQIAGNRYASYPVGKALSDACMGTIASFLSKYQDIIIEHQKVVKGNQKRLESLRELAGKENLEYPSVTLPPQPHTKEGVDAYNEVIARVRMWVNLNLWQKLKLSRDDAKPLLRLKGFPSFPLVERQANEVDWWDMVCNVKKLINEKKEDGKVFWQNLAIYKRQEALRPYLSSEEDRKKGKKFARYQLGDLLLHLEKKHEGEDWGKVYDEAWERIDKKVEGLSKHIKLEEERRSEDAQSKAALTDWLRAKASFVIEGLKEADKDEFCRCELKLQKWYGDLRGKPFAIEAENSILDISGFSKQYNCAFIWQKDGVKKLNLYLIINYFKGGKLRFKKIKPEAFEANRFYTVINKKSGEIVPMEVNFNFDDPNLIILPLAFGKRQGREFIWNDLLSLETGSLKLANGRVIEKTLYNRRTRQDEPALFVALTFERREVLDSSNIKPMNLIGVDRGENIPAVIALTDPEGCPLSRFKDSLGNPTHILRIGESYKEKQRTIQAKKEVEQRRAGGYSRKYASKAKNLADDMVRNTARDLLYYAVTQDAMLIFENLSRGFGRQGKRTFMAERQYTRMEDWLTAKLAYEGLPSKTYLSKTLAQYTSKTCSNCGFTITSADYDRVLEKLKKTATGWMTTINGKELKVEGQITYYNRYKRQNVVKDLSVELDRLSEESVNNDISSWTKGRSGEALSLLKKRFSHRPVQEKFVCLNCGFETHADEQAALNIARSWLFLRSQEYKKYQTNKTTGNTDKRAFVETWQSFYRKKLKEVWKPAV

SEQ ID NO: 44713 - protein, 979 aa, synthetic construct
  REGION 1..979: note = engineered CasX variant
QEIKRINKIRRRLVKDSNTKKAGKTGPMKTLLVRVMTPDLRERLENLRKKPENIPQPISNTSRANLNKLLTDYTEMKKAILHVYWEEFQKDPVGLMSRVAQPASKKIDQNKLKPEMDEKGNLTTAGFACSQCGQPLFVYKLEQVSEKGKAYTNYFGRCNVAEHEKLILLAQLKPEKDSDEAVTYSLGKFGQRALDFYSIHVTKESTHPVKPLAQIAGNRYASHPVGKALSDACMGTIASFLSKYQDIIIEHQKVVKGNQKRLESLRELAGKENLEYPSVTLPPQPHTKEGVDAYNEVIARVRMWVNLNLWQKLKLSRDDAKPLLRLKGFPSFPLVERQANEVDWWDMVCNVKKLINEKKEDGKVFWQNLAIYKRQEALRPYLSSEEDRKKGKKFARYQLGDLLLHLEKKHEGEDWGKVYDEAWERIDKKVEGLSKHIKLEEERRSEDAQSKAALTDWLRAKASFVIEGLKEADKDEFCRCELKLQKWYGDLRGKPFAIEAENSILDISGFSKQYNCAFIWQKDGVKKLNLYLIINYFKGGKLRFKKIKPEAFEANRFYTVINKKSGEIVPMEVNFNFDDPNLIILPLAFGKRQGREFIWNDLLSLETGSLKLANGRVIEKTLYNRRTRQDEPALFVALTFERREVLDSSNIKPMNLIGVDRGENIPAVIALTDPEGCPLSRFKDSLGNPTHILRIGESYKEKQRTIQAKKEVEQRRAGGYSRKYASKAKNLADDMVRNTARDLLYYAVTQDAMLIFENLSRGFGRQGKRTFMAERQYTRMEDWLTAKLAYEGLPSKTYLSKTLAQYTSKTCSNCGFTITSADYDRVLEKLKKTATGWMTTINGKELKVEGQITYYNRYKRQNVVKDLSVELDRLSEESVNNDISSWTKGRSGEALSLLKKRFSHRPVQEKFVCLNCGFETHADEQAALNIARSWLFLRSQEYKKYQTNKTTGNTDKRAFVETWQSFYRKKLKEVWKPAV

SEQ ID NO: 44714 - protein, 979 aa, synthetic construct
  REGION 1..979: note = engineered CasX variant
QEIKRINKIRRRLVKDSNTKKAGKTGPMKTLLVRVMTPDLRERLENLRKKPENIPQPISNTSRANLNKLLTDYTEMKKAILHVYWEEFQKDPVGLMSRVAQPASKKIDQNKLKPEMDEKGNLTTAGFACSQCGQPLFVYKLEQVSEKGKAYTNYFGRCNVAEHEKLILLAQLKPEKDSDEAVTYSLGKFGQRALDFYSIHVTKESTHPVKPLAQIAGNRYASSPVGKALSDACMGTIASFLSKYQDIIIEHQKVVKGNQKRLESLRELAGKENLEYPSVTLPPQPHTKEGVDAYNEVIARVRMWVNLNLWQKLKLSRDDAKPLLRLKGFPSFPLVERQANEVDWWDMVCNVKKLINEKKEDGKVFWQNLAIYKRQEALRPYLSSEEDRKKGKKFARYQLGDLLLHLEKKHEGEDWGKVYDEAWERIDKKVEGLSKHIKLEEERRSEDAQSKAALTDWLRAKASFVIEGLKEADKDEFCRCELKLQKWYGDLRGKPFAIEAENSILDISGFSKQYNCAFIWQKDGVKKLNLYLIINYFKGGKLRFKKIKPEAFEANRFYTVINKKSGEIVPMEVNFNFDDPNLIILPLAFGKRQGREFIWNDLLSLETGSLKLANGRVIEKTLYNRRTRQDEPALFVALTFERREVLDSSNIKPMNLIGVDRGENIPAVIALTDPEGCPLSRFKDSLGNPTHILRIGESYKEKQRTIQAKKEVEQRRAGGYSRKYASKAKNLADDMVRNTARDLLYYAVTQDAMLIFENLSRGFGRQGKRTFMAERQYTRMEDWLTAKLAYEGLPSKTYLSKTLAQYTSKTCSNCGFTITSADYDRVLEKLKKTATGWMTTINGKELKVEGQITYYNRYKRQNVVKDLSVELDRLSEESVNNDISSWTKGRSGEALSLLKKRFSHRPVQEKFVCLNCGFETHADEQAALNIARSWLFLRSQEYKKYQTNKTTGNTDKRAFVETWQSFYRKKLKEVWKPAV

SEQ ID NO: 44715 - protein, 979 aa, synthetic construct
  REGION 1..979: note = engineered CasX variant
QEIKRINKIRRRLVKDSNTKKAGKTGPMKTLLVRVMTPDLRERLENLRKKPENIPQPISNTSRANLNKLLTDYTEMKKAILHVYWEEFQKDPVGLMSRVAQPASKKIDQNKLKPEMDEKGNLTTAGFACSQCGQPLFVYKLEQVSEKGKAYTNYFGRCNVAEHEKLILLAQLKPEKDSDEAVTYSLGKFGQRALDFYSIHVTKESTHPVKPLAQIAGNRYASTPVGKALSDACMGTIASFLSKYQDIIIEHQKVVKGNQKRLESLRELAGKENLEYPSVTLPPQPHTKEGVDAYNEVIARVRMWVNLNLWQKLKLSRDDAKPLLRLKGFPSFPLVERQANEVDWWDMVCNVKKLINEKKEDGKVFWQNLAIYKRQEALRPYLSSEEDRKKGKKFARYQLGDLLLHLEKKHEGEDWGKVYDEAWERIDKKVEGLSKHIKLEEERRSEDAQSKAALTDWLRAKASFVIEGLKEADKDEFCRCELKLQKWYGDLRGKPFAIEAENSILDISGFSKQYNCAFIWQKDGVKKLNLYLIINYFKGGKLRFKKIKPEAFEANRFYTVINKKSGEIVPMEVNFNFDDPNLIILPLAFGKRQGREFIWNDLLSLETGSLKLANGRVIEKTLYNRRTRQDEPALFVALTFERREVLDSSNIKPMNLIGVDRGENIPAVIALTDPEGCPLSRFKDSLGNPTHILRIGESYKEKQRTIQAKKEVEQRRAGGYSRKYASKAKNLADDMVRNTARDLLYYAVTQDAMLIFENLSRGFGRQGKRTFMAERQYTRMEDWLTAKLAYEGLPSKTYLSKTLAQYTSKTCSNCGFTITSADYDRVLEKLKKTATGWMTTINGKELKVEGQITYYNRYKRQNVVKDLSVELDRLSEESVNNDISSWTKGRSGEALSLLKKRFSHRPVQEKFVCLNCGFETHADEQAALNIARSWLFLRSQEYKKYQTNKTTGNTDKRAFVETWQSFYRKKLKEVWKPAV

SEQ ID NO: 44716 - protein, 979 aa, synthetic construct
  REGION 1..979: note = engineered CasX variant
QEIKRINKIRRRLVKDSNTKKAGKTGPMKTLLVRVMTPDLRERLENLRKKPENIPQPISNTSRANLNKLLTDYTEMKKAILHVYWEEFQKDPVGLMSRVAQPASKKIDQNKLKPEMDEKGNLTTAGFACSQCGQPLFVYKLEQVSEKGKAYTNYFGRCNVAEHEKLILLAQLKPEKDSDEAVTYSLGKFGQRALDFYSIHVTKESTHPVKPLAQIAGNRYASAPVGKALSDACMGTIASFLSKYQDIIIEHQKVVKGNQKRLESLRELAGKENLEYPSVTLPPQPHTKEGVDAYNEVIARVRMWVNLNLWQKLKLSRDDAKPLLRLKGFPSFPLVERQANEVDWWDMVCNVKKLINEKKEDGKVFWQNLAIYKRQEALRPYLSSEEDRKKGKKFARYQLGDLLLHLEKKHEGEDWGKVYDEAWERIDKKVEGLSKHIKLEEERRSEDAQSKAALTDWLRAKASFVIEGLKEADKDEFCRCELKLQKWYGDLRGKPFAIEAENSILDISGFSKQYNCAFIWQKDGVKKLNLYLIINYFKGGKLRFKKIKPEAFEANRFYTVINKKSGEIVPMEVNFNFDDPNLIILPLAFGKRQGREFIWNDLLSLETGSLKLANGRVIEKTLYNRRTRQDEPALFVALTFERREVLDSSNIKPMNLIGVDRGENIPAVIALTDPEGCPLSRFKDSLGNPTHILRIGESYKEKQRTIQAKKEVEQRRAGGYSRKYASKAKNLADDMVRNTARDLLYYAVTQDAMLIFENLSRGFGRQGKRTFMAERQYTRMEDWLTAKLAYEGLPSKTYLSKTLAQYTSKTCSNCGFTITSADYDRVLEKLKKTATGWMTTINGKELKVEGQITYYNRYKRQNVVKDLSVELDRLSEESVNNDISSWTKGRSGEALSLLKKRFSHRPVQEKFVCLNCGFETHADEQAALNIARSWLFLRSQEYKKYQTNKTTGNTDKRAFVETWQSFYRKKLKEVWKPAV

SEQ ID NO: 44717 - protein, 979 aa, synthetic construct
  REGION 1..979: note = engineered CasX variant
QEIKRINKIRRRLVKDSNTKKAGKTGPMKTLLVRVMTPDLRERLENLRKKPENIPQPISNTSRANLNKLLTDYTEMKKAILHVYWEEFQKDPVGLMSRVAQPASKKIDQNKLKPEMDEKGNLTTAGFACSQCGQPLFVYKLEQVSEKGKAYTNYFGRCNVAEHEKLILLAQLKPEKDSDEAVTYSLGKFGQRALDFYSIHVTKESTHPVKPLAQIAGNRYASVPVGKALSDACMGTIASFLSKYQDIIIEHQKVVKGNQKRLESLRELAGKENLEYPSVTLPPQPHTKEGVDAYNEVIARVRMWVNLNLWQKLKLSRDDAKPLLRLKGFPSFPLVERQANEVDWWDMVCNVKKLINEKKEDGKVFWQNLAIYKRQEALRPYLSSEEDRKKGKKFARYQLGDLLLHLEKKHEGEDWGKVYDEAWERIDKKVEGLSKHIKLEEERRSEDAQSKAALTDWLRAKASFVIEGLKEADKDEFCRCELKLQKWYGDLRGKPFAIEAENSILDISGFSKQYNCAFIWQKDGVKKLNLYLIINYFKGGKLRFKKIKPEAFEANRFYTVINKKSGEIVPMEVNFNFDDPNLIILPLAFGKRQGREFIWNDLLSLETGSLKLANGRVIEKTLYNRRTRQDEPALFVALTFERREVLDSSNIKPMNLIGVDRGENIPAVIALTDPEGCPLSRFKDSLGNPTHILRIGESYKEKQRTIQAKKEVEQRRAGGYSRKYASKAKNLADDMVRNTARDLLYYAVTQDAMLIFENLSRGFGRQGKRTFMAERQYTRMEDWLTAKLAYEGLPSKTYLSKTLAQYTSKTCSNCGFTITSADYDRVLEKLKKTATGWMTTINGKELKVEGQITYYNRYKRQNVVKDLSVELDRLSEESVNNDISSWTKGRSGEALSLLKKRFSHRPVQEKFVCLNCGFETHADEQAALNIARSWLFLRSQEYKKYQTNKTTGNTDKRAFVETWQSFYRKKLKEVWKPAV

SEQ ID NO: 44718 - protein, 979 aa, synthetic construct
  REGION 1..979: note = engineered CasX variant
QEIKRINKIRRRLVKDSNTKKAGKTGPMKTLLVRVMTPDLRERLENLRKKPENIPQPISNTSRANLNKLLTDYTEMKKAILHVYWEEFQKDPVGLMSRVAQPASKKIDQNKLKPEMDEKGNLTTAGFACSQCGQPLFVYKLEQVSEKGKAYTNYFGRCNVAEHEKLIKLAQLKPEKDSDEAVTYSLGKFGQRALDFYSIHVTKESTHPVKPLAQIAGNRYASGPVGKALSDACMGTIASFLSKYQDIIIEHQKVVKGNQKRLESLRELAGKENLEYPSVTLPPQPHTKEGVDAYNEVIARVRMWVNLNLWQKLKLSRDDAKPLLRLKGFPSFPLVERQANEVDWWDMVCNVKKLINEKKEDGKVFWQNLAIYKRQEALRPYLSSEEDRKKGKKFARYQLGDLLLHLEKKHEGEDWGKVYDEAWERIDKKVEGLSKHIKLEEERRSEDAQSKAALTDWLRAKASFVIEGLKEADKDEFCRCELKLQKWYGDLRGKPFAIEAENSILDISGFSKQYNCAFIWQKDGVKKLNLYLIINYFKGGKLRFKKIKPEAFEANRFYTVINKKSGEIVPMEVNFNFDDPNLIILPLAFGKRQGREFIWNDLLSLETGSLKLANGRVIEKTLYNRRTRQDEPALFVALTFERREVLDSSNIKPMNLIGVDRGENIPAVIALTDPEGCPLSRFKDSLGNPTHILRIGESYKEKQRTIQAKKEVEQRRAGGYSRKYASKAKNLADDMVRNTARDLLYYAVTQDAMLIFENLSRGFGRQGKRTFMAERQYTRMEDWLTAKLAYEGLPSKTYLSKTLAQYTSKTCSNCGFTITSADYDRVLEKLKKTATGWMTTINGKELKVEGQITYYNRYKRQNVVKDLSVELDRLSEESVNNDISSWTKGRSGEALSLLKKRFSHRPVQEKFVCLNCGFETHADEQAALNIARSWLFLRSQEYKKYQTNKTTGNTDKRAFVETWQSFYRKKLKEVWKPAV

SEQ ID NO: 44719 - protein, 978 aa, synthetic construct
  REGION 1..978: note = engineered CasX variant
QEIKRINKIRRRLVKDSNTKKAGKTGPMKTLLVRVMTPDLRERLENLRKKPENIPQPISNTSRANLNKLLTDYTEMKKAILHVYWEEFQKDPVGLMSRVAQPASKKIDQNKLKPEMDEKGNLTTAGFACSQCGQPLFVYKLEQVSEKGKAYTNYFGRCNVAEHEKLILLAQLKPEKDSDEAVTYSLGKFGQRALDFYSIHVTKESTHPVKPLAQIAGNRYASPVGKALSDACMGTIASFLSKYQDIIIEHQKVVKGNQKRLESLRELAGKENLEYPSVTLPPQPHTKEGVDAYNEVIARVRMWVNLNLWQKLKLSRDDAKPLLRLKGFPSFPLVERQANEVDWWDMVCNVKKLINEKKEDGKVFWQNLAIYKRQEALRPYLSSEEDRKKGKKFARYQLGDLLLHLEKKHEGEDWGKVYDEAWERIDKKVEGLSKHIKLEEERRSEDAQSKAALTDWLRAKASFVIEGLKEADKDEFCRCELKLQKWYGDLRGKPFAIEAENSILDISGFSKQYNCAFIWQKDGVKKLNLYLIINYFKGGKLRFKKIKPEAFEANRFYTVINKKSGEIVPMEVNFNFDDPNLIILPLAFGKRQGREFIWNDLLSLETGSLKLANGRVIEKTLYNRRTRQDEPALFVALTFERREVLDSSNIKPMNLIGVDRGENIPAVIALTDPEGCPLSRFKDSLGNPTHILRIGESYKEKQRTIQAKKEVEQRRAGGYSRKYASKAKNLADDMVRNTARDLLYYAVTQDAMLIFENLSRGFGRQGKRTFMAERQYTRMEDWLTAKLAYEGLPSKTYLSKTLAQYTSKTCSNCGFTITSADYDRVLEKLKKTATGWMTTINGKELKVEGQITYYNRYKRQNVVKDLSVELDRLSEESVNNDISSWTKGRSGEALSLLKKRFSHRPVQEKFVCLNCGFETHADEQAALNIARSWLFLRSQEYKKYQTNKTTGNTDKRAFVETWQSFYRKKLKEVWKPAV

SEQ ID NO: 44720 - protein, 979 aa, synthetic construct
  REGION 1..979: note = engineered CasX variant
QEIKRINKIRRRLVKDSNTKKAGKTGPMKTLLVRVMTPDLRERLENLRKKPENIPQPISNTSRANLNKLLTDYTEMKKAILHVYWEEFQKDPVGLMSRVAQPASKKIDQNKLKPEMDEKGNLTTAGFACSQCGQPLFVYKLEQVSEKGKAYTNYFGRCNVAEHEKLILLAQLKPEKDSDEAVTYSLGKFGQRALDFYSIHVTKESTHPVKPLAQIAGNRYASYPVGKALSDACMGTIASFLSKYQDIIIEHQKVVKGNQKRLESLRELAGKENLEYPSVTLPPQPHTKEGVDAYNEVIARVRMWVNLNLWQKLKLSRDDAKPLLRLKGFPSFPLVERQANEVDWWDMVCNVKKLINEKKEDGKVFWQNLAGYKRQEALRPYLSSEEDREKGKKFARYQLGDLLLHLEKKHEGEDWGKVYDEAWERIDKKVEGLSKHIKLEEERRSEDAQSKAALTDWLRAKASFVIEGLKEADKDEFCRCELKLQKWYGDLRGKPFAIEAENSILDISGFSKQYNCAFIWQKDGVKKLNLYLIINYFKGGKLRFKKIKPEAFEANRFYTVINKKSGEIVPMEVNFNFDDPNLIILPLAFGKRQGREFIWNDLLSLETGSLKLANGRVIEKTLYNRRTRQDEPALFVALTFERREVLDSSNIKPMNLIGVDRGENIPAVIALTDPEGCPLSRFKDSLGNPTHILRIGESYKEKQRTIQAKKEVEQRRAGGYSRKYASKAKNLADDMVRNTARDLLYYAVTQDAMLIFENLSRGFGRQGKRTFMAERQYTRMEDWLTAKLAYEGLPSKTYLSKTLAQYTSKTCSNCGFTITSADYDRVLEKLKKTATGWMTTINGKELKVEGQITYYNRYKRQNVVKDLSVELDRLSEESVNNDISSWTKGRSGEALSLLKKRFSHRPVQEKFVCLNCGFETHADEQAALNIARSWLFLRSQEYKKYQTNKTTGNTDKRAFVETWQSFYRKKLKEVWKPAV

SEQ ID NO: 44721 - protein, 979 aa, synthetic construct
  REGION 1..979: note = engineered CasX variant
QEIKRINKIRRRLVKDSNTKKAGKTGPMKTLLVRVMTPDLRERLENLRKKPENIPQPISNTSRANLNKLLTDYTEMKKAILHVYWEEFQKDPVGLMSRVAQPASKKIDQNKLKPEMDEKGNLTTAGFACSQCGQPLFVYKLEQVSEKGKAYTNYFGRCNVAEHEKLILLAQLKPEKDSDEAVTYSLGKFGQRALDFYSIHVTKESTHPVKPLAQIAGNRYASHPVGKALSDACMGTIASFLSKYQDIIIEHQKVVKGNQKRLESLRELAGKENLEYPSVTLPPQPHTKEGVDAYNEVIARVRMWVNLNLWQKLKLSRDDAKPLLRLKGFPSFPLVERQANEVDWWDMVCNVKKLINEKKEDGKVFWQNLAGYKRQEALRPYLSSEEDREKGKKFARYQLGDLLLHLEKKHEGEDWGKVYDEAWERIDKKVEGLSKHIKLEEERRSEDAQSKAALTDWLRAKASFVIEGLKEADKDEFCRCELKLQKWYGDLRGKPFAIEAENSILDISGFSKQYNCAFIWQKDGVKKLNLYLIINYFKGGKLRFKKIKPEAFEANRFYTVINKKSGEIVPMEVNFNFDDPNLIILPLAFGKRQGREFIWNDLLSLETGSLKLANGRVIEKTLYNRRTRQDEPALFVALTFERREVLDSSNIKPMNLIGVDRGENIPAVIALTDPEGCPLSRFKDSLGNPTHILRIGESYKEKQRTIQAKKEVEQRRAGGYSRKYASKAKNLADDMVRNTARDLLYYAVTQDAMLIFENLSRGFGRQGKRTFMAERQYTRMEDWLTAKLAYEGLPSKTYLSKTLAQYTSKTCSNCGFTITSADYDRVLEKLKKTATGWMTTINGKELKVEGQITYYNRYKRQNVVKDLSVELDRLSEESVNNDISSWTKGRSGEALSLLKKRFSHRPVQEKFVCLNCGFETHADEQAALNIARSWLFLRSQEYKKYQTNKTTGNTDKRAFVETWQSFYRKKLKEVWKPAV

SEQ ID NO: 44722 - protein, 979 aa, synthetic construct
  REGION 1..979: note = engineered CasX variant
QEIKRINKIRRRLVKDSNTKKAGKTGPMKTLLVRVMTPDLRERLENLRKKPENIPQPISNTSRANLNKLLTDYTEMKKAILHVYWEEFQKDPVGLMSRVAQPASKKIDQNKLKPEMDEKGNLTTAGFACSQCGQPLFVYKLEQVSEKGKAYTNYFGRCNVAEHEKLILLAQLKPEKDSDEAVTYSLGKFGQRALDFYSIHVTKESTHPVKPLAQIAGNRYASSPVGKALSDACMGTIASFLSKYQDIIIEHQKVVKGNQKRLESLRELAGKENLEYPSVTLPPQPHTKEGVDAYNEVIARVRMWVNLNLWQKLKLSRDDAKPLLRLKGFPSFPLVERQANEVDWWDMVCNVKKLINEKKEDGKVFWQNLAGYKRQEALRPYLSSEEDREKGKKFARYQLGDLLLHLEKKHEGEDWGKVYDEAWERIDKKVEGLSKHIKLEEERRSEDAQSKAALTDWLRAKASFVIEGLKEADKDEFCRCELKLQKWYGDLRGKPFAIEAENSILDISGFSKQYNCAFIWQKDGVKKLNLYLIINYFKGGKLRFKKIKPEAFEANRFYTVINKKSGEIVPMEVNFNFDDPNLIILPLAFGKRQGREFIWNDLLSLETGSLKLANGRVIEKTLYNRRTRQDEPALFVALTFERREVLDSSNIKPMNLIGVDRGENIPAVIALTDPEGCPLSRFKDSLGNPTHILRIGESYKEKQRTIQAKKEVEQRRAGGYSRKYASKAKNLADDMVRNTARDLLYYAVTQDAMLIFENLSRGFGRQGKRTFMAERQYTRMEDWLTAKLAYEGLPSKTYLSKTLAQYTSKTCSNCGFTITSADYDRVLEKLKKTATGWMTTINGKELKVEGQITYYNRYKRQNVVKDLSVELDRLSEESVNNDISSWTKGRSGEALSLLKKRFSHRPVQEKFVCLNCGFETHADEQAALNIARSWLFLRSQEYKKYQTNKTTGNTDKRAFVETWQSFYRKKLKEVWKPAV

SEQ ID NO: 44723 - protein, 979 aa, synthetic construct
  REGION 1..979: note = engineered CasX variant
QEIKRINKIRRRLVKDSNTKKAGKTGPMKTLLVRVMTPDLRERLENLRKKPENIPQPISNTSRANLNKLLTDYTEMKKAILHVYWEEFQKDPVGLMSRVAQPASKKIDQNKLKPEMDEKGNLTTAGFACSQCGQPLFVYKLEQVSEKGKAYTNYFGRCNVAEHEKLILLAQLKPEKDSDEAVTYSLGKFGQRALDFYSIHVTKESTHPVKPLAQIAGNRYASTPVGKALSDACMGTIASFLSKYQDIIIEHQKVVKGNQKRLESLRELAGKENLEYPSVTLPPQPHTKEGVDAYNEVIARVRMWVNLNLWQKLKLSRDDAKPLLRLKGFPSFPLVERQANEVDWWDMVCNVKKLINEKKEDGKVFWQNLAGYKRQEALRPYLSSEEDREKGKKFARYQLGDLLLHLEKKHEGEDWGKVYDEAWERIDKKVEGLSKHIKLEEERRSEDAQSKAALTDWLRAKASFVIEGLKEADKDEFCRCELKLQKWYGDLRGKPFAIEAENSILDISGFSKQYNCAFIWQKDGVKKLNLYLIINYFKGGKLRFKKIKPEAFEANRFYTVINKKSGEIVPMEVNFNFDDPNLIILPLAFGKRQGREFIWNDLLSLETGSLKLANGRVIEKTLYNRRTRQDEPALFVALTFERREVLDSSNIKPMNLIGVDRGENIPAVIALTDPEGCPLSRFKDSLGNPTHILRIGESYKEKQRTIQAKKEVEQRRAGGYSRKYASKAKNLADDMVRNTARDLLYYAVTQDAMLIFENLSRGFGRQGKRTFMAERQYTRMEDWLTAKLAYEGLPSKTYLSKTLAQYTSKTCSNCGFTITSADYDRVLEKLKKTATGWMTTINGKELKVEGQITYYNRYKRQNVVKDLSVELDRLSEESVNNDISSWTKGRSGEALSLLKKRFSHRPVQEKFVCLNCGFETHADEQAALNIARSWLFLRSQEYKKYQTNKTTGNTDKRAFVETWQSFYRKKLKEVWKPAV

SEQ ID NO: 44724 - protein, 979 aa, synthetic construct
  REGION 1..979: note = engineered CasX variant
QEIKRINKIRRRLVKDSNTKKAGKTGPMKTLLVRVMTPDLRERLENLRKKPENIPQPISNTSRANLNKLLTDYTEMKKAILHVYWEEFQKDPVGLMSRVAQPASKKIDQNKLKPEMDEKGNLTTAGFACSQCGQPLFVYKLEQVSEKGKAYTNYFGRCNVAEHEKLILLAQLKPEKDSDEAVTYSLGKFGQRALDFYSIHVTKESTHPVKPLAQIAGNRYASAPVGKALSDACMGTIASFLSKYQDIIIEHQKVVKGNQKRLESLRELAGKENLEYPSVTLPPQPHTKEGVDAYNEVIARVRMWVNLNLWQKLKLSRDDAKPLLRLKGFPSFPLVERQANEVDWWDMVCNVKKLINEKKEDGKVFWQNLAGYKRQEALRPYLSSEEDREKGKKFARYQLGDLLLHLEKKHEGEDWGKVYDEAWERIDKKVEGLSKHIKLEEERRSEDAQSKAALTDWLRAKASFVIEGLKEADKDEFCRCELKLQKWYGDLRGKPFAIEAENSILDISGFSKQYNCAFIWQKDGVKKLNLYLIINYFKGGKLRFKKIKPEAFEANRFYTVINKKSGEIVPMEVNFNFDDPNLIILPLAFGKRQGREFIWNDLLSLETGSLKLANGRVIEKTLYNRRTRQDEPALFVALTFERREVLDSSNIKPMNLIGVDRGENIPAVIALTDPEGCPLSRFKDSLGNPTHILRIGESYKEKQRTIQAKKEVEQRRAGGYSRKYASKAKNLADDMVRNTARDLLYYAVTQDAMLIFENLSRGFGRQGKRTFMAERQYTRMEDWLTAKLAYEGLPSKTYLSKTLAQYTSKTCSNCGFTITSADYDRVLEKLKKTATGWMTTINGKELKVEGQITYYNRYKRQNVVKDLSVELDRLSEESVNNDISSWTKGRSGEALSLLKKRFSHRPVQEKFVCLNCGFETHADEQAALNIARSWLFLRSQEYKKYQTNKTTGNTDKRAFVETWQSFYRKKLKEVWKPAV

SEQ ID NO: 44725 - protein, 979 aa, synthetic construct
  REGION 1..979: note = engineered CasX variant
QEIKRINKIRRRLVKDSNTKKAGKTGPMKTLLVRVMTPDLRERLENLRKKPENIPQPISNTSRANLNKLLTDYTEMKKAILHVYWEEFQKDPVGLMSRVAQPASKKIDQNKLKPEMDEKGNLTTAGFACSQCGQPLFVYKLEQVSEKGKAYTNYFGRCNVAEHEKLILLAQLKPEKDSDEAVTYSLGKFGQRALDFYSIHVTKESTHPVKPLAQIAGNRYASVPVGKALSDACMGTIASFLSKYQDIIIEHQKVVKGNQKRLESLRELAGKENLEYPSVTLPPQPHTKEGVDAYNEVIARVRMWVNLNLWQKLKLSRDDAKPLLRLKGFPSFPLVERQANEVDWWDMVCNVKKLINEKKEDGKVFWQNLAGYKRQEALRPYLSSEEDREKGKKFARYQLGDLLLHLEKKHEGEDWGKVYDEAWERIDKKVEGLSKHIKLEEERRSEDAQSKAALTDWLRAKASFVIEGLKEADKDEFCRCELKLQKWYGDLRGKPFAIEAENSILDISGFSKQYNCAFIWQKDGVKKLNLYLIINYFKGGKLRFKKIKPEAFEANRFYTVINKKSGEIVPMEVNFNFDDPNLIILPLAFGKRQGREFIWNDLLSLETGSLKLANGRVIEKTLYNRRTRQDEPALFVALTFERREVLDSSNIKPMNLIGVDRGENIPAVIALTDPEGCPLSRFKDSLGNPTHILRIGESYKEKQRTIQAKKEVEQRRAGGYSRKYASKAKNLADDMVRNTARDLLYYAVTQDAMLIFENLSRGFGRQGKRTFMAERQYTRMEDWLTAKLAYEGLPSKTYLSKTLAQYTSKTCSNCGFTITSADYDRVLEKLKKTATGWMTTINGKELKVEGQITYYNRYKRQNVVKDLSVELDRLSEESVNNDISSWTKGRSGEALSLLKKRFSHRPVQEKFVCLNCGFETHADEQAALNIARSWLFLRSQEYKKYQTNKTTGNTDKRAFVETWQSFYRKKLKEVWKPAV

SEQ ID NO: 44726 - protein, 979 aa, synthetic construct
  REGION 1..979: note = engineered CasX variant
QEIKRINKIRRRLVKDSNTKKAGKTGPMKTLLVRVMTPDLRERLENLRKKPENIPQPISNTSRANLNKLLTDYTEMKKAILHVYWEEFQKDPVGLMSRVAQPASKKIDQNKLKPEMDEKGNLTTAGFACSQCGQPLFVYKLEQVSEKGKAYTNYFGRCNVAEHEKLIKLAQLKPEKDSDEAVTYSLGKFGQRALDFYSIHVTKESTHPVKPLAQIAGNRYASGPVGKALSDACMGTIASFLSKYQDIIIEHQKVVKGNQKRLESLRELAGKENLEYPSVTLPPQPHTKEGVDAYNEVIARVRMWVNLNLWQKLKLSRDDAKPLLRLKGFPSFPLVERQANEVDWWDMVCNVKKLINEKKEDGKVFWQNLAGYKRQEALRPYLSSEEDREKGKKFARYQLGDLLLHLEKKHEGEDWGKVYDEAWERIDKKVEGLSKHIKLEEERRSEDAQSKAALTDWLRAKASFVIEGLKEADKDEFCRCELKLQKWYGDLRGKPFAIEAENSILDISGFSKQYNCAFIWQKDGVKKLNLYLIINYFKGGKLRFKKIKPEAFEANRFYTVINKKSGEIVPMEVNFNFDDPNLIILPLAFGKRQGREFIWNDLLSLETGSLKLANGRVIEKTLYNRRTRQDEPALFVALTFERREVLDSSNIKPMNLIGVDRGENIPAVIALTDPEGCPLSRFKDSLGNPTHILRIGESYKEKQRTIQAKKEVEQRRAGGYSRKYASKAKNLADDMVRNTARDLLYYAVTQDAMLIFENLSRGFGRQGKRTFMAERQYTRMEDWLTAKLAYEGLPSKTYLSKTLAQYTSKTCSNCGFTITSADYDRVLEKLKKTATGWMTTINGKELKVEGQITYYNRYKRQNVVKDLSVELDRLSEESVNNDISSWTKGRSGEALSLLKKRFSHRPVQEKFVCLNCGFETHADEQAALNIARSWLFLRSQEYKKYQTNKTTGNTDKRAFVETWQSFYRKKLKEVWKPAV

SEQ ID NO: 44727 - protein, 978 aa, synthetic construct
  REGION 1..978: note = engineered CasX variant
QEIKRINKIRRRLVKDSNTKKAGKTGPMKTLLVRVMTPDLRERLENLRKKPENIPQPISNTSRANLNKLLTDYTEMKKAILHVYWEEFQKDPVGLMSRVAQPASKKIDQNKLKPEMDEKGNLTTAGFACSQCGQPLFVYKLEQVSEKGKAYTNYFGRCNVAEHEKLILLAQLKPEKDSDEAVTYSLGKFGQRALDFYSIHVTKESTHPVKPLAQIAGNRYASPVGKALSDACMGTIASFLSKYQDIIIEHQKVVKGNQKRLESLRELAGKENLEYPSVTLPPQPHTKEGVDAYNEVIARVRMWVNLNLWQKLKLSRDDAKPLLRLKGFPSFPLVERQANEVDWWDMVCNVKKLINEKKEDGKVFWQNLAGYKRQEALRPYLSSEEDREKGKKFARYQLGDLLLHLEKKHEGEDWGKVYDEAWERIDKKVEGLSKHIKLEEERRSEDAQSKAALTDWLRAKASFVIEGLKEADKDEFCRCELKLQKWYGDLRGKPFAIEAENSILDISGFSKQYNCAFIWQKDGVKKLNLYLIINYFKGGKLRFKKIKPEAFEANRFYTVINKKSGEIVPMEVNFNFDDPNLIILPLAFGKRQGREFIWNDLLSLETGSLKLANGRVIEKTLYNRRTRQDEPALFVALTFERREVLDSSNIKPMNLIGVDRGENIPAVIALTDPEGCPLSRFKDSLGNPTHILRIGESYKEKQRTIQAKKEVEQRRAGGYSRKYASKAKNLADDMVRNTARDLLYYAVTQDAMLIFENLSRGFGRQGKRTFMAERQYTRMEDWLTAKLAYEGLPSKTYLSKTLAQYTSKTCSNCGFTITSADYDRVLEKLKKTATGWMTTINGKELKVEGQITYYNRYKRQNVVKDLSVELDRLSEESVNNDISSWTKGRSGEALSLLKKRFSHRPVQEKFVCLNCGFETHADEQAALNIARSWLFLRSQEYKKYQTNKTTGNTDKRAFVETWQSFYRKKLKEVWKPAV

SEQ ID NO: 44728 - protein, 979 aa, synthetic construct
  REGION 1..979: note = engineered CasX variant
QEIKRINKIRRRLVKDSNTKKAGKTGPMKTLLVRVMTPDLRERLENLRKKPENIPQPISNTSRANLNKLLTDYTEMKKAILHVYWEEFQKDPVGLMSRVAQPASKKIDQNKLKPEMDEKGNLTTAGFACSQCGQPLFVYKLEQVSEKGKAYTNYFGRCNVAEHEKLILLAQLKPEKDSDEAVTYSLGKFGQRALDFYSIHVTKESTHPVKPLAQIAGNRYASYPVGKALSDACMGTIASFLSKYQDIIIEHQKVVKGNQKRLESLRELAGKENLEYPSVTLPPQPHTKEGVDAYNEVIARVRMWVNLNLWQKLKLSRDDAKPLLRLKGFPSFPLVERQANEVDWWDMVCNVKKLINEKKEDGKVFWQNLAGYKRQEALRPYLSSEEDRKKGKKFARYQLGDLLLHLEKKHEGEDWGKVYDEAWERIDKKVEGLSKHIKLEEERRSEDAQSKAALTDWLRAKASFVIEGLKEADKDEFCRCELKLQKWYGDLRGKPFAIEAENSILDISGFSKQYNCAFIWQKDGVKKLNLYLIINYFKGGKLRFKKIKPEAFEANRFYTVINKKSGEIVIMEVNFNFDDPNLIILPLAFGKRQGREFIWNDLLSLETGSLKLANGRVIEKTLYNRRTRQDEPALFVALTFERREVLDSSNIKPMNLIGVDRGENIPAVIALTDPEGCPLSRFKDSLGNPTHILRIGESYKEKQRTIQAKKEVEQRRAGGYSRKYASKAKNLADDMVRNTARDLLYYAVTQDAMLIFENLSRGFGRQGKRTFMAERQYTRMEDWLTAKLAYEGLPSKTYLSKTLAQYTSKTCSNCGFTITSADYDRVLEKLKKTATGWMTTINGKELKVEGQITYYNRYKRQNVVKDLSVELDRLSEESVNNDISSWTKGRSGEALSLLKKRFSHRPVQEKFVCLNCGFETHADEQAALNIARSWLFLRSQEYKKYQTNKTTGNTDKRAFVETWQSFYRKKLKEVWKPAV

SEQ ID NO: 44729 - protein, 979 aa, synthetic construct
  REGION 1..979: note = engineered CasX variant
QEIKRINKIRRRLVKDSNTKKAGKTGPMKTLLVRVMTPDLRERLENLRKKPENIPQPISNTSRANLNKLLTDYTEMKKAILHVYWEEFQKDPVGLMSRVAQPASKKIDQNKLKPEMDEKGNLTTAGFACSQCGQPLFVYKLEQVSEKGKAYTNYFGRCNVAEHEKLILLAQLKPEKDSDEAVTYSLGKFGQRALDFYSIHVTKESTHPVKPLAQIAGNRYASHPVGKALSDACMGTIASFLSKYQDIIIEHQKVVKGNQKRLESLRELAGKENLEYPSVTLPPQPHTKEGVDAYNEVIARVRMWVNLNLWQKLKLSRDDAKPLLRLKGFPSFPLVERQANEVDWWDMVCNVKKLINEKKEDGKVFWQNLAGYKRQEALRPYLSSEEDRKKGKKFARYQLGDLLLHLEKKHEGEDWGKVYDEAWERIDKKVEGLSKHIKLEEERRSEDAQSKAALTDWLRAKASFVIEGLKEADKDEFCRCELKLQKWYGDLRGKPFAIEAENSILDISGFSKQYNCAFIWQKDGVKKLNLYLIINYFKGGKLRFKKIKPEAFEANRFYTVINKKSGEIVIMEVNFNFDDPNLIILPLAFGKRQGREFIWNDLLSLETGSLKLANGRVIEKTLYNRRTRQDEPALFVALTFERREVLDSSNIKPMNLIGVDRGENIPAVIALTDPEGCPLSRFKDSLGNPTHILRIGESYKEKQRTIQAKKEVEQRRAGGYSRKYASKAKNLADDMVRNTARDLLYYAVTQDAMLIFENLSRGFGRQGKRTFMAERQYTRMEDWLTAKLAYEGLPSKTYLSKTLAQYTSKTCSNCGFTITSADYDRVLEKLKKTATGWMTTINGKELKVEGQITYYNRYKRQNVVKDLSVELDRLSEESVNNDISSWTKGRSGEALSLLKKRFSHRPVQEKFVCLNCGFETHADEQAALNIARSWLFLRSQEYKKYQTNKTTGNTDKRAFVETWQSFYRKKLKEVWKPAV

SEQ ID NO: 44730 - protein, 979 aa, synthetic construct
  REGION 1..979: note = engineered CasX variant
QEIKRINKIRRRLVKDSNTKKAGKTGPMKTLLVRVMTPDLRERLENLRKKPENIPQPISNTSRANLNKLLTDYTEMKKAILHVYWEEFQKDPVGLMSRVAQPASKKIDQNKLKPEMDEKGNLTTAGFACSQCGQPLFVYKLEQVSEKGKAYTNYFGRCNVAEHEKLILLAQLKPEKDSDEAVTYSLGKFGQRALDFYSIHVTKESTHPVKPLAQIAGNRYASSPVGKALSDACMGTIASFLSKYQDIIIEHQKVVKGNQKRLESLRELAGKENLEYPSVTLPPQPHTKEGVDAYNEVIARVRMWVNLNLWQKLKLSRDDAKPLLRLKGFPSFPLVERQANEVDWWDMVCNVKKLINEKKEDGKVFWQNLAGYKRQEALRPYLSSEEDRKKGKKFARYQLGDLLLHLEKKHEGEDWGKVYDEAWERIDKKVEGLSKHIKLEEERRSEDAQSKAALTDWLRAKASFVIEGLKEADKDEFCRCELKLQKWYGDLRGKPFAIEAENSILDISGFSKQYNCAFIWQKDGVKKLNLYLIINYFKGGKLRFKKIKPEAFEANRFYTVINKKSGEIVIMEVNFNFDDPNLIILPLAFGKRQGREFIWNDLLSLETGSLKLANGRVIEKTLYNRRTRQDEPALFVALTFERREVLDSSNIKPMNLIGVDRGENIPAVIALTDPEGCPLSRFKDSLGNPTHILRIGESYKEKQRTIQAKKEVEQRRAGGYSRKYASKAKNLADDMVRNTARDLLYYAVTQDAMLIFENLSRGFGRQGKRTFMAERQYTRMEDWLTAKLAYEGLPSKTYLSKTLAQYTSKTCSNCGFTITSADYDRVLEKLKKTATGWMTTINGKELKVEGQITYYNRYKRQNVVKDLSVELDRLSEESVNNDISSWTKGRSGEALSLLKKRFSHRPVQEKFVCLNCGFETHADEQAALNIARSWLFLRSQEYKKYQTNKTTGNTDKRAFVETWQSFYRKKLKEVWKPAV

SEQ ID NO: 44731 - protein, 979 aa, synthetic construct
  REGION 1..979: note = engineered CasX variant
QEIKRINKIRRRLVKDSNTKKAGKTGPMKTLLVRVMTPDLRERLENLRKKPENIPQPISNTSRANLNKLLTDYTEMKKAILHVYWEEFQKDPVGLMSRVAQPASKKIDQNKLKPEMDEKGNLTTAGFACSQCGQPLFVYKLEQVSEKGKAYTNYFGRCNVAEHEKLILLAQLKPEKDSDEAVTYSLGKFGQRALDFYSIHVTKESTHPVKPLAQIAGNRYASTPVGKALSDACMGTIASFLSKYQDIIIEHQKVVKGNQKRLESLRELAGKENLEYPSVTLPPQPHTKEGVDAYNEVIARVRMWVNLNLWQKLKLSRDDAKPLLRLKGFPSFPLVERQANEVDWWDMVCNVKKLINEKKEDGKVFWQNLAGYKRQEALRPYLSSEEDRKKGKKFARYQLGDLLLHLEKKHEGEDWGKVYDEAWERIDKKVEGLSKHIKLEEERRSEDAQSKAALTDWLRAKASFVIEGLKEADKDEFCRCELKLQKWYGDLRGKPFAIEAENSILDISGFSKQYNCAFIWQKDGVKKLNLYLIINYFKGGKLRFKKIKPEAFEANRFYTVINKKSGEIVIMEVNFNFDDPNLIILPLAFGKRQGREFIWNDLLSLETGSLKLANGRVIEKTLYNRRTRQDEPALFVALTFERREVLDSSNIKPMNLIGVDRGENIPAVIALTDPEGCPLSRFKDSLGNPTHILRIGESYKEKQRTIQAKKEVEQRRAGGYSRKYASKAKNLADDMVRNTARDLLYYAVTQDAMLIFENLSRGFGRQGKRTFMAERQYTRMEDWLTAKLAYEGLPSKTYLSKTLAQYTSKTCSNCGFTITSADYDRVLEKLKKTATGWMTTINGKELKVEGQITYYNRYKRQNVVKDLSVELDRLSEESVNNDISSWTKGRSGEALSLLKKRFSHRPVQEKFVCLNCGFETHADEQAALNIARSWLFLRSQEYKKYQTNKTTGNTDKRAFVETWQSFYRKKLKEVWKPAV

SEQ ID NO: 44732 - protein, 979 aa, synthetic construct
  REGION 1..979: note = engineered CasX variant
QEIKRINKIRRRLVKDSNTKKAGKTGPMKTLLVRVMTPDLRERLENLRKKPENIPQPISNTSRANLNKLLTDYTEMKKAILHVYWEEFQKDPVGLMSRVAQPASKKIDQNKLKPEMDEKGNLTTAGFACSQCGQPLFVYKLEQVSEKGKAYTNYFGRCNVAEHEKLILLAQLKPEKDSDEAVTYSLGKFGQRALDFYSIHVTKESTHPVKPLAQIAGNRYASAPVGKALSDACMGTIASFLSKYQDIIIEHQKVVKGNQKRLESLRELAGKENLEYPSVTLPPQPHTKEGVDAYNEVIARVRMWVNLNLWQKLKLSRDDAKPLLRLKGFPSFPLVERQANEVDWWDMVCNVKKLINEKKEDGKVFWQNLAGYKRQEALRPYLSSEEDRKKGKKFARYQLGDLLLHLEKKHEGEDWGKVYDEAWERIDKKVEGLSKHIKLEEERRSEDAQSKAALTDWLRAKASFVIEGLKEADKDEFCRCELKLQKWYGDLRGKPFAIEAENSILDISGFSKQYNCAFIWQKDGVKKLNLYLIINYFKGGKLRFKKIKPEAFEANRFYTVINKKSGEIVIMEVNFNFDDPNLIILPLAFGKRQGREFIWNDLLSLETGSLKLANGRVIEKTLYNRRTRQDEPALFVALTFERREVLDSSNIKPMNLIGVDRGENIPAVIALTDPEGCPLSRFKDSLGNPTHILRIGESYKEKQRTIQAKKEVEQRRAGGYSRKYASKAKNLADDMVRNTARDLLYYAVTQDAMLIFENLSRGFGRQGKRTFMAERQYTRMEDWLTAKLAYEGLPSKTYLSKTLAQYTSKTCSNCGFTITSADYDRVLEKLKKTATGWMTTINGKELKVEGQITYYNRYKRQNVVKDLSVELDRLSEESVNNDISSWTKGRSGEALSLLKKRFSHRPVQEKFVCLNCGFETHADEQAALNIARSWLFLRSQEYKKYQTNKTTGNTDKRAFVETWQSFYRKKLKEVWKPAV

SEQ ID NO: 44733 - protein, 979 aa, synthetic construct
  REGION 1..979: note = engineered CasX variant
QEIKRINKIRRRLVKDSNTKKAGKTGPMKTLLVRVMTPDLRERLENLRKKPENIPQPISNTSRANLNKLLTDYTEMKKAILHVYWEEFQKDPVGLMSRVAQPASKKIDQNKLKPEMDEKGNLTTAGFACSQCGQPLFVYKLEQVSEKGKAYTNYFGRCNVAEHEKLILLAQLKPEKDSDEAVTYSLGKFGQRALDFYSIHVTKESTHPVKPLAQIAGNRYASVPVGKALSDACMGTIASFLSKYQDIIIEHQKVVKGNQKRLESLRELAGKENLEYPSVTLPPQPHTKEGVDAYNEVIARVRMWVNLNLWQKLKLSRDDAKPLLRLKGFPSFPLVERQANEVDWWDMVCNVKKLINEKKEDGKVFWQNLAGYKRQEALRPYLSSEEDRKKGKKFARYQLGDLLLHLEKKHEGEDWGKVYDEAWERIDKKVEGLSKHIKLEEERRSEDAQSKAALTDWLRAKASFVIEGLKEADKDEFCRCELKLQKWYGDLRGKPFAIEAENSILDISGFSKQYNCAFIWQKDGVKKLNLYLIINYFKGGKLRFKKIKPEAFEANRFYTVINKKSGEIVIMEVNFNFDDPNLIILPLAFGKRQGREFIWNDLLSLETGSLKLANGRVIEKTLYNRRTRQDEPALFVALTFERREVLDSSNIKPMNLIGVDRGENIPAVIALTDPEGCPLSRFKDSLGNPTHILRIGESYKEKQRTIQAKKEVEQRRAGGYSRKYASKAKNLADDMVRNTARDLLYYAVTQDAMLIFENLSRGFGRQGKRTFMAERQYTRMEDWLTAKLAYEGLPSKTYLSKTLAQYTSKTCSNCGFTITSADYDRVLEKLKKTATGWMTTINGKELKVEGQITYYNRYKRQNVVKDLSVELDRLSEESVNNDISSWTKGRSGEALSLLKKRFSHRPVQEKFVCLNCGFETHADEQAALNIARSWLFLRSQEYKKYQTNKTTGNTDKRAFVETWQSFYRKKLKEVWKPAV

SEQ ID NO: 44734 - protein, 979 aa, synthetic construct
  REGION 1..979: note = engineered CasX variant
QEIKRINKIRRRLVKDSNTKKAGKTGPMKTLLVRVMTPDLRERLENLRKKPENIPQPISNTSRANLNKLLTDYTEMKKAILHVYWEEFQKDPVGLMSRVAQPASKKIDQNKLKPEMDEKGNLTTAGFACSQCGQPLFVYKLEQVSEKGKAYTNYFGRCNVAEHEKLIKLAQLKPEKDSDEAVTYSLGKFGQRALDFYSIHVTKESTHPVKPLAQIAGNRYASGPVGKALSDACMGTIASFLSKYQDIIIEHQKVVKGNQKRLESLRELAGKENLEYPSVTLPPQPHTKEGVDAYNEVIARVRMWVNLNLWQKLKLSRDDAKPLLRLKGFPSFPLVERQANEVDWWDMVCNVKKLINEKKEDGKVFWQNLAGYKRQEALRPYLSSEEDRKKGKKFARYQLGDLLLHLEKKHEGEDWGKVYDEAWERIDKKVEGLSKHIKLEEERRSEDAQSKAALTDWLRAKASFVIEGLKEADKDEFCRCELKLQKWYGDLRGKPFAIEAENSILDISGFSKQYNCAFIWQKDGVKKLNLYLIINYFKGGKLRFKKIKPEAFEANRFYTVINKKSGEIVIMEVNFNFDDPNLIILPLAFGKRQGREFIWNDLLSLETGSLKLANGRVIEKTLYNRRTRQDEPALFVALTFERREVLDSSNIKPMNLIGVDRGENIPAVIALTDPEGCPLSRFKDSLGNPTHILRIGESYKEKQRTIQAKKEVEQRRAGGYSRKYASKAKNLADDMVRNTARDLLYYAVTQDAMLIFENLSRGFGRQGKRTFMAERQYTRMEDWLTAKLAYEGLPSKTYLSKTLAQYTSKTCSNCGFTITSADYDRVLEKLKKTATGWMTTINGKELKVEGQITYYNRYKRQNVVKDLSVELDRLSEESVNNDISSWTKGRSGEALSLLKKRFSHRPVQEKFVCLNCGFETHADEQAALNIARSWLFLRSQEYKKYQTNKTTGNTDKRAFVETWQSFYRKKLKEVWKPAV

SEQ ID NO: 44735 - protein, 978 aa, synthetic construct
  REGION 1..978: note = engineered CasX variant
QEIKRINKIRRRLVKDSNTKKAGKTGPMKTLLVRVMTPDLRERLENLRKKPENIPQPISNTSRANLNKLLTDYTEMKKAILHVYWEEFQKDPVGLMSRVAQPASKKIDQNKLKPEMDEKGNLTTAGFACSQCGQPLFVYKLEQVSEKGKAYTNYFGRCNVAEHEKLILLAQLKPEKDSDEAVTYSLGKFGQRALDFYSIHVTKESTHPVKPLAQIAGNRYASPVGKALSDACMGTIASFLSKYQDIIIEHQKVVKGNQKRLESLRELAGKENLEYPSVTLPPQPHTKEGVDAYNEVIARVRMWVNLNLWQKLKLSRDDAKPLLRLKGFPSFPLVERQANEVDWWDMVCNVKKLINEKKEDGKVFWQNLAGYKRQEALRPYLSSEEDRKKGKKFARYQLGDLLLHLEKKHEGEDWGKVYDEAWERIDKKVEGLSKHIKLEEERRSEDAQSKAALTDWLRAKASFVIEGLKEADKDEFCRCELKLQKWYGDLRGKPFAIEAENSILDISGFSKQYNCAFIWQKDGVKKLNLYLIINYFKGGKLRFKKIKPEAFEANRFYTVINKKSGEIVIMEVNFNFDDPNLIILPLAFGKRQGREFIWNDLLSLETGSLKLANGRVIEKTLYNRRTRQDEPALFVALTFERREVLDSSNIKPMNLIGVDRGENIPAVIALTDPEGCPLSRFKDSLGNPTHILRIGESYKEKQRTIQAKKEVEQRRAGGYSRKYASKAKNLADDMVRNTARDLLYYAVTQDAMLIFENLSRGFGRQGKRTFMAERQYTRMEDWLTAKLAYEGLPSKTYLSKTLAQYTSKTCSNCGFTITSADYDRVLEKLKKTATGWMTTINGKELKVEGQITYYNRYKRQNVVKDLSVELDRLSEESVNNDISSWTKGRSGEALSLLKKRFSHRPVQEKFVCLNCGFETHADEQAALNIARSWLFLRSQEYKKYQTNKTTGNTDKRAFVETWQSFYRKKLKEVWKPAV

SEQ ID NO: 44736 - protein, 978 aa, synthetic construct
  REGION 1..978: note = engineered CasX variant
QEIKRINKIRRRLVKDSNTKKAGKTGPMKTLLVRVMTPDLRERLENLRKKPENIPQPISNTSRANLNKLLTDYTEMKKAILHVYWEEFQKDPVGLMSRVAQPASKKIDQNKLKPEMDEKGNLTTAGFACSQCGQPLFVYKLEQVSEKGKAYTNYFGRCNVAEHEKLILLAQLKPEKDSDEAVTYSLGKFGQRALDFYSIHVTKESTHPVKPLAQIAGNRYASYPVGKALSGACMGTIASFLSKYQDIIIEHQKVVKGNQKRLESLRELAGKENLEYPSVTLPPQPHTKEGVDAYNEVIARVRMWVNLNLWQKLKLSRDDAKPLLRLKGFPSFPLVERQANEVDWWDMVCNVKKLINEKKEDGKVFWQNLAGYKRQEALRPYLSSEEDRKKGKKFARYQLGDLLLHLEKKHGEDWGKVYDEAWERIDKKVEGLSKHIKLEEERRSEDAQSKAALTDWLRAKASFVIEGLKEADKDEFCRCDLKLQKWYGDLRGKPFAIEAENSILDISGFSKQYNCAFIWQKDGVKKLNLYLIINYFKGGKLRFKKIKPEAFEANRFYTVINKKSGEIVPMEVNFNFDDPNLIILPLAFGKRQGREFIWNDLLSLETGSLKLANGRVIEKTLYNRRTRQDEPALFVALTFERREVLDSSNIKPMNLIGVDRGENIPAVIALTDPEGCPLSRFKDSLGNPTHILRIGESYKEKQRTIQAKKEVEQRRAGGYSRKYASKAKNLADDMVRNTARDLLYYAVTQDAMLIFENLSRGFGRQGKRTFMAERQYTRMEDWLTAKLAYEGLPSKTYLSKTLAQYTSKTCSNCGFTITSADYDRVLEKLKKTATGWMTTINGKELKVEGQITYYNRYKRQNVVKDLSVELDRLSEESVNNDISSWTKGRSGEALSLLKKRFSHRPVQEKFVCLNCGFETHADEQAALNIARSWLFLRSQEYKKYQTNKTTGNTDKRAFVETWQSFYRKKLKEVWKPAV

SEQ ID NO: 44737 - protein, 978 aa, synthetic construct
  REGION 1..978: note = engineered CasX variant
QEIKRINKIRRRLVKDSNTKKAGKTGPMKTLLVRVMTPDLRERLENLRKKPENIPQPISNTSRANLNKLLTDYTEMKKAILHVYWEEFQKDPVGLMSRVAQPASKKIDQNKLKPEMDEKGNLTTAGFACSQCGQPLFVYKLEQVSEKGKAYTNYFGRCNVAEHEKLILLAQLKPEKDSDEAVTYSLGKFGQRALDFYSIHVTKESTHPVKPLAQIAGNRYASHPVGKALSGACMGTIASFLSKYQDIIIEHQKVVKGNQKRLESLRELAGKENLEYPSVTLPPQPHTKEGVDAYNEVIARVRMWVNLNLWQKLKLSRDDAKPLLRLKGFPSFPLVERQANEVDWWDMVCNVKKLINEKKEDGKVFWQNLAGYKRQEALRPYLSSEEDRKKGKKFARYQLGDLLLHLEKKHGEDWGKVYDEAWERIDKKVEGLSKHIKLEEERRSEDAQSKAALTDWLRAKASFVIEGLKEADKDEFCRCDLKLQKWYGDLRGKPFAIEAENSILDISGFSKQYNCAFIWQKDGVKKLNLYLIINYFKGGKLRFKKIKPEAFEANRFYTVINKKSGEIVPMEVNFNFDDPNLIILPLAFGKRQGREFIWNDLLSLETGSLKLANGRVIEKTLYNRRTRQDEPALFVALTFERREVLDSSNIKPMNLIGVDRGENIPAVIALTDPEGCPLSRFKDSLGNPTHILRIGESYKEKQRTIQAKKEVEQRRAGGYSRKYASKAKNLADDMVRNTARDLLYYAVTQDAMLIFENLSRGFGRQGKRTFMAERQYTRMEDWLTAKLAYEGLPSKTYLSKTLAQYTSKTCSNCGFTITSADYDRVLEKLKKTATGWMTTINGKELKVEGQITYYNRYKRQNVVKDLSVELDRLSEESVNNDISSWTKGRSGEALSLLKKRFSHRPVQEKFVCLNCGFETHADEQAALNIARSWLFLRSQEYKKYQTNKTTGNTDKRAFVETWQSFYRKKLKEVWKPAV

SEQ ID NO: 44738 - protein, 978 aa, synthetic construct
  REGION 1..978: note = engineered CasX variant
QEIKRINKIRRRLVKDSNTKKAGKTGPMKTLLVRVMTPDLRERLENLRKKPENIPQPISNTSRANLNKLLTDYTEMKKAILHVYWEEFQKDPVGLMSRVAQPASKKIDQNKLKPEMDEKGNLTTAGFACSQCGQPLFVYKLEQVSEKGKAYTNYFGRCNVAEHEKLILLAQLKPEKDSDEAVTYSLGKFGQRALDFYSIHVTKESTHPVKPLAQIAGNRYASSPVGKALSGACMGTIASFLSKYQDIIIEHQKVVKGNQKRLESLRELAGKENLEYPSVTLPPQPHTKEGVDAYNEVIARVRMWVNLNLWQKLKLSRDDAKPLLRLKGFPSFPLVERQANEVDWWDMVCNVKKLINEKKEDGKVFWQNLAGYKRQEALRPYLSSEEDRKKGKKFARYQLGDLLLHLEKKHGEDWGKVYDEAWERIDKKVEGLSKHIKLEEERRSEDAQSKAALTDWLRAKASFVIEGLKEADKDEFCRCDLKLQKWYGDLRGKPFAIEAENSILDISGFSKQYNCAFIWQKDGVKKLNLYLIINYFKGGKLRFKKIKPEAFEANRFYTVINKKSGEIVPMEVNFNFDDPNLIILPLAFGKRQGREFIWNDLLSLETGSLKLANGRVIEKTLYNRRTRQDEPALFVALTFERREVLDSSNIKPMNLIGVDRGENIPAVIALTDPEGCPLSRFKDSLGNPTHILRIGESYKEKQRTIQAKKEVEQRRAGGYSRKYASKAKNLADDMVRNTARDLLYYAVTQDAMLIFENLSRGFGRQGKRTFMAERQYTRMEDWLTAKLAYEGLPSKTYLSKTLAQYTSKTCSNCGFTITSADYDRVLEKLKKTATGWMTTINGKELKVEGQITYYNRYKRQNVVKDLSVELDRLSEESVNNDISSWTKGRSGEALSLLKKRFSHRPVQEKFVCLNCGFETHADEQAALNIARSWLFLRSQEYKKYQTNKTTGNTDKRAFVETWQSFYRKKLKEVWKPAV

SEQ ID NO: 44739 - protein, 978 aa, synthetic construct
  REGION 1..978: note = engineered CasX variant
QEIKRINKIRRRLVKDSNTKKAGKTGPMKTLLVRVMTPDLRERLENLRKKPENIPQPISNTSRANLNKLLTDYTEMKKAILHVYWEEFQKDPVGLMSRVAQPASKKIDQNKLKPEMDEKGNLTTAGFACSQCGQPLFVYKLEQVSEKGKAYTNYFGRCNVAEHEKLILLAQLKPEKDSDEAVTYSLGKFGQRALDFYSIHVTKESTHPVKPLAQIAGNRYASTPVGKALSGACMGTIASFLSKYQDIIIEHQKVVKGNQKRLESLRELAGKENLEYPSVTLPPQPHTKEGVDAYNEVIARVRMWVNLNLWQKLKLSRDDAKPLLRLKGFPSFPLVERQANEVDWWDMVCNVKKLINEKKEDGKVFWQNLAGYKRQEALRPYLSSEEDRKKGKKFARYQLGDLLLHLEKKHGEDWGKVYDEAWERIDKKVEGLSKHIKLEEERRSEDAQSKAALTDWLRAKASFVIEGLKEADKDEFCRCDLKLQKWYGDLRGKPFAIEAENSILDISGFSKQYNCAFIWQKDGVKKLNLYLIINYFKGGKLRFKKIKPEAFEANRFYTVINKKSGEIVPMEVNFNFDDPNLIILPLAFGKRQGREFIWNDLLSLETGSLKLANGRVIEKTLYNRRTRQDEPALFVALTFERREVLDSSNIKPMNLIGVDRGENIPAVIALTDPEGCPLSRFKDSLGNPTHILRIGESYKEKQRTIQAKKEVEQRRAGGYSRKYASKAKNLADDMVRNTARDLLYYAVTQDAMLIFENLSRGFGRQGKRTFMAERQYTRMEDWLTAKLAYEGLPSKTYLSKTLAQYTSKTCSNCGFTITSADYDRVLEKLKKTATGWMTTINGKELKVEGQITYYNRYKRQNVVKDLSVELDRLSEESVNNDISSWTKGRSGEALSLLKKRFSHRPVQEKFVCLNCGFETHADEQAALNIARSWLFLRSQEYKKYQTNKTTGNTDKRAFVETWQSFYRKKLKEVWKPAV

SEQ ID NO: 44740 - protein, 978 aa, synthetic construct
  REGION 1..978: note = engineered CasX variant
QEIKRINKIRRRLVKDSNTKKAGKTGPMKTLLVRVMTPDLRERLENLRKKPENIPQPISNTSRANLNKLLTDYTEMKKAILHVYWEEFQKDPVGLMSRVAQPASKKIDQNKLKPEMDEKGNLTTAGFACSQCGQPLFVYKLEQVSEKGKAYTNYFGRCNVAEHEKLILLAQLKPEKDSDEAVTYSLGKFGQRALDFYSIHVTKESTHPVKPLAQIAGNRYASAPVGKALSGACMGTIASFLSKYQDIIIEHQKVVKGNQKRLESLRELAGKENLEYPSVTLPPQPHTKEGVDAYNEVIARVRMWVNLNLWQKLKLSRDDAKPLLRLKGFPSFPLVERQANEVDWWDMVCNVKKLINEKKEDGKVFWQNLAGYKRQEALRPYLSSEEDRKKGKKFARYQLGDLLLHLEKKHGEDWGKVYDEAWERIDKKVEGLSKHIKLEEERRSEDAQSKAALTDWLRAKASFVIEGLKEADKDEFCRCDLKLQKWYGDLRGKPFAIEAENSILDISGFSKQYNCAFIWQKDGVKKLNLYLIINYFKGGKLRFKKIKPEAFEANRFYTVINKKSGEIVPMEVNFNFDDPNLIILPLAFGKRQGREFIWNDLLSLETGSLKLANGRVIEKTLYNRRTRQDEPALFVALTFERREVLDSSNIKPMNLIGVDRGENIPAVIALTDPEGCPLSRFKDSLGNPTHILRIGESYKEKQRTIQAKKEVEQRRAGGYSRKYASKAKNLADDMVRNTARDLLYYAVTQDAMLIFENLSRGFGRQGKRTFMAERQYTRMEDWLTAKLAYEGLPSKTYLSKTLAQYTSKTCSNCGFTITSADYDRVLEKLKKTATGWMTTINGKELKVEGQITYYNRYKRQNVVKDLSVELDRLSEESVNNDISSWTKGRSGEALSLLKKRFSHRPVQEKFVCLNCGFETHADEQAALNIARSWLFLRSQEYKKYQTNKTTGNTDKRAFVETWQSFYRKKLKEVWKPAV

SEQ ID NO: 44741 - protein, 978 aa, synthetic construct
  REGION 1..978: note = engineered CasX variant
QEIKRINKIRRRLVKDSNTKKAGKTGPMKTLLVRVMTPDLRERLENLRKKPENIPQPISNTSRANLNKLLTDYTEMKKAILHVYWEEFQKDPVGLMSRVAQPASKKIDQNKLKPEMDEKGNLTTAGFACSQCGQPLFVYKLEQVSEKGKAYTNYFGRCNVAEHEKLILLAQLKPEKDSDEAVTYSLGKFGQRALDFYSIHVTKESTHPVKPLAQIAGNRYASVPVGKALSGACMGTIASFLSKYQDIIIEHQKVVKGNQKRLESLRELAGKENLEYPSVTLPPQPHTKEGVDAYNEVIARVRMWVNLNLWQKLKLSRDDAKPLLRLKGFPSFPLVERQANEVDWWDMVCNVKKLINEKKEDGKVFWQNLAGYKRQEALRPYLSSEEDRKKGKKFARYQLGDLLLHLEKKHGEDWGKVYDEAWERIDKKVEGLSKHIKLEEERRSEDAQSKAALTDWLRAKASFVIEGLKEADKDEFCRCDLKLQKWYGDLRGKPFAIEAENSILDISGFSKQYNCAFIWQKDGVKKLNLYLIINYFKGGKLRFKKIKPEAFEANRFYTVINKKSGEIVPMEVNFNFDDPNLIILPLAFGKRQGREFIWNDLLSLETGSLKLANGRVIEKTLYNRRTRQDEPALFVALTFERREVLDSSNIKPMNLIGVDRGENIPAVIALTDPEGCPLSRFKDSLGNPTHILRIGESYKEKQRTIQAKKEVEQRRAGGYSRKYASKAKNLADDMVRNTARDLLYYAVTQDAMLIFENLSRGFGRQGKRTFMAERQYTRMEDWLTAKLAYEGLPSKTYLSKTLAQYTSKTCSNCGFTITSADYDRVLEKLKKTATGWMTTINGKELKVEGQITYYNRYKRQNVVKDLSVELDRLSEESVNNDISSWTKGRSGEALSLLKKRFSHRPVQEKFVCLNCGFETHADEQAALNIARSWLFLRSQEYKKYQTNKTTGNTDKRAFVETWQSFYRKKLKEVWKPAV

SEQ ID NO: 44742 - protein, 978 aa, synthetic construct
  REGION 1..978: note = engineered CasX variant
QEIKRINKIRRRLVKDSNTKKAGKTGPMKTLLVRVMTPDLRERLENLRKKPENIPQPISNTSRANLNKLLTDYTEMKKAILHVYWEEFQKDPVGLMSRVAQPASKKIDQNKLKPEMDEKGNLTTAGFACSQCGQPLFVYKLEQVSEKGKAYTNYFGRCNVAEHEKLIKLAQLKPEKDSDEAVTYSLGKFGQRALDFYSIHVTKESTHPVKPLAQIAGNRYASGPVGKALSGACMGTIASFLSKYQDIIIEHQKVVKGNQKRLESLRELAGKENLEYPSVTLPPQPHTKEGVDAYNEVIARVRMWVNLNLWQKLKLSRDDAKPLLRLKGFPSFPLVERQANEVDWWDMVCNVKKLINEKKEDGKVFWQNLAGYKRQEALRPYLSSEEDRKKGKKFARYQLGDLLLHLEKKHGEDWGKVYDEAWERIDKKVEGLSKHIKLEEERRSEDAQSKAALTDWLRAKASFVIEGLKEADKDEFCRCDLKLQKWYGDLRGKPFAIEAENSILDISGFSKQYNCAFIWQKDGVKKLNLYLIINYFKGGKLRFKKIKPEAFEANRFYTVINKKSGEIVPMEVNFNFDDPNLIILPLAFGKRQGREFIWNDLLSLETGSLKLANGRVIEKTLYNRRTRQDEPALFVALTFERREVLDSSNIKPMNLIGVDRGENIPAVIALTDPEGCPLSRFKDSLGNPTHILRIGESYKEKQRTIQAKKEVEQRRAGGYSRKYASKAKNLADDMVRNTARDLLYYAVTQDAMLIFENLSRGFGRQGKRTFMAERQYTRMEDWLTAKLAYEGLPSKTYLSKTLAQYTSKTCSNCGFTITSADYDRVLEKLKKTATGWMTTINGKELKVEGQITYYNRYKRQNVVKDLSVELDRLSEESVNNDISSWTKGRSGEALSLLKKRFSHRPVQEKFVCLNCGFETHADEQAALNIARSWLFLRSQEYKKYQTNKTTGNTDKRAFVETWQSFYRKKLKEVWKPAV

SEQ ID NO: 44743 - protein, 977 aa, synthetic construct
  REGION 1..977: note = engineered CasX variant
QEIKRINKIRRRLVKDSNTKKAGKTGPMKTLLVRVMTPDLRERLENLRKKPENIPQPISNTSRANLNKLLTDYTEMKKAILHVYWEEFQKDPVGLMSRVAQPASKKIDQNKLKPEMDEKGNLTTAGFACSQCGQPLFVYKLEQVSEKGKAYTNYFGRCNVAEHEKLILLAQLKPEKDSDEAVTYSLGKFGQRALDFYSIHVTKESTHPVKPLAQIAGNRYASPVGKALSGACMGTIASFLSKYQDIIIEHQKVVKGNQKRLESLRELAGKENLEYPSVTLPPQPHTKEGVDAYNEVIARVRMWVNLNLWQKLKLSRDDAKPLLRLKGFPSFPLVERQANEVDWWDMVCNVKKLINEKKEDGKVFWQNLAGYKRQEALRPYLSSEEDRKKGKKFARYQLGDLLLHLEKKHGEDWGKVYDEAWERIDKKVEGLSKHIKLEEERRSEDAQSKAALTDWLRAKASFVIEGLKEADKDEFCRCDLKLQKWYGDLRGKPFAIEAENSILDISGFSKQYNCAFIWQKDGVKKLNLYLIINYFKGGKLRFKKIKPEAFEANRFYTVINKKSGEIVPMEVNFNFDDPNLIILPLAFGKRQGREFIWNDLLSLETGSLKLANGRVIEKTLYNRRTRQDEPALFVALTFERREVLDSSNIKPMNLIGVDRGENIPAVIALTDPEGCPLSRFKDSLGNPTHILRIGESYKEKQRTIQAKKEVEQRRAGGYSRKYASKAKNLADDMVRNTARDLLYYAVTQDAMLIFENLSRGFGRQGKRTFMAERQYTRMEDWLTAKLAYEGLPSKTYLSKTLAQYTSKTCSNCGFTITSADYDRVLEKLKKTATGWMTTINGKELKVEGQITYYNRYKRQNVVKDLSVELDRLSEESVNNDISSWTKGRSGEALSLLKKRFSHRPVQEKFVCLNCGFETHADEQAALNIARSWLFLRSQEYKKYQTNKTTGNTDKRAFVETWQSFYRKKLKEVWKPAV

SEQ ID NO: 44744 - protein, 978 aa, synthetic construct
  REGION 1..978: note = engineered CasX variant
QEIKRINKIRRRLVKDSNTKKAGKTGPMKTLLVRVMTPDLRERLENLRKKPENIPQPISNTSRANLNKLLTDYTEMKKAILHVYWEEFQKDPVGLMSRVAQPASKKIDQNKLKPEMDEKGNLTTAGFACSQCGQPLFVYKLEQVSEKGKAYTNYFGRCNVAEHEKLILLAQLKPEKDSDEAVTYSLGKFGQRALDFYSIHVTKESTHPVKPLAQIAGNRYASYPVGKALSDACMGTIASFLSKYQDIIIEHQKVVKGNQKRLESLRELAGKENLEYPSVTLPPQPHTKEGVDAYNEVIARVRMWVNLNLWQKLKLSRDDAKPLLRLKNFPSFPLVERQANEVDWWDMVCNVKKLINEKKEDGKVFWQNLAGYKRQEALRPYLSSEEDRKKGKKFARYQLGDLLLHLEKKHGEDWGKVYDEAWERIDKKVEGLSKHIKLEEERRSEDAQSKAALTDWLRAKASFVIEGLKEADKDEFCRCDLKLQKWYGDLRGKPFAIEAENSILDISGFSKQYNCAFIWQKDGVKKLNLYLIINYFKGGKLRFKKIKPEAFEANRFYTVINKKSGEIVPMEVNFNFDDPNLIILPLAFGKRQGREFIWNDLLSLETGSLKLANGRVIEKTLYNRRTRQDEPALFVALTFERREVLDSSNIKPMNLIGVDRGENIPAVIALTDPEGCPLSRFKDSLGNPTHILRIGESYKEKQRTIQAKKEVEQRRAGGYSRKYASKAKNLADDMVRNTARDLLYYAVTQDAMLIFENLSRGFGRQGKRTFMAERQYTRMEDWLTAKLAYEGLPSKTYLSKTLAQYTSKTCSNCGFTITSADYDRVLEKLKKTATGWMTTINGKELKVEGQITYYNRYKRQNVVKDLSVELDRLSEESVNNDISSWTKGRSGEALSLLKKRFSHRPVQEKFVCLNCGFETHADEQAALNIARSWLFLRSQEYKKYQTNKTTGNTDKRAFVETWQSFYRKKLKEVWKPAV

SEQ ID NO: 44745 - protein, 978 aa, synthetic construct
  REGION 1..978: note = engineered CasX variant
QEIKRINKIRRRLVKDSNTKKAGKTGPMKTLLVRVMTPDLRERLENLRKKPENIPQPISNTSRANLNKLLTDYTEMKKAILHVYWEEFQKDPVGLMSRVAQPASKKIDQNKLKPEMDEKGNLTTAGFACSQCGQPLFVYKLEQVSEKGKAYTNYFGRCNVAEHEKLILLAQLKPEKDSDEAVTYSLGKFGQRALDFYSIHVTKESTHPVKPLAQIAGNRYASHPVGKALSDACMGTIASFLSKYQDIIIEHQKVVKGNQKRLESLRELAGKENLEYPSVTLPPQPHTKEGVDAYNEVIARVRMWVNLNLWQKLKLSRDDAKPLLRLKNFPSFPLVERQANEVDWWDMVCNVKKLINEKKEDGKVFWQNLAGYKRQEALRPYLSSEEDRKKGKKFARYQLGDLLLHLEKKHGEDWGKVYDEAWERIDKKVEGLSKHIKLEEERRSEDAQSKAALTDWLRAKASFVIEGLKEADKDEFCRCDLKLQKWYGDLRGKPFAIEAENSILDISGFSKQYNCAFIWQKDGVKKLNLYLIINYFKGGKLRFKKIKPEAFEANRFYTVINKKSGEIVPMEVNFNFDDPNLIILPLAFGKRQGREFIWNDLLSLETGSLKLANGRVIEKTLYNRRTRQDEPALFVALTFERREVLDSSNIKPMNLIGVDRGENIPAVIALTDPEGCPLSRFKDSLGNPTHILRIGESYKEKQRTIQAKKEVEQRRAGGYSRKYASKAKNLADDMVRNTARDLLYYAVTQDAMLIFENLSRGFGRQGKRTFMAERQYTRMEDWLTAKLAYEGLPSKTYLSKTLAQYTSKTCSNCGFTITSADYDRVLEKLKKTATGWMTTINGKELKVEGQITYYNRYKRQNVVKDLSVELDRLSEESVNNDISSWTKGRSGEALSLLKKRFSHRPVQEKFVCLNCGFETHADEQAALNIARSWLFLRSQEYKKYQTNKTTGNTDKRAFVETWQSFYRKKLKEVWKPAV

SEQ ID NO: 44746 - protein, 978 aa, synthetic construct
  REGION 1..978: note = engineered CasX variant
QEIKRINKIRRRLVKDSNTKKAGKTGPMKTLLVRVMTPDLRERLENLRKKPENIPQPISNTSRANLNKLLTDYTEMKKAILHVYWEEFQKDPVGLMSRVAQPASKKIDQNKLKPEMDEKGNLTTAGFACSQCGQPLFVYKLEQVSEKGKAYTNYFGRCNVAEHEKLILLAQLKPEKDSDEAVTYSLGKFGQRALDFYSIHVTKESTHPVKPLAQIAGNRYASSPVGKALSDACMGTIASFLSKYQDIIIEHQKVVKGNQKRLESLRELAGKENLEYPSVTLPPQPHTKEGVDAYNEVIARVRMWVNLNLWQKLKLSRDDAKPLLRLKNFPSFPLVERQANEVDWWDMVCNVKKLINEKKEDGKVFWQNLAGYKRQEALRPYLSSEEDRKKGKKFARYQLGDLLLHLEKKHGEDWGKVYDEAWERIDKKVEGLSKHIKLEEERRSEDAQSKAALTDWLRAKASFVIEGLKEADKDEFCRCDLKLQKWYGDLRGKPFAIEAENSILDISGFSKQYNCAFIWQKDGVKKLNLYLIINYFKGGKLRFKKIKPEAFEANRFYTVINKKSGEIVPMEVNFNFDDPNLIILPLAFGKRQGREFIWNDLLSLETGSLKLANGRVIEKTLYNRRTRQDEPALFVALTFERREVLDSSNIKPMNLIGVDRGENIPAVIALTDPEGCPLSRFKDSLGNPTHILRIGESYKEKQRTIQAKKEVEQRRAGGYSRKYASKAKNLADDMVRNTARDLLYYAVTQDAMLIFENLSRGFGRQGKRTFMAERQYTRMEDWLTAKLAYEGLPSKTYLSKTLAQYTSKTCSNCGFTITSADYDRVLEKLKKTATGWMTTINGKELKVEGQITYYNRYKRQNVVKDLSVELDRLSEESVNNDISSWTKGRSGEALSLLKKRFSHRPVQEKFVCLNCGFETHADEQAALNIARSWLFLRSQEYKKYQTNKTTGNTDKRAFVETWQSFYRKKLKEVWKPAV

SEQ ID NO: 44747 - protein, 978 aa, synthetic construct
  REGION 1..978: note = engineered CasX variant
QEIKRINKIRRRLVKDSNTKKAGKTGPMKTLLVRVMTPDLRERLENLRKKPENIPQPISNTSRANLNKLLTDYTEMKKAILHVYWEEFQKDPVGLMSRVAQPASKKIDQNKLKPEMDEKGNLTTAGFACSQCGQPLFVYKLEQVSEKGKAYTNYFGRCNVAEHEKLILLAQLKPEKDSDEAVTYSLGKFGQRALDFYSIHVTKESTHPVKPLAQIAGNRYASTPVGKALSDACMGTIASFLSKYQDIIIEHQKVVKGNQKRLESLRELAGKENLEYPSVTLPPQPHTKEGVDAYNEVIARVRMWVNLNLWQKLKLSRDDAKPLLRLKNFPSFPLVERQANEVDWWDMVCNVKKLINEKKEDGKVFWQNLAGYKRQEALRPYLSSEEDRKKGKKFARYQLGDLLLHLEKKHGEDWGKVYDEAWERIDKKVEGLSKHIKLEEERRSEDAQSKAALTDWLRAKASFVIEGLKEADKDEFCRCDLKLQKWYGDLRGKPFAIEAENSILDISGFSKQYNCAFIWQKDGVKKLNLYLIINYFKGGKLRFKKIKPEAFEANRFYTVINKKSGEIVPMEVNFNFDDPNLIILPLAFGKRQGREFIWNDLLSLETGSLKLANGRVIEKTLYNRRTRQDEPALFVALTFERREVLDSSNIKPMNLIGVDRGENIPAVIALTDPEGCPLSRFKDSLGNPTHILRIGESYKEKQRTIQAKKEVEQRRAGGYSRKYASKAKNLADDMVRNTARDLLYYAVTQDAMLIFENLSRGFGRQGKRTFMAERQYTRMEDWLTAKLAYEGLPSKTYLSKTLAQYTSKTCSNCGFTITSADYDRVLEKLKKTATGWMTTINGKELKVEGQITYYNRYKRQNVVKDLSVELDRLSEESVNNDISSWTKGRSGEALSLLKKRFSHRPVQEKFVCLNCGFETHADEQAALNIARSWLFLRSQEYKKYQTNKTTGNTDKRAFVETWQSFYRKKLKEVWKPAV

SEQ ID NO: 44748 - protein, 978 aa, synthetic construct
  REGION 1..978: note = engineered CasX variant
QEIKRINKIRRRLVKDSNTKKAGKTGPMKTLLVRVMTPDLRERLENLRKKPENIPQPISNTSRANLNKLLTDYTEMKKAILHVYWEEFQKDPVGLMSRVAQPASKKIDQNKLKPEMDEKGNLTTAGFACSQCGQPLFVYKLEQVSEKGKAYTNYFGRCNVAEHEKLILLAQLKPEKDSDEAVTYSLGKFGQRALDFYSIHVTKESTHPVKPLAQIAGNRYASAPVGKALSDACMGTIASFLSKYQDIIIEHQKVVKGNQKRLESLRELAGKENLEYPSVTLPPQPHTKEGVDAYNEVIARVRMWVNLNLWQKLKLSRDDAKPLLRLKNFPSFPLVERQANEVDWWDMVCNVKKLINEKKEDGKVFWQNLAGYKRQEALRPYLSSEEDRKKGKKFARYQLGDLLLHLEKKHGEDWGKVYDEAWERIDKKVEGLSKHIKLEEERRSEDAQSKAALTDWLRAKASFVIEGLKEADKDEFCRCDLKLQKWYGDLRGKPFAIEAENSILDISGFSKQYNCAFIWQKDGVKKLNLYLIINYFKGGKLRFKKIKPEAFEANRFYTVINKKSGEIVPMEVNFNFDDPNLIILPLAFGKRQGREFIWNDLLSLETGSLKLANGRVIEKTLYNRRTRQDEPALFVALTFERREVLDSSNIKPMNLIGVDRGENIPAVIALTDPEGCPLSRFKDSLGNPTHILRIGESYKEKQRTIQAKKEVEQRRAGGYSRKYASKAKNLADDMVRNTARDLLYYAVTQDAMLIFENLSRGFGRQGKRTFMAERQYTRMEDWLTAKLAYEGLPSKTYLSKTLAQYTSKTCSNCGFTITSADYDRVLEKLKKTATGWMTTINGKELKVEGQITYYNRYKRQNVVKDLSVELDRLSEESVNNDISSWTKGRSGEALSLLKKRFSHRPVQEKFVCLNCGFETHADEQAALNIARSWLFLRSQEYKKYQTNKTTGNTDKRAFVETWQSFYRKKLKEVWKPAV

SEQ ID NO: 44749 - protein, 978 aa, synthetic construct
  REGION 1..978: note = engineered CasX variant
QEIKRINKIRRRLVKDSNTKKAGKTGPMKTLLVRVMTPDLRERLENLRKKPENIPQPISNTSRANLNKLLTDYTEMKKAILHVYWEEFQKDPVGLMSRVAQPASKKIDQNKLKPEMDEKGNLTTAGFACSQCGQPLFVYKLEQVSEKGKAYTNYFGRCNVAEHEKLILLAQLKPEKDSDEAVTYSLGKFGQRALDFYSIHVTKESTHPVKPLAQIAGNRYASVPVGKALSDACMGTIASFLSKYQDIIIEHQKVVKGNQKRLESLRELAGKENLEYPSVTLPPQPHTKEGVDAYNEVIARVRMWVNLNLWQKLKLSRDDAKPLLRLKNFPSFPLVERQANEVDWWDMVCNVKKLINEKKEDGKVFWQNLAGYKRQEALRPYLSSEEDRKKGKKFARYQLGDLLLHLEKKHGEDWGKVYDEAWERIDKKVEGLSKHIKLEEERRSEDAQSKAALTDWLRAKASFVIEGLKEADKDEFCRCDLKLQKWYGDLRGKPFAIEAENSILDISGFSKQYNCAFIWQKDGVKKLNLYLIINYFKGGKLRFKKIKPEAFEANRFYTVINKKSGEIVPMEVNFNFDDPNLIILPLAFGKRQGREFIWNDLLSLETGSLKLANGRVIEKTLYNRRTRQDEPALFVALTFERREVLDSSNIKPMNLIGVDRGENIPAVIALTDPEGCPLSRFKDSLGNPTHILRIGESYKEKQRTIQAKKEVEQRRAGGYSRKYASKAKNLADDMVRNTARDLLYYAVTQDAMLIFENLSRGFGRQGKRTFMAERQYTRMEDWLTAKLAYEGLPSKTYLSKTLAQYTSKTCSNCGFTITSADYDRVLEKLKKTATGWMTTINGKELKVEGQITYYNRYKRQNVVKDLSVELDRLSEESVNNDISSWTKGRSGEALSLLKKRFSHRPVQEKFVCLNCGFETHADEQAALNIARSWLFLRSQEYKKYQTNKTTGNTDKRAFVETWQSFYRKKLKEVWKPAV

SEQ ID NO: 44750 - protein, 978 aa, synthetic construct
  REGION 1..978: note = engineered CasX variant
QEIKRINKIRRRLVKDSNTKKAGKTGPMKTLLVRVMTPDLRERLENLRKKPENIPQPISNTSRANLNKLLTDYTEMKKAILHVYWEEFQKDPVGLMSRVAQPASKKIDQNKLKPEMDEKGNLTTAGFACSQCGQPLFVYKLEQVSEKGKAYTNYFGRCNVAEHEKLIKLAQLKPEKDSDEAVTYSLGKFGQRALDFYSIHVTKESTHPVKPLAQIAGNRYASGPVGKALSDACMGTIASFLSKYQDIIIEHQKVVKGNQKRLESLRELAGKENLEYPSVTLPPQPHTKEGVDAYNEVIARVRMWVNLNLWQKLKLSRDDAKPLLRLKNFPSFPLVERQANEVDWWDMVCNVKKLINEKKEDGKVFWQNLAGYKRQEALRPYLSSEEDRKKGKKFARYQLGDLLLHLEKKHGEDWGKVYDEAWERIDKKVEGLSKHIKLEEERRSEDAQSKAALTDWLRAKASFVIEGLKEADKDEFCRCDLKLQKWYGDLRGKPFAIEAENSILDISGFSKQYNCAFIWQKDGVKKLNLYLIINYFKGGKLRFKKIKPEAFEANRFYTVINKKSGEIVPMEVNFNFDDPNLIILPLAFGKRQGREFIWNDLLSLETGSLKLANGRVIEKTLYNRRTRQDEPALFVALTFERREVLDSSNIKPMNLIGVDRGENIPAVIALTDPEGCPLSRFKDSLGNPTHILRIGESYKEKQRTIQAKKEVEQRRAGGYSRKYASKAKNLADDMVRNTARDLLYYAVTQDAMLIFENLSRGFGRQGKRTFMAERQYTRMEDWLTAKLAYEGLPSKTYLSKTLAQYTSKTCSNCGFTITSADYDRVLEKLKKTATGWMTTINGKELKVEGQITYYNRYKRQNVVKDLSVELDRLSEESVNNDISSWTKGRSGEALSLLKKRFSHRPVQEKFVCLNCGFETHADEQAALNIARSWLFLRSQEYKKYQTNKTTGNTDKRAFVETWQSFYRKKLKEVWKPAV

SEQ ID NO: 44751 - protein, 977 aa, synthetic construct
  REGION 1..977: note = engineered CasX variant
QEIKRINKIRRRLVKDSNTKKAGKTGPMKTLLVRVMTPDLRERLENLRKKPENIPQPISNTSRANLNKLLTDYTEMKKAILHVYWEEFQKDPVGLMSRVAQPASKKIDQNKLKPEMDEKGNLTTAGFACSQCGQPLFVYKLEQVSEKGKAYTNYFGRCNVAEHEKLILLAQLKPEKDSDEAVTYSLGKFGQRALDFYSIHVTKESTHPVKPLAQIAGNRYASPVGKALSDACMGTIASFLSKYQDIIIEHQKVVKGNQKRLESLRELAGKENLEYPSVTLPPQPHTKEGVDAYNEVIARVRMWVNLNLWQKLKLSRDDAKPLLRLKNFPSFPLVERQANEVDWWDMVCNVKKLINEKKEDGKVFWQNLAGYKRQEALRPYLSSEEDRKKGKKFARYQLGDLLLHLEKKHGEDWGKVYDEAWERIDKKVEGLSKHIKLEEERRSEDAQSKAALTDWLRAKASFVIEGLKEADKDEFCRCDLKLQKWYGDLRGKPFAIEAENSILDISGFSKQYNCAFIWQKDGVKKLNLYLIINYFKGGKLRFKKIKPEAFEANRFYTVINKKSGEIVPMEVNFNFDDPNLIILPLAFGKRQGREFIWNDLLSLETGSLKLANGRVIEKTLYNRRTRQDEPALFVALTFERREVLDSSNIKPMNLIGVDRGENIPAVIALTDPEGCPLSRFKDSLGNPTHILRIGESYKEKQRTIQAKKEVEQRRAGGYSRKYASKAKNLADDMVRNTARDLLYYAVTQDAMLIFENLSRGFGRQGKRTFMAERQYTRMEDWLTAKLAYEGLPSKTYLSKTLAQYTSKTCSNCGFTITSADYDRVLEKLKKTATGWMTTINGKELKVEGQITYYNRYKRQNVVKDLSVELDRLSEESVNNDISSWTKGRSGEALSLLKKRFSHRPVQEKFVCLNCGFETHADEQAALNIARSWLFLRSQEYKKYQTNKTTGNTDKRAFVETWQSFYRKKLKEVWKPAV

SEQ ID NO: 44752 - protein, 978 aa, synthetic construct
  REGION 1..978: note = engineered CasX variant
QEIKRINKIRRRLVKDSNTKKAGKTGPMKTLLVRVMTPDLRERLENLRKKPENIPQPISNTSRANLNKLLTDYTEMKKAILHVYWEEFQKDPVGLMSRVAQPASKKIDQNKLKPEMDEKGNLTTAGFACSQCGQPLFVYKLEQVSEKGKAYTNYFGRCNVAEHEKLILLAQLKPEKDSDEAVTYSLGKFGQRALDFYSIHVTKESTHPVKPLAQIAGNRYASYPVGKALSDACMGTIASFLSKYQDIIIEHQKVVKGNQKRLESLRELAGKENLEYPSVTLPPQPHTKEGVDAYNEVIARVRMWVNLNLWQKLKLSRDDAKPLLRLKGFPSFPLVERQANEVDWWDMVCNVKKLINEKKEDGKVFWQNLAGYKRQEALRPYLSSEEDRKKGKKFARYQLGDLLNHLEKKHGEDWGKVYDEAWERIDKKVEGLSKHIKLEEERRSEDAQSKAALTDWLRAKASFVIEGLKEADKDEFCRCDLKLQKWYGDLRGKPFAIEAENSILDISGFSKQYNCAFIWQKDGVKKLNLYLIINYFKGGKLRFKKIKPEAFEANRFYTVINKKSGEIVPMEVNFNFDDPNLIILPLAFGKRQGREFIWNDLLSLETGSLKLANGRVIEKTLYNRRTRQDEPALFVALTFERREVLDSSNIKPMNLIGVDRGENIPAVIALTDPEGCPLSRFKDSLGNPTHILRIGESYKEKQRTIQAKKEVEQRRAGGYSRKYASKAKNLADDMVRNTARDLLYYAVTQDAMLIFENLSRGFGRQGKRTFMAERQYTRMEDWLTAKLAYEGLPSKTYLSKTLAQYTSKTCSNCGFTITSADYDRVLEKLKKTATGWMTTINGKELKVEGQITYYNRYKRQNVVKDLSVELDRLSEESVNNDISSWTKGRSGEALSLLKKRFSHRPVQEKFVCLNCGFETHADEQAALNIARSWLFLRSQEYKKYQTNKTTGNTDKRAFVETWQSFYRKKLKEVWKPAV

SEQ ID NO: 44753 - protein, 978 aa, synthetic construct
  REGION 1..978: note = engineered CasX variant
QEIKRINKIRRRLVKDSNTKKAGKTGPMKTLLVRVMTPDLRERLENLRKKPENIPQPISNTSRANLNKLLTDYTEMKKAILHVYWEEFQKDPVGLMSRVAQPASKKIDQNKLKPEMDEKGNLTTAGFACSQCGQPLFVYKLEQVSEKGKAYTNYFGRCNVAEHEKLILLAQLKPEKDSDEAVTYSLGKFGQRALDFYSIHVTKESTHPVKPLAQIAGNRYASHPVGKALSDACMGTIASFLSKYQDIIIEHQKVVKGNQKRLESLRELAGKENLEYPSVTLPPQPHTKEGVDAYNEVIARVRMWVNLNLWQKLKLSRDDAKPLLRLKGFPSFPLVERQANEVDWWDMVCNVKKLINEKKEDGKVFWQNLAGYKRQEALRPYLSSEEDRKKGKKFARYQLGDLLNHLEKKHGEDWGKVYDEAWERIDKKVEGLSKHIKLEEERRSEDAQSKAALTDWLRAKASFVIEGLKEADKDEFCRCDLKLQKWYGDLRGKPFAIEAENSILDISGFSKQYNCAFIWQKDGVKKLNLYLIINYFKGGKLRFKKIKPEAFEANRFYTVINKKSGEIVPMEVNFNFDDPNLIILPLAFGKRQGREFIWNDLLSLETGSLKLANGRVIEKTLYNRRTRQDEPALFVALTFERREVLDSSNIKPMNLIGVDRGENIPAVIALTDPEGCPLSRFKDSLGNPTHILRIGESYKEKQRTIQAKKEVEQRRAGGYSRKYASKAKNLADDMVRNTARDLLYYAVTQDAMLIFENLSRGFGRQGKRTFMAERQYTRMEDWLTAKLAYEGLPSKTYLSKTLAQYTSKTCSNCGFTITSADYDRVLEKLKKTATGWMTTINGKELKVEGQITYYNRYKRQNVVKDLSVELDRLSEESVNNDISSWTKGRSGEALSLLKKRFSHRPVQEKFVCLNCGFETHADEQAALNIARSWLFLRSQEYKKYQTNKTTGNTDKRAFVETWQSFYRKKLKEVWKPAV

SEQ ID NO: 44754 - protein, 978 aa, synthetic construct
  REGION 1..978: note = engineered CasX variant
QEIKRINKIRRRLVKDSNTKKAGKTGPMKTLLVRVMTPDLRERLENLRKKPENIPQPISNTSRANLNKLLTDYTEMKKAILHVYWEEFQKDPVGLMSRVAQPASKKIDQNKLKPEMDEKGNLTTAGFACSQCGQPLFVYKLEQVSEKGKAYTNYFGRCNVAEHEKLILLAQLKPEKDSDEAVTYSLGKFGQRALDFYSIHVTKESTHPVKPLAQIAGNRYASSPVGKALSDACMGTIASFLSKYQDIIIEHQKVVKGNQKRLESLRELAGKENLEYPSVTLPPQPHTKEGVDAYNEVIARVRMWVNLNLWQKLKLSRDDAKPLLRLKGFPSFPLVERQANEVDWWDMVCNVKKLINEKKEDGKVFWQNLAGYKRQEALRPYLSSEEDRKKGKKFARYQLGDLLNHLEKKHGEDWGKVYDEAWERIDKKVEGLSKHIKLEEERRSEDAQSKAALTDWLRAKASFVIEGLKEADKDEFCRCDLKLQKWYGDLRGKPFAIEAENSILDISGFSKQYNCAFIWQKDGVKKLNLYLIINYFKGGKLRFKKIKPEAFEANRFYTVINKKSGEIVPMEVNFNFDDPNLIILPLAFGKRQGREFIWNDLLSLETGSLKLANGRVIEKTLYNRRTRQDEPALFVALTFERREVLDSSNIKPMNLIGVDRGENIPAVIALTDPEGCPLSRFKDSLGNPTHILRIGESYKEKQRTIQAKKEVEQRRAGGYSRKYASKAKNLADDMVRNTARDLLYYAVTQDAMLIFENLSRGFGRQGKRTFMAERQYTRMEDWLTAKLAYEGLPSKTYLSKTLAQYTSKTCSNCGFTITSADYDRVLEKLKKTATGWMTTINGKELKVEGQITYYNRYKRQNVVKDLSVELDRLSEESVNNDISSWTKGRSGEALSLLKKRFSHRPVQEKFVCLNCGFETHADEQAALNIARSWLFLRSQEYKKYQTNKTTGNTDKRAFVETWQSFYRKKLKEVWKPAV

SEQ ID NO: 44755 - protein, 978 aa, synthetic construct
  REGION 1..978: note = engineered CasX variant
QEIKRINKIRRRLVKDSNTKKAGKTGPMKTLLVRVMTPDLRERLENLRKKPENIPQPISNTSRANLNKLLTDYTEMKKAILHVYWEEFQKDPVGLMSRVAQPASKKIDQNKLKPEMDEKGNLTTAGFACSQCGQPLFVYKLEQVSEKGKAYTNYFGRCNVAEHEKLILLAQLKPEKDSDEAVTYSLGKFGQRALDFYSIHVTKESTHPVKPLAQIAGNRYASTPVGKALSDACMGTIASFLSKYQDIIIEHQKVVKGNQKRLESLRELAGKENLEYPSVTLPPQPHTKEGVDAYNEVIARVRMWVNLNLWQKLKLSRDDAKPLLRLKGFPSFPLVERQANEVDWWDMVCNVKKLINEKKEDGKVFWQNLAGYKRQEALRPYLSSEEDRKKGKKFARYQLGDLLNHLEKKHGEDWGKVYDEAWERIDKKVEGLSKHIKLEEERRSEDAQSKAALTDWLRAKASFVIEGLKEADKDEFCRCDLKLQKWYGDLRGKPFAIEAENSILDISGFSKQYNCAFIWQKDGVKKLNLYLIINYFKGGKLRFKKIKPEAFEANRFYTVINKKSGEIVPMEVNFNFDDPNLIILPLAFGKRQGREFIWNDLLSLETGSLKLANGRVIEKTLYNRRTRQDEPALFVALTFERREVLDSSNIKPMNLIGVDRGENIPAVIALTDPEGCPLSRFKDSLGNPTHILRIGESYKEKQRTIQAKKEVEQRRAGGYSRKYASKAKNLADDMVRNTARDLLYYAVTQDAMLIFENLSRGFGRQGKRTFMAERQYTRMEDWLTAKLAYEGLPSKTYLSKTLAQYTSKTCSNCGFTITSADYDRVLEKLKKTATGWMTTINGKELKVEGQITYYNRYKRQNVVKDLSVELDRLSEESVNNDISSWTKGRSGEALSLLKKRFSHRPVQEKFVCLNCGFETHADEQAALNIARSWLFLRSQEYKKYQTNKTTGNTDKRAFVETWQSFYRKKLKEVWKPAV

SEQ ID NO: 44756 - protein, 978 aa, synthetic construct
  REGION 1..978: note = engineered CasX variant
QEIKRINKIRRRLVKDSNTKKAGKTGPMKTLLVRVMTPDLRERLENLRKKPENIPQPISNTSRANLNKLLTDYTEMKKAILHVYWEEFQKDPVGLMSRVAQPASKKIDQNKLKPEMDEKGNLTTAGFACSQCGQPLFVYKLEQVSEKGKAYTNYFGRCNVAEHEKLILLAQLKPEKDSDEAVTYSLGKFGQRALDFYSIHVTKESTHPVKPLAQIAGNRYASAPVGKALSDACMGTIASFLSKYQDIIIEHQKVVKGNQKRLESLRELAGKENLEYPSVTLPPQPHTKEGVDAYNEVIARVRMWVNLNLWQKLKLSRDDAKPLLRLKGFPSFPLVERQANEVDWWDMVCNVKKLINEKKEDGKVFWQNLAGYKRQEALRPYLSSEEDRKKGKKFARYQLGDLLNHLEKKHGEDWGKVYDEAWERIDKKVEGLSKHIKLEEERRSEDAQSKAALTDWLRAKASFVIEGLKEADKDEFCRCDLKLQKWYGDLRGKPFAIEAENSILDISGFSKQYNCAFIWQKDGVKKLNLYLIINYFKGGKLRFKKIKPEAFEANRFYTVINKKSGEIVPMEVNFNFDDPNLIILPLAFGKRQGREFIWNDLLSLETGSLKLANGRVIEKTLYNRRTRQDEPALFVALTFERREVLDSSNIKPMNLIGVDRGENIPAVIALTDPEGCPLSRFKDSLGNPTHILRIGESYKEKQRTIQAKKEVEQRRAGGYSRKYASKAKNLADDMVRNTARDLLYYAVTQDAMLIFENLSRGFGRQGKRTFMAERQYTRMEDWLTAKLAYEGLPSKTYLSKTLAQYTSKTCSNCGFTITSADYDRVLEKLKKTATGWMTTINGKELKVEGQITYYNRYKRQNVVKDLSVELDRLSEESVNNDISSWTKGRSGEALSLLKKRFSHRPVQEKFVCLNCGFETHADEQAALNIARSWLFLRSQEYKKYQTNKTTGNTDKRAFVETWQSFYRKKLKEVWKPAV

SEQ ID NO: 44757 - protein, 978 aa, synthetic construct
  REGION 1..978: note = engineered CasX variant
QEIKRINKIRRRLVKDSNTKKAGKTGPMKTLLVRVMTPDLRERLENLRKKPENIPQPISNTSRANLNKLLTDYTEMKKAILHVYWEEFQKDPVGLMSRVAQPASKKIDQNKLKPEMDEKGNLTTAGFACSQCGQPLFVYKLEQVSEKGKAYTNYFGRCNVAEHEKLILLAQLKPEKDSDEAVTYSLGKFGQRALDFYSIHVTKESTHPVKPLAQIAGNRYASVPVGKALSDACMGTIASFLSKYQDIIIEHQKVVKGNQKRLESLRELAGKENLEYPSVTLPPQPHTKEGVDAYNEVIARVRMWVNLNLWQKLKLSRDDAKPLLRLKGFPSFPLVERQANEVDWWDMVCNVKKLINEKKEDGKVFWQNLAGYKRQEALRPYLSSEEDRKKGKKFARYQLGDLLNHLEKKHGEDWGKVYDEAWERIDKKVEGLSKHIKLEEERRSEDAQSKAALTDWLRAKASFVIEGLKEADKDEFCRCDLKLQKWYGDLRGKPFAIEAENSILDISGFSKQYNCAFIWQKDGVKKLNLYLIINYFKGGKLRFKKIKPEAFEANRFYTVINKKSGEIVPMEVNFNFDDPNLIILPLAFGKRQGREFIWNDLLSLETGSLKLANGRVIEKTLYNRRTRQDEPALFVALTFERREVLDSSNIKPMNLIGVDRGENIPAVIALTDPEGCPLSRFKDSLGNPTHILRIGESYKEKQRTIQAKKEVEQRRAGGYSRKYASKAKNLADDMVRNTARDLLYYAVTQDAMLIFENLSRGFGRQGKRTFMAERQYTRMEDWLTAKLAYEGLPSKTYLSKTLAQYTSKTCSNCGFTITSADYDRVLEKLKKTATGWMTTINGKELKVEGQITYYNRYKRQNVVKDLSVELDRLSEESVNNDISSWTKGRSGEALSLLKKRFSHRPVQEKFVCLNCGFETHADEQAALNIARSWLFLRSQEYKKYQTNKTTGNTDKRAFVETWQSFYRKKLKEVWKPAV

SEQ ID NO: 44758 - protein, 978 aa, synthetic construct
  REGION 1..978: note = engineered CasX variant
QEIKRINKIRRRLVKDSNTKKAGKTGPMKTLLVRVMTPDLRERLENLRKKPENIPQPISNTSRANLNKLLTDYTEMKKAILHVYWEEFQKDPVGLMSRVAQPASKKIDQNKLKPEMDEKGNLTTAGFACSQCGQPLFVYKLEQVSEKGKAYTNYFGRCNVAEHEKLIKLAQLKPEKDSDEAVTYSLGKFGQRALDFYSIHVTKESTHPVKPLAQIAGNRYASGPVGKALSDACMGTIASFLSKYQDIIIEHQKVVKGNQKRLESLRELAGKENLEYPSVTLPPQPHTKEGVDAYNEVIARVRMWVNLNLWQKLKLSRDDAKPLLRLKGFPSFPLVERQANEVDWWDMVCNVKKLINEKKEDGKVFWQNLAGYKRQEALRPYLSSEEDRKKGKKFARYQLGDLLNHLEKKHGEDWGKVYDEAWERIDKKVEGLSKHIKLEEERRSEDAQSKAALTDWLRAKASFVIEGLKEADKDEFCRCDLKLQKWYGDLRGKPFAIEAENSILDISGFSKQYNCAFIWQKDGVKKLNLYLIINYFKGGKLRFKKIKPEAFEANRFYTVINKKSGEIVPMEVNFNFDDPNLIILPLAFGKRQGREFIWNDLLSLETGSLKLANGRVIEKTLYNRRTRQDEPALFVALTFERREVLDSSNIKPMNLIGVDRGENIPAVIALTDPEGCPLSRFKDSLGNPTHILRIGESYKEKQRTIQAKKEVEQRRAGGYSRKYASKAKNLADDMVRNTARDLLYYAVTQDAMLIFENLSRGFGRQGKRTFMAERQYTRMEDWLTAKLAYEGLPSKTYLSKTLAQYTSKTCSNCGFTITSADYDRVLEKLKKTATGWMTTINGKELKVEGQITYYNRYKRQNVVKDLSVELDRLSEESVNNDISSWTKGRSGEALSLLKKRFSHRPVQEKFVCLNCGFETHADEQAALNIARSWLFLRSQEYKKYQTNKTTGNTDKRAFVETWQSFYRKKLKEVWKPAV

SEQ ID NO: 44759 - protein, 977 aa, synthetic construct
  REGION 1..977: note = engineered CasX variant
QEIKRINKIRRRLVKDSNTKKAGKTGPMKTLLVRVMTPDLRERLENLRKKPENIPQPISNTSRANLNKLLTDYTEMKKAILHVYWEEFQKDPVGLMSRVAQPASKKIDQNKLKPEMDEKGNLTTAGFACSQCGQPLFVYKLEQVSEKGKAYTNYFGRCNVAEHEKLILLAQLKPEKDSDEAVTYSLGKFGQRALDFYSIHVTKESTHPVKPLAQIAGNRYASPVGKALSDACMGTIASFLSKYQDIIIEHQKVVKGNQKRLESLRELAGKENLEYPSVTLPPQPHTKEGVDAYNEVIARVRMWVNLNLWQKLKLSRDDAKPLLRLKGFPSFPLVERQANEVDWWDMVCNVKKLINEKKEDGKVFWQNLAGYKRQEALRPYLSSEEDRKKGKKFARYQLGDLLNHLEKKHGEDWGKVYDEAWERIDKKVEGLSKHIKLEEERRSEDAQSKAALTDWLRAKASFVIEGLKEADKDEFCRCDLKLQKWYGDLRGKPFAIEAENSILDISGFSKQYNCAFIWQKDGVKKLNLYLIINYFKGGKLRFKKIKPEAFEANRFYTVINKKSGEIVPMEVNFNFDDPNLIILPLAFGKRQGREFIWNDLLSLETGSLKLANGRVIEKTLYNRRTRQDEPALFVALTFERREVLDSSNIKPMNLIGVDRGENIPAVIALTDPEGCPLSRFKDSLGNPTHILRIGESYKEKQRTIQAKKEVEQRRAGGYSRKYASKAKNLADDMVRNTARDLLYYAVTQDAMLIFENLSRGFGRQGKRTFMAERQYTRMEDWLTAKLAYEGLPSKTYLSKTLAQYTSKTCSNCGFTITSADYDRVLEKLKKTATGWMTTINGKELKVEGQITYYNRYKRQNVVKDLSVELDRLSEESVNNDISSWTKGRSGEALSLLKKRFSHRPVQEKFVCLNCGFETHADEQAALNIARSWLFLRSQEYKKYQTNKTTGNTDKRAFVETWQSFYRKKLKEVWKPAV

SEQ ID NO: 44760 - protein, 978 aa, synthetic construct
  REGION 1..978: note = engineered CasX variant
QEIKRINKIRRRLVKDSNTKKAGKTGPMKTLLVRVMTPDLRERLENLRKKPENIPQPISNTSRANLNKLLTDYTEMKKAILHVYWEEFQKDPVGLMSRVAQPASKKIDQNKLKPEMDEKGNLTTAGFACSQCGQPLFVYKLEQVSEKGKAYTNYFGRCNVAEHEKLILLAQLKPEKDSDEAVTYSLGKFGQRALDFYSIHVTKESTHPVKPLAQIAGNRYASYPVGKALSDACMGTIASFLSKYQDIIIEHQKVVKGNQKRLESLRELAGKENLEYPSVTLPPQPHTKEGVDAYNEVIARVRMWVNLNLWQKLKLSRDDAKPLLRLKGFPSFPLVERQANEVDWWDMVCNVKKLINEKKEDGKVFWQNLAGYKRQEALRPYLSSEEDRKKGKKFARYQLGDLLWHLEKKHGEDWGKVYDEAWERIDKKVEGLSKHIKLEEERRSEDAQSKAALTDWLRAKASFVIEGLKEADKDEFCRCDLKLQKWYGDLRGKPFAIEAENSILDISGFSKQYNCAFIWQKDGVKKLNLYLIINYFKGGKLRFKKIKPEAFEANRFYTVINKKSGEIVPMEVNFNFDDPNLIILPLAFGKRQGREFIWNDLLSLETGSLKLANGRVIEKTLYNRRTRQDEPALFVALTFERREVLDSSNIKPMNLIGVDRGENIPAVIALTDPEGCPLSRFKDSLGNPTHILRIGESYKEKQRTIQAKKEVEQRRAGGYSRKYASKAKNLADDMVRNTARDLLYYAVTQDAMLIFENLSRGFGRQGKRTFMAERQYTRMEDWLTAKLAYEGLPSKTYLSKTLAQYTSKTCSNCGFTITSADYDRVLEKLKKTATGWMTTINGKELKVEGQITYYNRYKRQNVVKDLSVELDRLSEESVNNDISSWTKGRSGEALSLLKKRFSHRPVQEKFVCLNCGFETHADEQAALNIARSWLFLRSQEYKKYQTNKTTGNTDKRAFVETWQSFYRKKLKEVWKPAV

SEQ ID NO: 44761 - protein, 978 aa, synthetic construct
  REGION 1..978: note = engineered CasX variant
QEIKRINKIRRRLVKDSNTKKAGKTGPMKTLLVRVMTPDLRERLENLRKKPENIPQPISNTSRANLNKLLTDYTEMKKAILHVYWEEFQKDPVGLMSRVAQPASKKIDQNKLKPEMDEKGNLTTAGFACSQCGQPLFVYKLEQVSEKGKAYTNYFGRCNVAEHEKLILLAQLKPEKDSDEAVTYSLGKFGQRALDFYSIHVTKESTHPVKPLAQIAGNRYASHPVGKALSDACMGTIASFLSKYQDIIIEHQKVVKGNQKRLESLRELAGKENLEYPSVTLPPQPHTKEGVDAYNEVIARVRMWVNLNLWQKLKLSRDDAKPLLRLKGFPSFPLVERQANEVDWWDMVCNVKKLINEKKEDGKVFWQNLAGYKRQEALRPYLSSEEDRKKGKKFARYQLGDLLWHLEKKHGEDWGKVYDEAWERIDKKVEGLSKHIKLEEERRSEDAQSKAALTDWLRAKASFVIEGLKEADKDEFCRCDLKLQKWYGDLRGKPFAIEAENSILDISGFSKQYNCAFIWQKDGVKKLNLYLIINYFKGGKLRFKKIKPEAFEANRFYTVINKKSGEIVPMEVNFNFDDPNLIILPLAFGKRQGREFIWNDLLSLETGSLKLANGRVIEKTLYNRRTRQDEPALFVALTFERREVLDSSNIKPMNLIGVDRGENIPAVIALTDPEGCPLSRFKDSLGNPTHILRIGESYKEKQRTIQAKKEVEQRRAGGYSRKYASKAKNLADDMVRNTARDLLYYAVTQDAMLIFENLSRGFGRQGKRTFMAERQYTRMEDWLTAKLAYEGLPSKTYLSKTLAQYTSKTCSNCGFTITSADYDRVLEKLKKTATGWMTTINGKELKVEGQITYYNRYKRQNVVKDLSVELDRLSEESVNNDISSWTKGRSGEALSLLKKRFSHRPVQEKFVCLNCGFETHADEQAALNIARSWLFLRSQEYKKYQTNKTTGNTDKRAFVETWQSFYRKKLKEVWKPAV

SEQ ID NO: 44762 - protein, 978 aa, synthetic construct
  REGION 1..978: note = engineered CasX variant
QEIKRINKIRRRLVKDSNTKKAGKTGPMKTLLVRVMTPDLRERLENLRKKPENIPQPISNTSRANLNKLLTDYTEMKKAILHVYWEEFQKDPVGLMSRVAQPASKKIDQNKLKPEMDEKGNLTTAGFACSQCGQPLFVYKLEQVSEKGKAYTNYFGRCNVAEHEKLILLAQLKPEKDSDEAVTYSLGKFGQRALDFYSIHVTKESTHPVKPLAQIAGNRYASSPVGKALSDACMGTIASFLSKYQDIIIEHQKVVKGNQKRLESLRELAGKENLEYPSVTLPPQPHTKEGVDAYNEVIARVRMWVNLNLWQKLKLSRDDAKPLLRLKGFPSFPLVERQANEVDWWDMVCNVKKLINEKKEDGKVFWQNLAGYKRQEALRPYLSSEEDRKKGKKFARYQLGDLLWHLEKKHGEDWGKVYDEAWERIDKKVEGLSKHIKLEEERRSEDAQSKAALTDWLRAKASFVIEGLKEADKDEFCRCDLKLQKWYGDLRGKPFAIEAENSILDISGFSKQYNCAFIWQKDGVKKLNLYLIINYFKGGKLRFKKIKPEAFEANRFYTVINKKSGEIVPMEVNFNFDDPNLIILPLAFGKRQGREFIWNDLLSLETGSLKLANGRVIEKTLYNRRTRQDEPALFVALTFERREVLDSSNIKPMNLIGVDRGENIPAVIALTDPEGCPLSRFKDSLGNPTHILRIGESYKEKQRTIQAKKEVEQRRAGGYSRKYASKAKNLADDMVRNTARDLLYYAVTQDAMLIFENLSRGFGRQGKRTFMAERQYTRMEDWLTAKLAYEGLPSKTYLSKTLAQYTSKTCSNCGFTITSADYDRVLEKLKKTATGWMTTINGKELKVEGQITYYNRYKRQNVVKDLSVELDRLSEESVNNDISSWTKGRSGEALSLLKKRFSHRPVQEKFVCLNCGFETHADEQAALNIARSWLFLRSQEYKKYQTNKTTGNTDKRAFVETWQSFYRKKLKEVWKPAV

SEQ ID NO: 44763 - protein, 978 aa, synthetic construct
  REGION 1..978: note = engineered CasX variant
QEIKRINKIRRRLVKDSNTKKAGKTGPMKTLLVRVMTPDLRERLENLRKKPENIPQPISNTSRANLNKLLTDYTEMKKAILHVYWEEFQKDPVGLMSRVAQPASKKIDQNKLKPEMDEKGNLTTAGFACSQCGQPLFVYKLEQVSEKGKAYTNYFGRCNVAEHEKLILLAQLKPEKDSDEAVTYSLGKFGQRALDFYSIHVTKESTHPVKPLAQIAGNRYASTPVGKALSDACMGTIASFLSKYQDIIIEHQKVVKGNQKRLESLRELAGKENLEYPSVTLPPQPHTKEGVDAYNEVIARVRMWVNLNLWQKLKLSRDDAKPLLRLKGFPSFPLVERQANEVDWWDMVCNVKKLINEKKEDGKVFWQNLAGYKRQEALRPYLSSEEDRKKGKKFARYQLGDLLWHLEKKHGEDWGKVYDEAWERIDKKVEGLSKHIKLEEERRSEDAQSKAALTDWLRAKASFVIEGLKEADKDEFCRCDLKLQKWYGDLRGKPFAIEAENSILDISGFSKQYNCAFIWQKDGVKKLNLYLIINYFKGGKLRFKKIKPEAFEANRFYTVINKKSGEIVPMEVNFNFDDPNLIILPLAFGKRQGREFIWNDLLSLETGSLKLANGRVIEKTLYNRRTRQDEPALFVALTFERREVLDSSNIKPMNLIGVDRGENIPAVIALTDPEGCPLSRFKDSLGNPTHILRIGESYKEKQRTIQAKKEVEQRRAGGYSRKYASKAKNLADDMVRNTARDLLYYAVTQDAMLIFENLSRGFGRQGKRTFMAERQYTRMEDWLTAKLAYEGLPSKTYLSKTLAQYTSKTCSNCGFTITSADYDRVLEKLKKTATGWMTTINGKELKVEGQITYYNRYKRQNVVKDLSVELDRLSEESVNNDISSWTKGRSGEALSLLKKRFSHRPVQEKFVCLNCGFETHADEQAALNIARSWLFLRSQEYKKYQTNKTTGNTDKRAFVETWQSFYRKKLKEVWKPAV

SEQ ID NO: 44764 - protein, 978 aa, synthetic construct
  REGION 1..978: note = engineered CasX variant
QEIKRINKIRRRLVKDSNTKKAGKTGPMKTLLVRVMTPDLRERLENLRKKPENIPQPISNTSRANLNKLLTDYTEMKKAILHVYWEEFQKDPVGLMSRVAQPASKKIDQNKLKPEMDEKGNLTTAGFACSQCGQPLFVYKLEQVSEKGKAYTNYFGRCNVAEHEKLILLAQLKPEKDSDEAVTYSLGKFGQRALDFYSIHVTKESTHPVKPLAQIAGNRYASAPVGKALSDACMGTIASFLSKYQDIIIEHQKVVKGNQKRLESLRELAGKENLEYPSVTLPPQPHTKEGVDAYNEVIARVRMWVNLNLWQKLKLSRDDAKPLLRLKGFPSFPLVERQANEVDWWDMVCNVKKLINEKKEDGKVFWQNLAGYKRQEALRPYLSSEEDRKKGKKFARYQLGDLLWHLEKKHGEDWGKVYDEAWERIDKKVEGLSKHIKLEEERRSEDAQSKAALTDWLRAKASFVIEGLKEADKDEFCRCDLKLQKWYGDLRGKPFAIEAENSILDISGFSKQYNCAFIWQKDGVKKLNLYLIINYFKGGKLRFKKIKPEAFEANRFYTVINKKSGEIVPMEVNFNFDDPNLIILPLAFGKRQGREFIWNDLLSLETGSLKLANGRVIEKTLYNRRTRQDEPALFVALTFERREVLDSSNIKPMNLIGVDRGENIPAVIALTDPEGCPLSRFKDSLGNPTHILRIGESYKEKQRTIQAKKEVEQRRAGGYSRKYASKAKNLADDMVRNTARDLLYYAVTQDAMLIFENLSRGFGRQGKRTFMAERQYTRMEDWLTAKLAYEGLPSKTYLSKTLAQYTSKTCSNCGFTITSADYDRVLEKLKKTATGWMTTINGKELKVEGQITYYNRYKRQNVVKDLSVELDRLSEESVNNDISSWTKGRSGEALSLLKKRFSHRPVQEKFVCLNCGFETHADEQAALNIARSWLFLRSQEYKKYQTNKTTGNTDKRAFVETWQSFYRKKLKEVWKPAV

SEQ ID NO: 44765 - protein, 978 aa, synthetic construct
  REGION 1..978: note = engineered CasX variant
QEIKRINKIRRRLVKDSNTKKAGKTGPMKTLLVRVMTPDLRERLENLRKKPENIPQPISNTSRANLNKLLTDYTEMKKAILHVYWEEFQKDPVGLMSRVAQPASKKIDQNKLKPEMDEKGNLTTAGFACSQCGQPLFVYKLEQVSEKGKAYTNYFGRCNVAEHEKLILLAQLKPEKDSDEAVTYSLGKFGQRALDFYSIHVTKESTHPVKPLAQIAGNRYASVPVGKALSDACMGTIASFLSKYQDIIIEHQKVVKGNQKRLESLRELAGKENLEYPSVTLPPQPHTKEGVDAYNEVIARVRMWVNLNLWQKLKLSRDDAKPLLRLKGFPSFPLVERQANEVDWWDMVCNVKKLINEKKEDGKVFWQNLAGYKRQEALRPYLSSEEDRKKGKKFARYQLGDLLWHLEKKHGEDWGKVYDEAWERIDKKVEGLSKHIKLEEERRSEDAQSKAALTDWLRAKASFVIEGLKEADKDEFCRCDLKLQKWYGDLRGKPFAIEAENSILDISGFSKQYNCAFIWQKDGVKKLNLYLIINYFKGGKLRFKKIKPEAFEANRFYTVINKKSGEIVPMEVNFNFDDPNLIILPLAFGKRQGREFIWNDLLSLETGSLKLANGRVIEKTLYNRRTRQDEPALFVALTFERREVLDSSNIKPMNLIGVDRGENIPAVIALTDPEGCPLSRFKDSLGNPTHILRIGESYKEKQRTIQAKKEVEQRRAGGYSRKYASKAKNLADDMVRNTARDLLYYAVTQDAMLIFENLSRGFGRQGKRTFMAERQYTRMEDWLTAKLAYEGLPSKTYLSKTLAQYTSKTCSNCGFTITSADYDRVLEKLKKTATGWMTTINGKELKVEGQITYYNRYKRQNVVKDLSVELDRLSEESVNNDISSWTKGRSGEALSLLKKRFSHRPVQEKFVCLNCGFETHADEQAALNIARSWLFLRSQEYKKYQTNKTTGNTDKRAFVETWQSFYRKKLKEVWKPAV

SEQ ID NO: 44766 - protein, 978 aa, synthetic construct
  REGION 1..978: note = engineered CasX variant
QEIKRINKIRRRLVKDSNTKKAGKTGPMKTLLVRVMTPDLRERLENLRKKPENIPQPISNTSRANLNKLLTDYTEMKKAILHVYWEEFQKDPVGLMSRVAQPASKKIDQNKLKPEMDEKGNLTTAGFACSQCGQPLFVYKLEQVSEKGKAYTNYFGRCNVAEHEKLIKLAQLKPEKDSDEAVTYSLGKFGQRALDFYSIHVTKESTHPVKPLAQIAGNRYASGPVGKALSDACMGTIASFLSKYQDIIIEHQKVVKGNQKRLESLRELAGKENLEYPSVTLPPQPHTKEGVDAYNEVIARVRMWVNLNLWQKLKLSRDDAKPLLRLKGFPSFPLVERQANEVDWWDMVCNVKKLINEKKEDGKVFWQNLAGYKRQEALRPYLSSEEDRKKGKKFARYQLGDLLWHLEKKHGEDWGKVYDEAWERIDKKVEGLSKHIKLEEERRSEDAQSKAALTDWLRAKASFVIEGLKEADKDEFCRCDLKLQKWYGDLRGKPFAIEAENSILDISGFSKQYNCAFIWQKDGVKKLNLYLIINYFKGGKLRFKKIKPEAFEANRFYTVINKKSGEIVPMEVNFNFDDPNLIILPLAFGKRQGREFIWNDLLSLETGSLKLANGRVIEKTLYNRRTRQDEPALFVALTFERREVLDSSNIKPMNLIGVDRGENIPAVIALTDPEGCPLSRFKDSLGNPTHILRIGESYKEKQRTIQAKKEVEQRRAGGYSRKYASKAKNLADDMVRNTARDLLYYAVTQDAMLIFENLSRGFGRQGKRTFMAERQYTRMEDWLTAKLAYEGLPSKTYLSKTLAQYTSKTCSNCGFTITSADYDRVLEKLKKTATGWMTTINGKELKVEGQITYYNRYKRQNVVKDLSVELDRLSEESVNNDISSWTKGRSGEALSLLKKRFSHRPVQEKFVCLNCGFETHADEQAALNIARSWLFLRSQEYKKYQTNKTTGNTDKRAFVETWQSFYRKKLKEVWKPAV

SEQ ID NO: 44767 - protein, 977 aa, synthetic construct
  REGION 1..977: note = engineered CasX variant
QEIKRINKIRRRLVKDSNTKKAGKTGPMKTLLVRVMTPDLRERLENLRKKPENIPQPISNTSRANLNKLLTDYTEMKKAILHVYWEEFQKDPVGLMSRVAQPASKKIDQNKLKPEMDEKGNLTTAGFACSQCGQPLFVYKLEQVSEKGKAYTNYFGRCNVAEHEKLILLAQLKPEKDSDEAVTYSLGKFGQRALDFYSIHVTKESTHPVKPLAQIAGNRYASPVGKALSDACMGTIASFLSKYQDIIIEHQKVVKGNQKRLESLRELAGKENLEYPSVTLPPQPHTKEGVDAYNEVIARVRMWVNLNLWQKLKLSRDDAKPLLRLKGFPSFPLVERQANEVDWWDMVCNVKKLINEKKEDGKVFWQNLAGYKRQEALRPYLSSEEDRKKGKKFARYQLGDLLWHLEKKHGEDWGKVYDEAWERIDKKVEGLSKHIKLEEERRSEDAQSKAALTDWLRAKASFVIEGLKEADKDEFCRCDLKLQKWYGDLRGKPFAIEAENSILDISGFSKQYNCAFIWQKDGVKKLNLYLIINYFKGGKLRFKKIKPEAFEANRFYTVINKKSGEIVPMEVNFNFDDPNLIILPLAFGKRQGREFIWNDLLSLETGSLKLANGRVIEKTLYNRRTRQDEPALFVALTFERREVLDSSNIKPMNLIGVDRGENIPAVIALTDPEGCPLSRFKDSLGNPTHILRIGESYKEKQRTIQAKKEVEQRRAGGYSRKYASKAKNLADDMVRNTARDLLYYAVTQDAMLIFENLSRGFGRQGKRTFMAERQYTRMEDWLTAKLAYEGLPSKTYLSKTLAQYTSKTCSNCGFTITSADYDRVLEKLKKTATGWMTTINGKELKVEGQITYYNRYKRQNVVKDLSVELDRLSEESVNNDISSWTKGRSGEALSLLKKRFSHRPVQEKFVCLNCGFETHADEQAALNIARSWLFLRSQEYKKYQTNKTTGNTDKRAFVETWQSFYRKKLKEVWKPAV

SEQ ID NO: 44768 - protein, 978 aa, synthetic construct
  REGION 1..978: note = engineered CasX variant
QEIKRINKIRRRLVKDSNTKKAGKTGPMKTLLVRVMTPDLRERLENLRKKPENIPQPISNTSRANLNKLLTDYTEMKKAILHVYWEEFQKDPVGLMSRVAQPASKKIDQNKLKPEMDEKGNLTTAGFACSQCGQPLFVYKLEQVSEKGKAYTNYFGRCNVAEHEKLILLAQLKPEKDSDEAVTYSLGKFGQRALDFYSIHVTKESTHPVKPLAQIAGNRYASYPVGKALSDACMGTIASFLSKYQDIIIEHQKVVKGNQKRLESLRELAGKENLEYPSVTLPPQPHTKEGVDAYNEVIARVRMWVNLNLWQKLKLSRDDAKPLLRLKGFPSFPLVERQANEVDWWDMVCNVKKLINEKKEDGKVFWQNLAGYKRQEALRPYLSSEEDRKKGKKFARYQLGDLLLHLYKKHGEDWGKVYDEAWERIDKKVEGLSKHIKLEEERRSEDAQSKAALTDWLRAKASFVIEGLKEADKDEFCRCDLKLQKWYGDLRGKPFAIEAENSILDISGFSKQYNCAFIWQKDGVKKLNLYLIINYFKGGKLRFKKIKPEAFEANRFYTVINKKSGEIVPMEVNFNFDDPNLIILPLAFGKRQGREFIWNDLLSLETGSLKLANGRVIEKTLYNRRTRQDEPALFVALTFERREVLDSSNIKPMNLIGVDRGENIPAVIALTDPEGCPLSRFKDSLGNPTHILRIGESYKEKQRTIQAKKEVEQRRAGGYSRKYASKAKNLADDMVRNTARDLLYYAVTQDAMLIFENLSRGFGRQGKRTFMAERQYTRMEDWLTAKLAYEGLPSKTYLSKTLAQYTSKTCSNCGFTITSADYDRVLEKLKKTATGWMTTINGKELKVEGQITYYNRYKRQNVVKDLSVELDRLSEESVNNDISSWTKGRSGEALSLLKKRFSHRPVQEKFVCLNCGFETHADEQAALNIARSWLFLRSQEYKKYQTNKTTGNTDKRAFVETWQSFYRKKLKEVWKPAV

SEQ ID NO: 44769 - protein, 978 aa, synthetic construct
  REGION 1..978: note = engineered CasX variant
QEIKRINKIRRRLVKDSNTKKAGKTGPMKTLLVRVMTPDLRERLENLRKKPENIPQPISNTSRANLNKLLTDYTEMKKAILHVYWEEFQKDPVGLMSRVAQPASKKIDQNKLKPEMDEKGNLTTAGFACSQCGQPLFVYKLEQVSEKGKAYTNYFGRCNVAEHEKLILLAQLKPEKDSDEAVTYSLGKFGQRALDFYSIHVTKESTHPVKPLAQIAGNRYASHPVGKALSDACMGTIASFLSKYQDIIIEHQKVVKGNQKRLESLRELAGKENLEYPSVTLPPQPHTKEGVDAYNEVIARVRMWVNLNLWQKLKLSRDDAKPLLRLKGFPSFPLVERQANEVDWWDMVCNVKKLINEKKEDGKVFWQNLAGYKRQEALRPYLSSEEDRKKGKKFARYQLGDLLLHLYKKHGEDWGKVYDEAWERIDKKVEGLSKHIKLEEERRSEDAQSKAALTDWLRAKASFVIEGLKEADKDEFCRCDLKLQKWYGDLRGKPFAIEAENSILDISGFSKQYNCAFIWQKDGVKKLNLYLIINYFKGGKLRFKKIKPEAFEANRFYTVINKKSGEIVPMEVNFNFDDPNLIILPLAFGKRQGREFIWNDLLSLETGSLKLANGRVIEKTLYNRRTRQDEPALFVALTFERREVLDSSNIKPMNLIGVDRGENIPAVIALTDPEGCPLSRFKDSLGNPTHILRIGESYKEKQRTIQAKKEVEQRRAGGYSRKYASKAKNLADDMVRNTARDLLYYAVTQDAMLIFENLSRGFGRQGKRTFMAERQYTRMEDWLTAKLAYEGLPSKTYLSKTLAQYTSKTCSNCGFTITSADYDRVLEKLKKTATGWMTTINGKELKVEGQITYYNRYKRQNVVKDLSVELDRLSEESVNNDISSWTKGRSGEALSLLKKRFSHRPVQEKFVCLNCGFETHADEQAALNIARSWLFLRSQEYKKYQTNKTTGNTDKRAFVETWQSFYRKKLKEVWKPAV

SEQ ID NO: 44770 - protein, 978 aa, synthetic construct
  REGION 1..978: note = engineered CasX variant
QEIKRINKIRRRLVKDSNTKKAGKTGPMKTLLVRVMTPDLRERLENLRKKPENIPQPISNTSRANLNKLLTDYTEMKKAILHVYWEEFQKDPVGLMSRVAQPASKKIDQNKLKPEMDEKGNLTTAGFACSQCGQPLFVYKLEQVSEKGKAYTNYFGRCNVAEHEKLILLAQLKPEKDSDEAVTYSLGKFGQRALDFYSIHVTKESTHPVKPLAQIAGNRYASSPVGKALSDACMGTIASFLSKYQDIIIEHQKVVKGNQKRLESLRELAGKENLEYPSVTLPPQPHTKEGVDAYNEVIARVRMWVNLNLWQKLKLSRDDAKPLLRLKGFPSFPLVERQANEVDWWDMVCNVKKLINEKKEDGKVFWQNLAGYKRQEALRPYLSSEEDRKKGKKFARYQLGDLLLHLYKKHGEDWGKVYDEAWERIDKKVEGLSKHIKLEEERRSEDAQSKAALTDWLRAKASFVIEGLKEADKDEFCRCDLKLQKWYGDLRGKPFAIEAENSILDISGFSKQYNCAFIWQKDGVKKLNLYLIINYFKGGKLRFKKIKPEAFEANRFYTVINKKSGEIVPMEVNFNFDDPNLIILPLAFGKRQGREFIWNDLLSLETGSLKLANGRVIEKTLYNRRTRQDEPALFVALTFERREVLDSSNIKPMNLIGVDRGENIPAVIALTDPEGCPLSRFKDSLGNPTHILRIGESYKEKQRTIQAKKEVEQRRAGGYSRKYASKAKNLADDMVRNTARDLLYYAVTQDAMLIFENLSRGFGRQGKRTFMAERQYTRMEDWLTAKLAYEGLPSKTYLSKTLAQYTSKTCSNCGFTITSADYDRVLEKLKKTATGWMTTINGKELKVEGQITYYNRYKRQNVVKDLSVELDRLSEESVNNDISSWTKGRSGEALSLLKKRFSHRPVQEKFVCLNCGFETHADEQAALNIARSWLFLRSQEYKKYQTNKTTGNTDKRAFVETWQSFYRKKLKEVWKPAV

SEQ ID NO: 44771 - protein, 978 aa, synthetic construct
  REGION 1..978: note = engineered CasX variant
QEIKRINKIRRRLVKDSNTKKAGKTGPMKTLLVRVMTPDLRERLENLRKKPENIPQPISNTSRANLNKLLTDYTEMKKAILHVYWEEFQKDPVGLMSRVAQPASKKIDQNKLKPEMDEKGNLTTAGFACSQCGQPLFVYKLEQVSEKGKAYTNYFGRCNVAEHEKLILLAQLKPEKDSDEAVTYSLGKFGQRALDFYSIHVTKESTHPVKPLAQIAGNRYASTPVGKALSDACMGTIASFLSKYQDIIIEHQKVVKGNQKRLESLRELAGKENLEYPSVTLPPQPHTKEGVDAYNEVIARVRMWVNLNLWQKLKLSRDDAKPLLRLKGFPSFPLVERQANEVDWWDMVCNVKKLINEKKEDGKVFWQNLAGYKRQEALRPYLSSEEDRKKGKKFARYQLGDLLLHLYKKHGEDWGKVYDEAWERIDKKVEGLSKHIKLEEERRSEDAQSKAALTDWLRAKASFVIEGLKEADKDEFCRCDLKLQKWYGDLRGKPFAIEAENSILDISGFSKQYNCAFIWQKDGVKKLNLYLIINYFKGGKLRFKKIKPEAFEANRFYTVINKKSGEIVPMEVNFNFDDPNLIILPLAFGKRQGREFIWNDLLSLETGSLKLANGRVIEKTLYNRRTRQDEPALFVALTFERREVLDSSNIKPMNLIGVDRGENIPAVIALTDPEGCPLSRFKDSLGNPTHILRIGESYKEKQRTIQAKKEVEQRRAGGYSRKYASKAKNLADDMVRNTARDLLYYAVTQDAMLIFENLSRGFGRQGKRTFMAERQYTRMEDWLTAKLAYEGLPSKTYLSKTLAQYTSKTCSNCGFTITSADYDRVLEKLKKTATGWMTTINGKELKVEGQITYYNRYKRQNVVKDLSVELDRLSEESVNNDISSWTKGRSGEALSLLKKRFSHRPVQEKFVCLNCGFETHADEQAALNIARSWLFLRSQEYKKYQTNKTTGNTDKRAFVETWQSFYRKKLKEVWKPAV

SEQ ID NO: 44772 - protein, 978 aa, synthetic construct
  REGION 1..978: note = engineered CasX variant
QEIKRINKIRRRLVKDSNTKKAGKTGPMKTLLVRVMTPDLRERLENLRKKPENIPQPISNTSRANLNKLLTDYTEMKKAILHVYWEEFQKDPVGLMSRVAQPASKKIDQNKLKPEMDEKGNLTTAGFACSQCGQPLFVYKLEQVSEKGKAYTNYFGRCNVAEHEKLILLAQLKPEKDSDEAVTYSLGKFGQRALDFYSIHVTKESTHPVKPLAQIAGNRYASAPVGKALSDACMGTIASFLSKYQDIIIEHQKVVKGNQKRLESLRELAGKENLEYPSVTLPPQPHTKEGVDAYNEVIARVRMWVNLNLWQKLKLSRDDAKPLLRLKGFPSFPLVERQANEVDWWDMVCNVKKLINEKKEDGKVFWQNLAGYKRQEALRPYLSSEEDRKKGKKFARYQLGDLLLHLYKKHGEDWGKVYDEAWERIDKKVEGLSKHIKLEEERRSEDAQSKAALTDWLRAKASFVIEGLKEADKDEFCRCDLKLQKWYGDLRGKPFAIEAENSILDISGFSKQYNCAFIWQKDGVKKLNLYLIINYFKGGKLRFKKIKPEAFEANRFYTVINKKSGEIVPMEVNFNFDDPNLIILPLAFGKRQGREFIWNDLLSLETGSLKLANGRVIEKTLYNRRTRQDEPALFVALTFERREVLDSSNIKPMNLIGVDRGENIPAVIALTDPEGCPLSRFKDSLGNPTHILRIGESYKEKQRTIQAKKEVEQRRAGGYSRKYASKAKNLADDMVRNTARDLLYYAVTQDAMLIFENLSRGFGRQGKRTFMAERQYTRMEDWLTAKLAYEGLPSKTYLSKTLAQYTSKTCSNCGFTITSADYDRVLEKLKKTATGWMTTINGKELKVEGQITYYNRYKRQNVVKDLSVELDRLSEESVNNDISSWTKGRSGEALSLLKKRFSHRPVQEKFVCLNCGFETHADEQAALNIARSWLFLRSQEYKKYQTNKTTGNTDKRAFVETWQSFYRKKLKEVWKPAV

SEQ ID NO: 44773 - protein, 978 aa, synthetic construct
  REGION 1..978: note = engineered CasX variant
QEIKRINKIRRRLVKDSNTKKAGKTGPMKTLLVRVMTPDLRERLENLRKKPENIPQPISNTSRANLNKLLTDYTEMKKAILHVYWEEFQKDPVGLMSRVAQPASKKIDQNKLKPEMDEKGNLTTAGFACSQCGQPLFVYKLEQVSEKGKAYTNYFGRCNVAEHEKLILLAQLKPEKDSDEAVTYSLGKFGQRALDFYSIHVTKESTHPVKPLAQIAGNRYASVPVGKALSDACMGTIASFLSKYQDIIIEHQKVVKGNQKRLESLRELAGKENLEYPSVTLPPQPHTKEGVDAYNEVIARVRMWVNLNLWQKLKLSRDDAKPLLRLKGFPSFPLVERQANEVDWWDMVCNVKKLINEKKEDGKVFWQNLAGYKRQEALRPYLSSEEDRKKGKKFARYQLGDLLLHLYKKHGEDWGKVYDEAWERIDKKVEGLSKHIKLEEERRSEDAQSKAALTDWLRAKASFVIEGLKEADKDEFCRCDLKLQKWYGDLRGKPFAIEAENSILDISGFSKQYNCAFIWQKDGVKKLNLYLIINYFKGGKLRFKKIKPEAFEANRFYTVINKKSGEIVPMEVNFNFDDPNLIILPLAFGKRQGREFIWNDLLSLETGSLKLANGRVIEKTLYNRRTRQDEPALFVALTFERREVLDSSNIKPMNLIGVDRGENIPAVIALTDPEGCPLSRFKDSLGNPTHILRIGESYKEKQRTIQAKKEVEQRRAGGYSRKYASKAKNLADDMVRNTARDLLYYAVTQDAMLIFENLSRGFGRQGKRTFMAERQYTRMEDWLTAKLAYEGLPSKTYLSKTLAQYTSKTCSNCGFTITSADYDRVLEKLKKTATGWMTTINGKELKVEGQITYYNRYKRQNVVKDLSVELDRLSEESVNNDISSWTKGRSGEALSLLKKRFSHRPVQEKFVCLNCGFETHADEQAALNIARSWLFLRSQEYKKYQTNKTTGNTDKRAFVETWQSFYRKKLKEVWKPAV

SEQ ID NO: 44774 - protein, 978 aa, synthetic construct
  REGION 1..978: note = engineered CasX variant
QEIKRINKIRRRLVKDSNTKKAGKTGPMKTLLVRVMTPDLRERLENLRKKPENIPQPISNTSRANLNKLLTDYTEMKKAILHVYWEEFQKDPVGLMSRVAQPASKKIDQNKLKPEMDEKGNLTTAGFACSQCGQPLFVYKLEQVSEKGKAYTNYFGRCNVAEHEKLIKLAQLKPEKDSDEAVTYSLGKFGQRALDFYSIHVTKESTHPVKPLAQIAGNRYASGPVGKALSDACMGTIASFLSKYQDIIIEHQKVVKGNQKRLESLRELAGKENLEYPSVTLPPQPHTKEGVDAYNEVIARVRMWVNLNLWQKLKLSRDDAKPLLRLKGFPSFPLVERQANEVDWWDMVCNVKKLINEKKEDGKVFWQNLAGYKRQEALRPYLSSEEDRKKGKKFARYQLGDLLLHLYKKHGEDWGKVYDEAWERIDKKVEGLSKHIKLEEERRSEDAQSKAALTDWLRAKASFVIEGLKEADKDEFCRCDLKLQKWYGDLRGKPFAIEAENSILDISGFSKQYNCAFIWQKDGVKKLNLYLIINYFKGGKLRFKKIKPEAFEANRFYTVINKKSGEIVPMEVNFNFDDPNLIILPLAFGKRQGREFIWNDLLSLETGSLKLANGRVIEKTLYNRRTRQDEPALFVALTFERREVLDSSNIKPMNLIGVDRGENIPAVIALTDPEGCPLSRFKDSLGNPTHILRIGESYKEKQRTIQAKKEVEQRRAGGYSRKYASKAKNLADDMVRNTARDLLYYAVTQDAMLIFENLSRGFGRQGKRTFMAERQYTRMEDWLTAKLAYEGLPSKTYLSKTLAQYTSKTCSNCGFTITSADYDRVLEKLKKTATGWMTTINGKELKVEGQITYYNRYKRQNVVKDLSVELDRLSEESVNNDISSWTKGRSGEALSLLKKRFSHRPVQEKFVCLNCGFETHADEQAALNIARSWLFLRSQEYKKYQTNKTTGNTDKRAFVETWQSFYRKKLKEVWKPAV

SEQ ID NO: 44775 - protein, 977 aa, synthetic construct
  REGION 1..977: note = engineered CasX variant
QEIKRINKIRRRLVKDSNTKKAGKTGPMKTLLVRVMTPDLRERLENLRKKPENIPQPISNTSRANLNKLLTDYTEMKKAILHVYWEEFQKDPVGLMSRVAQPASKKIDQNKLKPEMDEKGNLTTAGFACSQCGQPLFVYKLEQVSEKGKAYTNYFGRCNVAEHEKLILLAQLKPEKDSDEAVTYSLGKFGQRALDFYSIHVTKESTHPVKPLAQIAGNRYASPVGKALSDACMGTIASFLSKYQDIIIEHQKVVKGNQKRLESLRELAGKENLEYPSVTLPPQPHTKEGVDAYNEVIARVRMWVNLNLWQKLKLSRDDAKPLLRLKGFPSFPLVERQANEVDWWDMVCNVKKLINEKKEDGKVFWQNLAGYKRQEALRPYLSSEEDRKKGKKFARYQLGDLLLHLYKKHGEDWGKVYDEAWERIDKKVEGLSKHIKLEEERRSEDAQSKAALTDWLRAKASFVIEGLKEADKDEFCRCDLKLQKWYGDLRGKPFAIEAENSILDISGFSKQYNCAFIWQKDGVKKLNLYLIINYFKGGKLRFKKIKPEAFEANRFYTVINKKSGEIVPMEVNFNFDDPNLIILPLAFGKRQGREFIWNDLLSLETGSLKLANGRVIEKTLYNRRTRQDEPALFVALTFERREVLDSSNIKPMNLIGVDRGENIPAVIALTDPEGCPLSRFKDSLGNPTHILRIGESYKEKQRTIQAKKEVEQRRAGGYSRKYASKAKNLADDMVRNTARDLLYYAVTQDAMLIFENLSRGFGRQGKRTFMAERQYTRMEDWLTAKLAYEGLPSKTYLSKTLAQYTSKTCSNCGFTITSADYDRVLEKLKKTATGWMTTINGKELKVEGQITYYNRYKRQNVVKDLSVELDRLSEESVNNDISSWTKGRSGEALSLLKKRFSHRPVQEKFVCLNCGFETHADEQAALNIARSWLFLRSQEYKKYQTNKTTGNTDKRAFVETWQSFYRKKLKEVWKPAV

SEQ ID NO: 44776 - protein, 978 aa, synthetic construct
  REGION 1..978: note = engineered CasX variant
QEIKRINKIRRRLVKDSNTKKAGKTGPMKTLLVRVMTPDLRERLENLRKKPENIPQPISNTSRANLNKLLTDYTEMKKAILHVYWEEFQKDPVGLMSRVAQPASKKIDQNKLKPEMDEKGNLTTAGFACSQCGQPLFVYKLEQVSEKGKAYTNYFGRCNVAEHEKLILLAQLKPEKDSDEAVTYSLGKFGQRALDFYSIHVTKESTHPVKPLAQIAGNRYASYPVGKALSDACMGTIASFLSKYQDIIIEHQKVVKGNQKRLESLRELAGKENLEYPSVTLPPQPHTKEGVDAYNEVIARVRMWVNLNLWQKLKLSRDDAKPLLRLKGFPSFPLVERQANEVDWWDMVCNVKKLINEKKEDGKVFWQNLAGYKRQEALRPYLSSEEDRKKGKKFARYQLGDLLLHLEKKHPEDWGKVYDEAWERIDKKVEGLSKHIKLEEERRSEDAQSKAALTDWLRAKASFVIEGLKEADKDEFCRCDLKLQKWYGDLRGKPFAIEAENSILDISGFSKQYNCAFIWQKDGVKKLNLYLIINYFKGGKLRFKKIKPEAFEANRFYTVINKKSGEIVPMEVNFNFDDPNLIILPLAFGKRQGREFIWNDLLSLETGSLKLANGRVIEKTLYNRRTRQDEPALFVALTFERREVLDSSNIKPMNLIGVDRGENIPAVIALTDPEGCPLSRFKDSLGNPTHILRIGESYKEKQRTIQAKKEVEQRRAGGYSRKYASKAKNLADDMVRNTARDLLYYAVTQDAMLIFENLSRGFGRQGKRTFMAERQYTRMEDWLTAKLAYEGLPSKTYLSKTLAQYTSKTCSNCGFTITSADYDRVLEKLKKTATGWMTTINGKELKVEGQITYYNRYKRQNVVKDLSVELDRLSEESVNNDISSWTKGRSGEALSLLKKRFSHRPVQEKFVCLNCGFETHADEQAALNIARSWLFLRSQEYKKYQTNKTTGNTDKRAFVETWQSFYRKKLKEVWKPAV

SEQ ID NO: 44777 - protein, 978 aa, synthetic construct
  REGION 1..978: note = engineered CasX variant
QEIKRINKIRRRLVKDSNTKKAGKTGPMKTLLVRVMTPDLRERLENLRKKPENIPQPISNTSRANLNKLLTDYTEMKKAILHVYWEEFQKDPVGLMSRVAQPASKKIDQNKLKPEMDEKGNLTTAGFACSQCGQPLFVYKLEQVSEKGKAYTNYFGRCNVAEHEKLILLAQLKPEKDSDEAVTYSLGKFGQRALDFYSIHVTKESTHPVKPLAQIAGNRYASHPVGKALSDACMGTIASFLSKYQDIIIEHQKVVKGNQKRLESLRELAGKENLEYPSVTLPPQPHTKEGVDAYNEVIARVRMWVNLNLWQKLKLSRDDAKPLLRLKGFPSFPLVERQANEVDWWDMVCNVKKLINEKKEDGKVFWQNLAGYKRQEALRPYLSSEEDRKKGKKFARYQLGDLLLHLEKKHPEDWGKVYDEAWERIDKKVEGLSKHIKLEEERRSEDAQSKAALTDWLRAKASFVIEGLKEADKDEFCRCDLKLQKWYGDLRGKPFAIEAENSILDISGFSKQYNCAFIWQKDGVKKLNLYLIINYFKGGKLRFKKIKPEAFEANRFYTVINKKSGEIVPMEVNFNFDDPNLIILPLAFGKRQGREFIWNDLLSLETGSLKLANGRVIEKTLYNRRTRQDEPALFVALTFERREVLDSSNIKPMNLIGVDRGENIPAVIALTDPEGCPLSRFKDSLGNPTHILRIGESYKEKQRTIQAKKEVEQRRAGGYSRKYASKAKNLADDMVRNTARDLLYYAVTQDAMLIFENLSRGFGRQGKRTFMAERQYTRMEDWLTAKLAYEGLPSKTYLSKTLAQYTSKTCSNCGFTITSADYDRVLEKLKKTATGWMTTINGKELKVEGQITYYNRYKRQNVVKDLSVELDRLSEESVNNDISSWTKGRSGEALSLLKKRFSHRPVQEKFVCLNCGFETHADEQAALNIARSWLFLRSQEYKKYQTNKTTGNTDKRAFVETWQSFYRKKLKEVWKPAV

SEQ ID NO: 44778 - protein, 978 aa, synthetic construct
  REGION 1..978: note = engineered CasX variant
QEIKRINKIRRRLVKDSNTKKAGKTGPMKTLLVRVMTPDLRERLENLRKKPENIPQPISNTSRANLNKLLTDYTEMKKAILHVYWEEFQKDPVGLMSRVAQPASKKIDQNKLKPEMDEKGNLTTAGFACSQCGQPLFVYKLEQVSEKGKAYTNYFGRCNVAEHEKLILLAQLKPEKDSDEAVTYSLGKFGQRALDFYSIHVTKESTHPVKPLAQIAGNRYASSPVGKALSDACMGTIASFLSKYQDIIIEHQKVVKGNQKRLESLRELAGKENLEYPSVTLPPQPHTKEGVDAYNEVIARVRMWVNLNLWQKLKLSRDDAKPLLRLKGFPSFPLVERQANEVDWWDMVCNVKKLINEKKEDGKVFWQNLAGYKRQEALRPYLSSEEDRKKGKKFARYQLGDLLLHLEKKHPEDWGKVYDEAWERIDKKVEGLSKHIKLEEERRSEDAQSKAALTDWLRAKASFVIEGLKEADKDEFCRCDLKLQKWYGDLRGKPFAIEAENSILDISGFSKQYNCAFIWQKDGVKKLNLYLIINYFKGGKLRFKKIKPEAFEANRFYTVINKKSGEIVPMEVNFNFDDPNLIILPLAFGKRQGREFIWNDLLSLETGSLKLANGRVIEKTLYNRRTRQDEPALFVALTFERREVLDSSNIKPMNLIGVDRGENIPAVIALTDPEGCPLSRFKDSLGNPTHILRIGESYKEKQRTIQAKKEVEQRRAGGYSRKYASKAKNLADDMVRNTARDLLYYAVTQDAMLIFENLSRGFGRQGKRTFMAERQYTRMEDWLTAKLAYEGLPSKTYLSKTLAQYTSKTCSNCGFTITSADYDRVLEKLKKTATGWMTTINGKELKVEGQITYYNRYKRQNVVKDLSVELDRLSEESVNNDISSWTKGRSGEALSLLKKRFSHRPVQEKFVCLNCGFETHADEQAALNIARSWLFLRSQEYKKYQTNKTTGNTDKRAFVETWQSFYRKKLKEVWKPAV

SEQ ID NO: 44779 - protein, 978 aa, synthetic construct
  REGION 1..978: note = engineered CasX variant
QEIKRINKIRRRLVKDSNTKKAGKTGPMKTLLVRVMTPDLRERLENLRKKPENIPQPISNTSRANLNKLLTDYTEMKKAILHVYWEEFQKDPVGLMSRVAQPASKKIDQNKLKPEMDEKGNLTTAGFACSQCGQPLFVYKLEQVSEKGKAYTNYFGRCNVAEHEKLILLAQLKPEKDSDEAVTYSLGKFGQRALDFYSIHVTKESTHPVKPLAQIAGNRYASTPVGKALSDACMGTIASFLSKYQDIIIEHQKVVKGNQKRLESLRELAGKENLEYPSVTLPPQPHTKEGVDAYNEVIARVRMWVNLNLWQKLKLSRDDAKPLLRLKGFPSFPLVERQANEVDWWDMVCNVKKLINEKKEDGKVFWQNLAGYKRQEALRPYLSSEEDRKKGKKFARYQLGDLLLHLEKKHPEDWGKVYDEAWERIDKKVEGLSKHIKLEEERRSEDAQSKAALTDWLRAKASFVIEGLKEADKDEFCRCDLKLQKWYGDLRGKPFAIEAENSILDISGFSKQYNCAFIWQKDGVKKLNLYLIINYFKGGKLRFKKIKPEAFEANRFYTVINKKSGEIVPMEVNFNFDDPNLIILPLAFGKRQGREFIWNDLLSLETGSLKLANGRVIEKTLYNRRTRQDEPALFVALTFERREVLDSSNIKPMNLIGVDRGENIPAVIALTDPEGCPLSRFKDSLGNPTHILRIGESYKEKQRTIQAKKEVEQRRAGGYSRKYASKAKNLADDMVRNTARDLLYYAVTQDAMLIFENLSRGFGRQGKRTFMAERQYTRMEDWLTAKLAYEGLPSKTYLSKTLAQYTSKTCSNCGFTITSADYDRVLEKLKKTATGWMTTINGKELKVEGQITYYNRYKRQNVVKDLSVELDRLSEESVNNDISSWTKGRSGEALSLLKKRFSHRPVQEKFVCLNCGFETHADEQAALNIARSWLFLRSQEYKKYQTNKTTGNTDKRAFVETWQSFYRKKLKEVWKPAV

SEQ ID NO: 44780 - protein, 978 aa, synthetic construct
  REGION 1..978: note = engineered CasX variant
QEIKRINKIRRRLVKDSNTKKAGKTGPMKTLLVRVMTPDLRERLENLRKKPENIPQPISNTSRANLNKLLTDYTEMKKAILHVYWEEFQKDPVGLMSRVAQPASKKIDQNKLKPEMDEKGNLTTAGFACSQCGQPLFVYKLEQVSEKGKAYTNYFGRCNVAEHEKLILLAQLKPEKDSDEAVTYSLGKFGQRALDFYSIHVTKESTHPVKPLAQIAGNRYASAPVGKALSDACMGTIASFLSKYQDIIIEHQKVVKGNQKRLESLRELAGKENLEYPSVTLPPQPHTKEGVDAYNEVIARVRMWVNLNLWQKLKLSRDDAKPLLRLKGFPSFPLVERQANEVDWWDMVCNVKKLINEKKEDGKVFWQNLAGYKRQEALRPYLSSEEDRKKGKKFARYQLGDLLLHLEKKHPEDWGKVYDEAWERIDKKVEGLSKHIKLEEERRSEDAQSKAALTDWLRAKASFVIEGLKEADKDEFCRCDLKLQKWYGDLRGKPFAIEAENSILDISGFSKQYNCAFIWQKDGVKKLNLYLIINYFKGGKLRFKKIKPEAFEANRFYTVINKKSGEIVPMEVNFNFDDPNLIILPLAFGKRQGREFIWNDLLSLETGSLKLANGRVIEKTLYNRRTRQDEPALFVALTFERREVLDSSNIKPMNLIGVDRGENIPAVIALTDPEGCPLSRFKDSLGNPTHILRIGESYKEKQRTIQAKKEVEQRRAGGYSRKYASKAKNLADDMVRNTARDLLYYAVTQDAMLIFENLSRGFGRQGKRTFMAERQYTRMEDWLTAKLAYEGLPSKTYLSKTLAQYTSKTCSNCGFTITSADYDRVLEKLKKTATGWMTTINGKELKVEGQITYYNRYKRQNVVKDLSVELDRLSEESVNNDISSWTKGRSGEALSLLKKRFSHRPVQEKFVCLNCGFETHADEQAALNIARSWLFLRSQEYKKYQTNKTTGNTDKRAFVETWQSFYRKKLKEVWKPAV

SEQ ID NO: 44781 - protein, 978 aa, synthetic construct
  REGION 1..978: note = engineered CasX variant
QEIKRINKIRRRLVKDSNTKKAGKTGPMKTLLVRVMTPDLRERLENLRKKPENIPQPISNTSRANLNKLLTDYTEMKKAILHVYWEEFQKDPVGLMSRVAQPASKKIDQNKLKPEMDEKGNLTTAGFACSQCGQPLFVYKLEQVSEKGKAYTNYFGRCNVAEHEKLILLAQLKPEKDSDEAVTYSLGKFGQRALDFYSIHVTKESTHPVKPLAQIAGNRYASVPVGKALSDACMGTIASFLSKYQDIIIEHQKVVKGNQKRLESLRELAGKENLEYPSVTLPPQPHTKEGVDAYNEVIARVRMWVNLNLWQKLKLSRDDAKPLLRLKGFPSFPLVERQANEVDWWDMVCNVKKLINEKKEDGKVFWQNLAGYKRQEALRPYLSSEEDRKKGKKFARYQLGDLLLHLEKKHPEDWGKVYDEAWERIDKKVEGLSKHIKLEEERRSEDAQSKAALTDWLRAKASFVIEGLKEADKDEFCRCDLKLQKWYGDLRGKPFAIEAENSILDISGFSKQYNCAFIWQKDGVKKLNLYLIINYFKGGKLRFKKIKPEAFEANRFYTVINKKSGEIVPMEVNFNFDDPNLIILPLAFGKRQGREFIWNDLLSLETGSLKLANGRVIEKTLYNRRTRQDEPALFVALTFERREVLDSSNIKPMNLIGVDRGENIPAVIALTDPEGCPLSRFKDSLGNPTHILRIGESYKEKQRTIQAKKEVEQRRAGGYSRKYASKAKNLADDMVRNTARDLLYYAVTQDAMLIFENLSRGFGRQGKRTFMAERQYTRMEDWLTAKLAYEGLPSKTYLSKTLAQYTSKTCSNCGFTITSADYDRVLEKLKKTATGWMTTINGKELKVEGQITYYNRYKRQNVVKDLSVELDRLSEESVNNDISSWTKGRSGEALSLLKKRFSHRPVQEKFVCLNCGFETHADEQAALNIARSWLFLRSQEYKKYQTNKTTGNTDKRAFVETWQSFYRKKLKEVWKPAV

SEQ ID NO: 44782 - protein, 978 aa, synthetic construct
  REGION 1..978: note = engineered CasX variant
QEIKRINKIRRRLVKDSNTKKAGKTGPMKTLLVRVMTPDLRERLENLRKKPENIPQPISNTSRANLNKLLTDYTEMKKAILHVYWEEFQKDPVGLMSRVAQPASKKIDQNKLKPEMDEKGNLTTAGFACSQCGQPLFVYKLEQVSEKGKAYTNYFGRCNVAEHEKLIKLAQLKPEKDSDEAVTYSLGKFGQRALDFYSIHVTKESTHPVKPLAQIAGNRYASGPVGKALSDACMGTIASFLSKYQDIIIEHQKVVKGNQKRLESLRELAGKENLEYPSVTLPPQPHTKEGVDAYNEVIARVRMWVNLNLWQKLKLSRDDAKPLLRLKGFPSFPLVERQANEVDWWDMVCNVKKLINEKKEDGKVFWQNLAGYKRQEALRPYLSSEEDRKKGKKFARYQLGDLLLHLEKKHPEDWGKVYDEAWERIDKKVEGLSKHIKLEEERRSEDAQSKAALTDWLRAKASFVIEGLKEADKDEFCRCDLKLQKWYGDLRGKPFAIEAENSILDISGFSKQYNCAFIWQKDGVKKLNLYLIINYFKGGKLRFKKIKPEAFEANRFYTVINKKSGEIVPMEVNFNFDDPNLIILPLAFGKRQGREFIWNDLLSLETGSLKLANGRVIEKTLYNRRTRQDEPALFVALTFERREVLDSSNIKPMNLIGVDRGENIPAVIALTDPEGCPLSRFKDSLGNPTHILRIGESYKEKQRTIQAKKEVEQRRAGGYSRKYASKAKNLADDMVRNTARDLLYYAVTQDAMLIFENLSRGFGRQGKRTFMAERQYTRMEDWLTAKLAYEGLPSKTYLSKTLAQYTSKTCSNCGFTITSADYDRVLEKLKKTATGWMTTINGKELKVEGQITYYNRYKRQNVVKDLSVELDRLSEESVNNDISSWTKGRSGEALSLLKKRFSHRPVQEKFVCLNCGFETHADEQAALNIARSWLFLRSQEYKKYQTNKTTGNTDKRAFVETWQSFYRKKLKEVWKPAV

SEQ ID NO: 44783 - protein, 977 aa, synthetic construct
  REGION 1..977: note = engineered CasX variant
QEIKRINKIRRRLVKDSNTKKAGKTGPMKTLLVRVMTPDLRERLENLRKKPENIPQPISNTSRANLNKLLTDYTEMKKAILHVYWEEFQKDPVGLMSRVAQPASKKIDQNKLKPEMDEKGNLTTAGFACSQCGQPLFVYKLEQVSEKGKAYTNYFGRCNVAEHEKLILLAQLKPEKDSDEAVTYSLGKFGQRALDFYSIHVTKESTHPVKPLAQIAGNRYASPVGKALSDACMGTIASFLSKYQDIIIEHQKVVKGNQKRLESLRELAGKENLEYPSVTLPPQPHTKEGVDAYNEVIARVRMWVNLNLWQKLKLSRDDAKPLLRLKGFPSFPLVERQANEVDWWDMVCNVKKLINEKKEDGKVFWQNLAGYKRQEALRPYLSSEEDRKKGKKFARYQLGDLLLHLEKKHPEDWGKVYDEAWERIDKKVEGLSKHIKLEEERRSEDAQSKAALTDWLRAKASFVIEGLKEADKDEFCRCDLKLQKWYGDLRGKPFAIEAENSILDISGFSKQYNCAFIWQKDGVKKLNLYLIINYFKGGKLRFKKIKPEAFEANRFYTVINKKSGEIVPMEVNFNFDDPNLIILPLAFGKRQGREFIWNDLLSLETGSLKLANGRVIEKTLYNRRTRQDEPALFVALTFERREVLDSSNIKPMNLIGVDRGENIPAVIALTDPEGCPLSRFKDSLGNPTHILRIGESYKEKQRTIQAKKEVEQRRAGGYSRKYASKAKNLADDMVRNTARDLLYYAVTQDAMLIFENLSRGFGRQGKRTFMAERQYTRMEDWLTAKLAYEGLPSKTYLSKTLAQYTSKTCSNCGFTITSADYDRVLEKLKKTATGWMTTINGKELKVEGQITYYNRYKRQNVVKDLSVELDRLSEESVNNDISSWTKGRSGEALSLLKKRFSHRPVQEKFVCLNCGFETHADEQAALNIARSWLFLRSQEYKKYQTNKTTGNTDKRAFVETWQSFYRKKLKEVWKPAV

SEQ ID NO: 44784 - protein, 979 aa, synthetic construct
  REGION 1..979: note = engineered CasX variant
QEIKRINKIRRRLVKDSNTKKAGKTGPMKTLLVRVMTPDLRERLENLRKKPENIPQPISNTSRANLNKLLTDYTEMKKAILHVYWEEFQKDPVGLMSRVAQPASKKIDQNKLKPEMDEKGNLTTAGFACSQCGQPLFVYKLEQVSEKGKAYTNYFGRCNVAEHEKLILLAQLKPEKDSDEAVTYSLGKFGQRALDFYSIHVTKESTHPVKPLAQIAGNRYASYPVGKALSDACMGTIASFLSKYQDIIIEHQKVVKGNQKRLESLRELAGKENLEYPSVTLPPQPHTKEGVDAYNEVIARVRMWVNLNLWQKLKLSRDDAKPLLRLKGFPSFPLVERQANEVDWWDMVCNVKKLINEKKEDGKVFWQNLAGYKRQEALRPYLSSEEDRKKGKKFARYQLGDLLLHLEKKHGERDWGKVYDEAWERIDKKVEGLSKHIKLEEERRSEDAQSKAALTDWLRAKASFVIEGLKEADKDEFCRCDLKLQKWYGDLRGKPFAIEAENSILDISGFSKQYNCAFIWQKDGVKKLNLYLIINYFKGGKLRFKKIKPEAFEANRFYTVINKKSGEIVPMEVNFNFDDPNLIILPLAFGKRQGREFIWNDLLSLETGSLKLANGRVIEKTLYNRRTRQDEPALFVALTFERREVLDSSNIKPMNLIGVDRGENIPAVIALTDPEGCPLSRFKDSLGNPTHILRIGESYKEKQRTIQAKKEVEQRRAGGYSRKYASKAKNLADDMVRNTARDLLYYAVTQDAMLIFENLSRGFGRQGKRTFMAERQYTRMEDWLTAKLAYEGLPSKTYLSKTLAQYTSKTCSNCGFTITSADYDRVLEKLKKTATGWMTTINGKELKVEGQITYYNRYKRQNVVKDLSVELDRLSEESVNNDISSWTKGRSGEALSLLKKRFSHRPVQEKFVCLNCGFETHADEQAALNIARSWLFLRSQEYKKYQTNKTTGNTDKRAFVETWQSFYRKKLKEVWKPAV

SEQ ID NO: 44785 - protein, 979 aa, synthetic construct
  REGION 1..979: note = engineered CasX variant
QEIKRINKIRRRLVKDSNTKKAGKTGPMKTLLVRVMTPDLRERLENLRKKPENIPQPISNTSRANLNKLLTDYTEMKKAILHVYWEEFQKDPVGLMSRVAQPASKKIDQNKLKPEMDEKGNLTTAGFACSQCGQPLFVYKLEQVSEKGKAYTNYFGRCNVAEHEKLILLAQLKPEKDSDEAVTYSLGKFGQRALDFYSIHVTKESTHPVKPLAQIAGNRYASHPVGKALSDACMGTIASFLSKYQDIIIEHQKVVKGNQKRLESLRELAGKENLEYPSVTLPPQPHTKEGVDAYNEVIARVRMWVNLNLWQKLKLSRDDAKPLLRLKGFPSFPLVERQANEVDWWDMVCNVKKLINEKKEDGKVFWQNLAGYKRQEALRPYLSSEEDRKKGKKFARYQLGDLLLHLEKKHGERDWGKVYDEAWERIDKKVEGLSKHIKLEEERRSEDAQSKAALTDWLRAKASFVIEGLKEADKDEFCRCDLKLQKWYGDLRGKPFAIEAENSILDISGFSKQYNCAFIWQKDGVKKLNLYLIINYFKGGKLRFKKIKPEAFEANRFYTVINKKSGEIVPMEVNFNFDDPNLIILPLAFGKRQGREFIWNDLLSLETGSLKLANGRVIEKTLYNRRTRQDEPALFVALTFERREVLDSSNIKPMNLIGVDRGENIPAVIALTDPEGCPLSRFKDSLGNPTHILRIGESYKEKQRTIQAKKEVEQRRAGGYSRKYASKAKNLADDMVRNTARDLLYYAVTQDAMLIFENLSRGFGRQGKRTFMAERQYTRMEDWLTAKLAYEGLPSKTYLSKTLAQYTSKTCSNCGFTITSADYDRVLEKLKKTATGWMTTINGKELKVEGQITYYNRYKRQNVVKDLSVELDRLSEESVNNDISSWTKGRSGEALSLLKKRFSHRPVQEKFVCLNCGFETHADEQAALNIARSWLFLRSQEYKKYQTNKTTGNTDKRAFVETWQSFYRKKLKEVWKPAV

SEQ ID NO: 44786 - protein, 979 aa, synthetic construct
  REGION 1..979: note = engineered CasX variant
QEIKRINKIRRRLVKDSNTKKAGKTGPMKTLLVRVMTPDLRERLENLRKKPENIPQPISNTSRANLNKLLTDYTEMKKAILHVYWEEFQKDPVGLMSRVAQPASKKIDQNKLKPEMDEKGNLTTAGFACSQCGQPLFVYKLEQVSEKGKAYTNYFGRCNVAEHEKLILLAQLKPEKDSDEAVTYSLGKFGQRALDFYSIHVTKESTHPVKPLAQIAGNRYASSPVGKALSDACMGTIASFLSKYQDIIIEHQKVVKGNQKRLESLRELAGKENLEYPSVTLPPQPHTKEGVDAYNEVIARVRMWVNLNLWQKLKLSRDDAKPLLRLKGFPSFPLVERQANEVDWWDMVCNVKKLINEKKEDGKVFWQNLAGYKRQEALRPYLSSEEDRKKGKKFARYQLGDLLLHLEKKHGERDWGKVYDEAWERIDKKVEGLSKHIKLEEERRSEDAQSKAALTDWLRAKASFVIEGLKEADKDEFCRCDLKLQKWYGDLRGKPFAIEAENSILDISGFSKQYNCAFIWQKDGVKKLNLYLIINYFKGGKLRFKKIKPEAFEANRFYTVINKKSGEIVPMEVNFNFDDPNLIILPLAFGKRQGREFIWNDLLSLETGSLKLANGRVIEKTLYNRRTRQDEPALFVALTFERREVLDSSNIKPMNLIGVDRGENIPAVIALTDPEGCPLSRFKDSLGNPTHILRIGESYKEKQRTIQAKKEVEQRRAGGYSRKYASKAKNLADDMVRNTARDLLYYAVTQDAMLIFENLSRGFGRQGKRTFMAERQYTRMEDWLTAKLAYEGLPSKTYLSKTLAQYTSKTCSNCGFTITSADYDRVLEKLKKTATGWMTTINGKELKVEGQITYYNRYKRQNVVKDLSVELDRLSEESVNNDISSWTKGRSGEALSLLKKRFSHRPVQEKFVCLNCGFETHADEQAALNIARSWLFLRSQEYKKYQTNKTTGNTDKRAFVETWQSFYRKKLKEVWKPAV

SEQ ID NO: 44787 - protein, 979 aa, synthetic construct
  REGION 1..979: note = engineered CasX variant
QEIKRINKIRRRLVKDSNTKKAGKTGPMKTLLVRVMTPDLRERLENLRKKPENIPQPISNTSRANLNKLLTDYTEMKKAILHVYWEEFQKDPVGLMSRVAQPASKKIDQNKLKPEMDEKGNLTTAGFACSQCGQPLFVYKLEQVSEKGKAYTNYFGRCNVAEHEKLILLAQLKPEKDSDEAVTYSLGKFGQRALDFYSIHVTKESTHPVKPLAQIAGNRYASTPVGKALSDACMGTIASFLSKYQDIIIEHQKVVKGNQKRLESLRELAGKENLEYPSVTLPPQPHTKEGVDAYNEVIARVRMWVNLNLWQKLKLSRDDAKPLLRLKGFPSFPLVERQANEVDWWDMVCNVKKLINEKKEDGKVFWQNLAGYKRQEALRPYLSSEEDRKKGKKFARYQLGDLLLHLEKKHGERDWGKVYDEAWERIDKKVEGLSKHIKLEEERRSEDAQSKAALTDWLRAKASFVIEGLKEADKDEFCRCDLKLQKWYGDLRGKPFAIEAENSILDISGFSKQYNCAFIWQKDGVKKLNLYLIINYFKGGKLRFKKIKPEAFEANRFYTVINKKSGEIVPMEVNFNFDDPNLIILPLAFGKRQGREFIWNDLLSLETGSLKLANGRVIEKTLYNRRTRQDEPALFVALTFERREVLDSSNIKPMNLIGVDRGENIPAVIALTDPEGCPLSRFKDSLGNPTHILRIGESYKEKQRTIQAKKEVEQRRAGGYSRKYASKAKNLADDMVRNTARDLLYYAVTQDAMLIFENLSRGFGRQGKRTFMAERQYTRMEDWLTAKLAYEGLPSKTYLSKTLAQYTSKTCSNCGFTITSADYDRVLEKLKKTATGWMTTINGKELKVEGQITYYNRYKRQNVVKDLSVELDRLSEESVNNDISSWTKGRSGEALSLLKKRFSHRPVQEKFVCLNCGFETHADEQAALNIARSWLFLRSQEYKKYQTNKTTGNTDKRAFVETWQSFYRKKLKEVWKPAV

SEQ ID NO: 44788 - protein, 979 aa, synthetic construct
  REGION 1..979: note = engineered CasX variant
QEIKRINKIRRRLVKDSNTKKAGKTGPMKTLLVRVMTPDLRERLENLRKKPENIPQPISNTSRANLNKLLTDYTEMKKAILHVYWEEFQKDPVGLMSRVAQPASKKIDQNKLKPEMDEKGNLTTAGFACSQCGQPLFVYKLEQVSEKGKAYTNYFGRCNVAEHEKLILLAQLKPEKDSDEAVTYSLGKFGQRALDFYSIHVTKESTHPVKPLAQIAGNRYASAPVGKALSDACMGTIASFLSKYQDIIIEHQKVVKGNQKRLESLRELAGKENLEYPSVTLPPQPHTKEGVDAYNEVIARVRMWVNLNLWQKLKLSRDDAKPLLRLKGFPSFPLVERQANEVDWWDMVCNVKKLINEKKEDGKVFWQNLAGYKRQEALRPYLSSEEDRKKGKKFARYQLGDLLLHLEKKHGERDWGKVYDEAWERIDKKVEGLSKHIKLEEERRSEDAQSKAALTDWLRAKASFVIEGLKEADKDEFCRCDLKLQKWYGDLRGKPFAIEAENSILDISGFSKQYNCAFIWQKDGVKKLNLYLIINYFKGGKLRFKKIKPEAFEANRFYTVINKKSGEIVPMEVNFNFDDPNLIILPLAFGKRQGREFIWNDLLSLETGSLKLANGRVIEKTLYNRRTRQDEPALFVALTFERREVLDSSNIKPMNLIGVDRGENIPAVIALTDPEGCPLSRFKDSLGNPTHILRIGESYKEKQRTIQAKKEVEQRRAGGYSRKYASKAKNLADDMVRNTARDLLYYAVTQDAMLIFENLSRGFGRQGKRTFMAERQYTRMEDWLTAKLAYEGLPSKTYLSKTLAQYTSKTCSNCGFTITSADYDRVLEKLKKTATGWMTTINGKELKVEGQITYYNRYKRQNVVKDLSVELDRLSEESVNNDISSWTKGRSGEALSLLKKRFSHRPVQEKFVCLNCGFETHADEQAALNIARSWLFLRSQEYKKYQTNKTTGNTDKRAFVETWQSFYRKKLKEVWKPAV

SEQ ID NO: 44789 - protein, 979 aa, synthetic construct
  REGION 1..979: note = engineered CasX variant
QEIKRINKIRRRLVKDSNTKKAGKTGPMKTLLVRVMTPDLRERLENLRKKPENIPQPISNTSRANLNKLLTDYTEMKKAILHVYWEEFQKDPVGLMSRVAQPASKKIDQNKLKPEMDEKGNLTTAGFACSQCGQPLFVYKLEQVSEKGKAYTNYFGRCNVAEHEKLILLAQLKPEKDSDEAVTYSLGKFGQRALDFYSIHVTKESTHPVKPLAQIAGNRYASVPVGKALSDACMGTIASFLSKYQDIIIEHQKVVKGNQKRLESLRELAGKENLEYPSVTLPPQPHTKEGVDAYNEVIARVRMWVNLNLWQKLKLSRDDAKPLLRLKGFPSFPLVERQANEVDWWDMVCNVKKLINEKKEDGKVFWQNLAGYKRQEALRPYLSSEEDRKKGKKFARYQLGDLLLHLEKKHGERDWGKVYDEAWERIDKKVEGLSKHIKLEEERRSEDAQSKAALTDWLRAKASFVIEGLKEADKDEFCRCDLKLQKWYGDLRGKPFAIEAENSILDISGFSKQYNCAFIWQKDGVKKLNLYLIINYFKGGKLRFKKIKPEAFEANRFYTVINKKSGEIVPMEVNFNFDDPNLIILPLAFGKRQGREFIWNDLLSLETGSLKLANGRVIEKTLYNRRTRQDEPALFVALTFERREVLDSSNIKPMNLIGVDRGENIPAVIALTDPEGCPLSRFKDSLGNPTHILRIGESYKEKQRTIQAKKEVEQRRAGGYSRKYASKAKNLADDMVRNTARDLLYYAVTQDAMLIFENLSRGFGRQGKRTFMAERQYTRMEDWLTAKLAYEGLPSKTYLSKTLAQYTSKTCSNCGFTITSADYDRVLEKLKKTATGWMTTINGKELKVEGQITYYNRYKRQNVVKDLSVELDRLSEESVNNDISSWTKGRSGEALSLLKKRFSHRPVQEKFVCLNCGFETHADEQAALNIARSWLFLRSQEYKKYQTNKTTGNTDKRAFVETWQSFYRKKLKEVWKPAV

SEQ ID NO: 44790 - protein, 979 aa, synthetic construct
  REGION 1..979: note = engineered CasX variant
QEIKRINKIRRRLVKDSNTKKAGKTGPMKTLLVRVMTPDLRERLENLRKKPENIPQPISNTSRANLNKLLTDYTEMKKAILHVYWEEFQKDPVGLMSRVAQPASKKIDQNKLKPEMDEKGNLTTAGFACSQCGQPLFVYKLEQVSEKGKAYTNYFGRCNVAEHEKLIKLAQLKPEKDSDEAVTYSLGKFGQRALDFYSIHVTKESTHPVKPLAQIAGNRYASGPVGKALSDACMGTIASFLSKYQDIIIEHQKVVKGNQKRLESLRELAGKENLEYPSVTLPPQPHTKEGVDAYNEVIARVRMWVNLNLWQKLKLSRDDAKPLLRLKGFPSFPLVERQANEVDWWDMVCNVKKLINEKKEDGKVFWQNLAGYKRQEALRPYLSSEEDRKKGKKFARYQLGDLLLHLEKKHGERDWGKVYDEAWERIDKKVEGLSKHIKLEEERRSEDAQSKAALTDWLRAKASFVIEGLKEADKDEFCRCDLKLQKWYGDLRGKPFAIEAENSILDISGFSKQYNCAFIWQKDGVKKLNLYLIINYFKGGKLRFKKIKPEAFEANRFYTVINKKSGEIVPMEVNFNFDDPNLIILPLAFGKRQGREFIWNDLLSLETGSLKLANGRVIEKTLYNRRTRQDEPALFVALTFERREVLDSSNIKPMNLIGVDRGENIPAVIALTDPEGCPLSRFKDSLGNPTHILRIGESYKEKQRTIQAKKEVEQRRAGGYSRKYASKAKNLADDMVRNTARDLLYYAVTQDAMLIFENLSRGFGRQGKRTFMAERQYTRMEDWLTAKLAYEGLPSKTYLSKTLAQYTSKTCSNCGFTITSADYDRVLEKLKKTATGWMTTINGKELKVEGQITYYNRYKRQNVVKDLSVELDRLSEESVNNDISSWTKGRSGEALSLLKKRFSHRPVQEKFVCLNCGFETHADEQAALNIARSWLFLRSQEYKKYQTNKTTGNTDKRAFVETWQSFYRKKLKEVWKPAV

SEQ ID NO: 44791 - protein, 978 aa, synthetic construct
  REGION 1..978: note = engineered CasX variant
QEIKRINKIRRRLVKDSNTKKAGKTGPMKTLLVRVMTPDLRERLENLRKKPENIPQPISNTSRANLNKLLTDYTEMKKAILHVYWEEFQKDPVGLMSRVAQPASKKIDQNKLKPEMDEKGNLTTAGFACSQCGQPLFVYKLEQVSEKGKAYTNYFGRCNVAEHEKLILLAQLKPEKDSDEAVTYSLGKFGQRALDFYSIHVTKESTHPVKPLAQIAGNRYASPVGKALSDACMGTIASFLSKYQDIIIEHQKVVKGNQKRLESLRELAGKENLEYPSVTLPPQPHTKEGVDAYNEVIARVRMWVNLNLWQKLKLSRDDAKPLLRLKGFPSFPLVERQANEVDWWDMVCNVKKLINEKKEDGKVFWQNLAGYKRQEALRPYLSSEEDRKKGKKFARYQLGDLLLHLEKKHGERDWGKVYDEAWERIDKKVEGLSKHIKLEEERRSEDAQSKAALTDWLRAKASFVIEGLKEADKDEFCRCDLKLQKWYGDLRGKPFAIEAENSILDISGFSKQYNCAFIWQKDGVKKLNLYLIINYFKGGKLRFKKIKPEAFEANRFYTVINKKSGEIVPMEVNFNFDDPNLIILPLAFGKRQGREFIWNDLLSLETGSLKLANGRVIEKTLYNRRTRQDEPALFVALTFERREVLDSSNIKPMNLIGVDRGENIPAVIALTDPEGCPLSRFKDSLGNPTHILRIGESYKEKQRTIQAKKEVEQRRAGGYSRKYASKAKNLADDMVRNTARDLLYYAVTQDAMLIFENLSRGFGRQGKRTFMAERQYTRMEDWLTAKLAYEGLPSKTYLSKTLAQYTSKTCSNCGFTITSADYDRVLEKLKKTATGWMTTINGKELKVEGQITYYNRYKRQNVVKDLSVELDRLSEESVNNDISSWTKGRSGEALSLLKKRFSHRPVQEKFVCLNCGFETHADEQAALNIARSWLFLRSQEYKKYQTNKTTGNTDKRAFVETWQSFYRKKLKEVWKPAV

SEQ ID NO: 44792 - protein, 979 aa, synthetic construct
  REGION 1..979: note = engineered CasX variant
QEIKRINKIRRRLVKDSNTKKAGKTGPMKTLLVRVMTPDLRERLENLRKKPENIPQPISNTSRANLNKLLTDYTEMKKAILHVYWEEFQKDPVGLMSRVAQPASKKIDQNKLKPEMDEKGNLTTAGFACSQCGQPLFVYKLEQVSEKGKAYTNYFGRCNVAEHEKLILLAQLKPEKDSDEAVTYSLGKFGQRALDFYSIHVTKESTHPVKPLAQIAGNRYASYPVGKALSDACMGTIASFLSKYQDIIIEHQKVVKGNQKRLESLRELAGKENLEYPSVTLPPQPHTKEGVDAYNEVIARVRMWVNLNLWQKLKLSRDDAKPLLRLKGFPSFPLVERQANEVDWWDMVCNVKKLINEKKEDGKVFWQNLAGYKRQEALRPYLSSEEDRKKGKKFARYQLGDLLLHLEKKHGEYDWGKVYDEAWERIDKKVEGLSKHIKLEEERRSEDAQSKAALTDWLRAKASFVIEGLKEADKDEFCRCDLKLQKWYGDLRGKPFAIEAENSILDISGFSKQYNCAFIWQKDGVKKLNLYLIINYFKGGKLRFKKIKPEAFEANRFYTVINKKSGEIVPMEVNFNFDDPNLIILPLAFGKRQGREFIWNDLLSLETGSLKLANGRVIEKTLYNRRTRQDEPALFVALTFERREVLDSSNIKPMNLIGVDRGENIPAVIALTDPEGCPLSRFKDSLGNPTHILRIGESYKEKQRTIQAKKEVEQRRAGGYSRKYASKAKNLADDMVRNTARDLLYYAVTQDAMLIFENLSRGFGRQGKRTFMAERQYTRMEDWLTAKLAYEGLPSKTYLSKTLAQYTSKTCSNCGFTITSADYDRVLEKLKKTATGWMTTINGKELKVEGQITYYNRYKRQNVVKDLSVELDRLSEESVNNDISSWTKGRSGEALSLLKKRFSHRPVQEKFVCLNCGFETHADEQAALNIARSWLFLRSQEYKKYQTNKTTGNTDKRAFVETWQSFYRKKLKEVWKPAV

SEQ ID NO: 44793 - protein, 979 aa, synthetic construct
  REGION 1..979: note = engineered CasX variant
QEIKRINKIRRRLVKDSNTKKAGKTGPMKTLLVRVMTPDLRERLENLRKKPENIPQPISNTSRANLNKLLTDYTEMKKAILHVYWEEFQKDPVGLMSRVAQPASKKIDQNKLKPEMDEKGNLTTAGFACSQCGQPLFVYKLEQVSEKGKAYTNYFGRCNVAEHEKLILLAQLKPEKDSDEAVTYSLGKFGQRALDFYSIHVTKESTHPVKPLAQIAGNRYASHPVGKALSDACMGTIASFLSKYQDIIIEHQKVVKGNQKRLESLRELAGKENLEYPSVTLPPQPHTKEGVDAYNEVIARVRMWVNLNLWQKLKLSRDDAKPLLRLKGFPSFPLVERQANEVDWWDMVCNVKKLINEKKEDGKVFWQNLAGYKRQEALRPYLSSEEDRKKGKKFARYQLGDLLLHLEKKHGEYDWGKVYDEAWERIDKKVEGLSKHIKLEEERRSEDAQSKAALTDWLRAKASFVIEGLKEADKDEFCRCDLKLQKWYGDLRGKPFAIEAENSILDISGFSKQYNCAFIWQKDGVKKLNLYLIINYFKGGKLRFKKIKPEAFEANRFYTVINKKSGEIVPMEVNFNFDDPNLIILPLAFGKRQGREFIWNDLLSLETGSLKLANGRVIEKTLYNRRTRQDEPALFVALTFERREVLDSSNIKPMNLIGVDRGENIPAVIALTDPEGCPLSRFKDSLGNPTHILRIGESYKEKQRTIQAKKEVEQRRAGGYSRKYASKAKNLADDMVRNTARDLLYYAVTQDAMLIFENLSRGFGRQGKRTFMAERQYTRMEDWLTAKLAYEGLPSKTYLSKTLAQYTSKTCSNCGFTITSADYDRVLEKLKKTATGWMTTINGKELKVEGQITYYNRYKRQNVVKDLSVELDRLSEESVNNDISSWTKGRSGEALSLLKKRFSHRPVQEKFVCLNCGFETHADEQAALNIARSWLFLRSQEYKKYQTNKTTGNTDKRAFVETWQSFYRKKLKEVWKPAV

SEQ ID NO: 44794 - protein, 979 aa, synthetic construct
  REGION 1..979: note = engineered CasX variant
QEIKRINKIRRRLVKDSNTKKAGKTGPMKTLLVRVMTPDLRERLENLRKKPENIPQPISNTSRANLNKLLTDYTEMKKAILHVYWEEFQKDPVGLMSRVAQPASKKIDQNKLKPEMDEKGNLTTAGFACSQCGQPLFVYKLEQVSEKGKAYTNYFGRCNVAEHEKLILLAQLKPEKDSDEAVTYSLGKFGQRALDFYSIHVTKESTHPVKPLAQIAGNRYASSPVGKALSDACMGTIASFLSKYQDIIIEHQKVVKGNQKRLESLRELAGKENLEYPSVTLPPQPHTKEGVDAYNEVIARVRMWVNLNLWQKLKLSRDDAKPLLRLKGFPSFPLVERQANEVDWWDMVCNVKKLINEKKEDGKVFWQNLAGYKRQEALRPYLSSEEDRKKGKKFARYQLGDLLLHLEKKHGEYDWGKVYDEAWERIDKKVEGLSKHIKLEEERRSEDAQSKAALTDWLRAKASFVIEGLKEADKDEFCRCDLKLQKWYGDLRGKPFAIEAENSILDISGFSKQYNCAFIWQKDGVKKLNLYLIINYFKGGKLRFKKIKPEAFEANRFYTVINKKSGEIVPMEVNFNFDDPNLIILPLAFGKRQGREFIWNDLLSLETGSLKLANGRVIEKTLYNRRTRQDEPALFVALTFERREVLDSSNIKPMNLIGVDRGENIPAVIALTDPEGCPLSRFKDSLGNPTHILRIGESYKEKQRTIQAKKEVEQRRAGGYSRKYASKAKNLADDMVRNTARDLLYYAVTQDAMLIFENLSRGFGRQGKRTFMAERQYTRMEDWLTAKLAYEGLPSKTYLSKTLAQYTSKTCSNCGFTITSADYDRVLEKLKKTATGWMTTINGKELKVEGQITYYNRYKRQNVVKDLSVELDRLSEESVNNDISSWTKGRSGEALSLLKKRFSHRPVQEKFVCLNCGFETHADEQAALNIARSWLFLRSQEYKKYQTNKTTGNTDKRAFVETWQSFYRKKLKEVWKPAV

SEQ ID NO: 44795 - protein, 979 aa, synthetic construct
  REGION 1..979: note = engineered CasX variant
QEIKRINKIRRRLVKDSNTKKAGKTGPMKTLLVRVMTPDLRERLENLRKKPENIPQPISNTSRANLNKLLTDYTEMKKAILHVYWEEFQKDPVGLMSRVAQPASKKIDQNKLKPEMDEKGNLTTAGFACSQCGQPLFVYKLEQVSEKGKAYTNYFGRCNVAEHEKLILLAQLKPEKDSDEAVTYSLGKFGQRALDFYSIHVTKESTHPVKPLAQIAGNRYASTPVGKALSDACMGTIASFLSKYQDIIIEHQKVVKGNQKRLESLRELAGKENLEYPSVTLPPQPHTKEGVDAYNEVIARVRMWVNLNLWQKLKLSRDDAKPLLRLKGFPSFPLVERQANEVDWWDMVCNVKKLINEKKEDGKVFWQNLAGYKRQEALRPYLSSEEDRKKGKKFARYQLGDLLLHLEKKHGEYDWGKVYDEAWERIDKKVEGLSKHIKLEEERRSEDAQSKAALTDWLRAKASFVIEGLKEADKDEFCRCDLKLQKWYGDLRGKPFAIEAENSILDISGFSKQYNCAFIWQKDGVKKLNLYLIINYFKGGKLRFKKIKPEAFEANRFYTVINKKSGEIVPMEVNFNFDDPNLIILPLAFGKRQGREFIWNDLLSLETGSLKLANGRVIEKTLYNRRTRQDEPALFVALTFERREVLDSSNIKPMNLIGVDRGENIPAVIALTDPEGCPLSRFKDSLGNPTHILRIGESYKEKQRTIQAKKEVEQRRAGGYSRKYASKAKNLADDMVRNTARDLLYYAVTQDAMLIFENLSRGFGRQGKRTFMAERQYTRMEDWLTAKLAYEGLPSKTYLSKTLAQYTSKTCSNCGFTITSADYDRVLEKLKKTATGWMTTINGKELKVEGQITYYNRYKRQNVVKDLSVELDRLSEESVNNDISSWTKGRSGEALSLLKKRFSHRPVQEKFVCLNCGFETHADEQAALNIARSWLFLRSQEYKKYQTNKTTGNTDKRAFVETWQSFYRKKLKEVWKPAV

SEQ ID NO: 44796 - protein, 979 aa, synthetic construct
  REGION 1..979: note = engineered CasX variant
QEIKRINKIRRRLVKDSNTKKAGKTGPMKTLLVRVMTPDLRERLENLRKKPENIPQPISNTSRANLNKLLTDYTEMKKAILHVYWEEFQKDPVGLMSRVAQPASKKIDQNKLKPEMDEKGNLTTAGFACSQCGQPLFVYKLEQVSEKGKAYTNYFGRCNVAEHEKLILLAQLKPEKDSDEAVTYSLGKFGQRALDFYSIHVTKESTHPVKPLAQIAGNRYASAPVGKALSDACMGTIASFLSKYQDIIIEHQKVVKGNQKRLESLRELAGKENLEYPSVTLPPQPHTKEGVDAYNEVIARVRMWVNLNLWQKLKLSRDDAKPLLRLKGFPSFPLVERQANEVDWWDMVCNVKKLINEKKEDGKVFWQNLAGYKRQEALRPYLSSEEDRKKGKKFARYQLGDLLLHLEKKHGEYDWGKVYDEAWERIDKKVEGLSKHIKLEEERRSEDAQSKAALTDWLRAKASFVIEGLKEADKDEFCRCDLKLQKWYGDLRGKPFAIEAENSILDISGFSKQYNCAFIWQKDGVKKLNLYLIINYFKGGKLRFKKIKPEAFEANRFYTVINKKSGEIVPMEVNFNFDDPNLIILPLAFGKRQGREFIWNDLLSLETGSLKLANGRVIEKTLYNRRTRQDEPALFVALTFERREVLDSSNIKPMNLIGVDRGENIPAVIALTDPEGCPLSRFKDSLGNPTHILRIGESYKEKQRTIQAKKEVEQRRAGGYSRKYASKAKNLADDMVRNTARDLLYYAVTQDAMLIFENLSRGFGRQGKRTFMAERQYTRMEDWLTAKLAYEGLPSKTYLSKTLAQYTSKTCSNCGFTITSADYDRVLEKLKKTATGWMTTINGKELKVEGQITYYNRYKRQNVVKDLSVELDRLSEESVNNDISSWTKGRSGEALSLLKKRFSHRPVQEKFVCLNCGFETHADEQAALNIARSWLFLRSQEYKKYQTNKTTGNTDKRAFVETWQSFYRKKLKEVWKPAV

SEQ ID NO: 44797 - protein, 979 aa, synthetic construct
  REGION 1..979: note = engineered CasX variant
QEIKRINKIRRRLVKDSNTKKAGKTGPMKTLLVRVMTPDLRERLENLRKKPENIPQPISNTSRANLNKLLTDYTEMKKAILHVYWEEFQKDPVGLMSRVAQPASKKIDQNKLKPEMDEKGNLTTAGFACSQCGQPLFVYKLEQVSEKGKAYTNYFGRCNVAEHEKLILLAQLKPEKDSDEAVTYSLGKFGQRALDFYSIHVTKESTHPVKPLAQIAGNRYASVPVGKALSDACMGTIASFLSKYQDIIIEHQKVVKGNQKRLESLRELAGKENLEYPSVTLPPQPHTKEGVDAYNEVIARVRMWVNLNLWQKLKLSRDDAKPLLRLKGFPSFPLVERQANEVDWWDMVCNVKKLINEKKEDGKVFWQNLAGYKRQEALRPYLSSEEDRKKGKKFARYQLGDLLLHLEKKHGEYDWGKVYDEAWERIDKKVEGLSKHIKLEEERRSEDAQSKAALTDWLRAKASFVIEGLKEADKDEFCRCDLKLQKWYGDLRGKPFAIEAENSILDISGFSKQYNCAFIWQKDGVKKLNLYLIINYFKGGKLRFKKIKPEAFEANRFYTVINKKSGEIVPMEVNFNFDDPNLIILPLAFGKRQGREFIWNDLLSLETGSLKLANGRVIEKTLYNRRTRQDEPALFVALTFERREVLDSSNIKPMNLIGVDRGENIPAVIALTDPEGCPLSRFKDSLGNPTHILRIGESYKEKQRTIQAKKEVEQRRAGGYSRKYASKAKNLADDMVRNTARDLLYYAVTQDAMLIFENLSRGFGRQGKRTFMAERQYTRMEDWLTAKLAYEGLPSKTYLSKTLAQYTSKTCSNCGFTITSADYDRVLEKLKKTATGWMTTINGKELKVEGQITYYNRYKRQNVVKDLSVELDRLSEESVNNDISSWTKGRSGEALSLLKKRFSHRPVQEKFVCLNCGFETHADEQAALNIARSWLFLRSQEYKKYQTNKTTGNTDKRAFVETWQSFYRKKLKEVWKPAV

SEQ ID NO: 44798 - protein, 979 aa, synthetic construct
  REGION 1..979: note = engineered CasX variant
QEIKRINKIRRRLVKDSNTKKAGKTGPMKTLLVRVMTPDLRERLENLRKKPENIPQPISNTSRANLNKLLTDYTEMKKAILHVYWEEFQKDPVGLMSRVAQPASKKIDQNKLKPEMDEKGNLTTAGFACSQCGQPLFVYKLEQVSEKGKAYTNYFGRCNVAEHEKLIKLAQLKPEKDSDEAVTYSLGKFGQRALDFYSIHVTKESTHPVKPLAQIAGNRYASGPVGKALSDACMGTIASFLSKYQDIIIEHQKVVKGNQKRLESLRELAGKENLEYPSVTLPPQPHTKEGVDAYNEVIARVRMWVNLNLWQKLKLSRDDAKPLLRLKGFPSFPLVERQANEVDWWDMVCNVKKLINEKKEDGKVFWQNLAGYKRQEALRPYLSSEEDRKKGKKFARYQLGDLLLHLEKKHGEYDWGKVYDEAWERIDKKVEGLSKHIKLEEERRSEDAQSKAALTDWLRAKASFVIEGLKEADKDEFCRCDLKLQKWYGDLRGKPFAIEAENSILDISGFSKQYNCAFIWQKDGVKKLNLYLIINYFKGGKLRFKKIKPEAFEANRFYTVINKKSGEIVPMEVNFNFDDPNLIILPLAFGKRQGREFIWNDLLSLETGSLKLANGRVIEKTLYNRRTRQDEPALFVALTFERREVLDSSNIKPMNLIGVDRGENIPAVIALTDPEGCPLSRFKDSLGNPTHILRIGESYKEKQRTIQAKKEVEQRRAGGYSRKYASKAKNLADDMVRNTARDLLYYAVTQDAMLIFENLSRGFGRQGKRTFMAERQYTRMEDWLTAKLAYEGLPSKTYLSKTLAQYTSKTCSNCGFTITSADYDRVLEKLKKTATGWMTTINGKELKVEGQITYYNRYKRQNVVKDLSVELDRLSEESVNNDISSWTKGRSGEALSLLKKRFSHRPVQEKFVCLNCGFETHADEQAALNIARSWLFLRSQEYKKYQTNKTTGNTDKRAFVETWQSFYRKKLKEVWKPAV

SEQ ID NO: 44799 - protein, 978 aa, synthetic construct
  REGION 1..978: note = engineered CasX variant
QEIKRINKIRRRLVKDSNTKKAGKTGPMKTLLVRVMTPDLRERLENLRKKPENIPQPISNTSRANLNKLLTDYTEMKKAILHVYWEEFQKDPVGLMSRVAQPASKKIDQNKLKPEMDEKGNLTTAGFACSQCGQPLFVYKLEQVSEKGKAYTNYFGRCNVAEHEKLILLAQLKPEKDSDEAVTYSLGKFGQRALDFYSIHVTKESTHPVKPLAQIAGNRYASPVGKALSDACMGTIASFLSKYQDIIIEHQKVVKGNQKRLESLRELAGKENLEYPSVTLPPQPHTKEGVDAYNEVIARVRMWVNLNLWQKLKLSRDDAKPLLRLKGFPSFPLVERQANEVDWWDMVCNVKKLINEKKEDGKVFWQNLAGYKRQEALRPYLSSEEDRKKGKKFARYQLGDLLLHLEKKHGEYDWGKVYDEAWERIDKKVEGLSKHIKLEEERRSEDAQSKAALTDWLRAKASFVIEGLKEADKDEFCRCDLKLQKWYGDLRGKPFAIEAENSILDISGFSKQYNCAFIWQKDGVKKLNLYLIINYFKGGKLRFKKIKPEAFEANRFYTVINKKSGEIVPMEVNFNFDDPNLIILPLAFGKRQGREFIWNDLLSLETGSLKLANGRVIEKTLYNRRTRQDEPALFVALTFERREVLDSSNIKPMNLIGVDRGENIPAVIALTDPEGCPLSRFKDSLGNPTHILRIGESYKEKQRTIQAKKEVEQRRAGGYSRKYASKAKNLADDMVRNTARDLLYYAVTQDAMLIFENLSRGFGRQGKRTFMAERQYTRMEDWLTAKLAYEGLPSKTYLSKTLAQYTSKTCSNCGFTITSADYDRVLEKLKKTATGWMTTINGKELKVEGQITYYNRYKRQNVVKDLSVELDRLSEESVNNDISSWTKGRSGEALSLLKKRFSHRPVQEKFVCLNCGFETHADEQAALNIARSWLFLRSQEYKKYQTNKTTGNTDKRAFVETWQSFYRKKLKEVWKPAV

SEQ ID NO: 44800 - protein, 978 aa, synthetic construct
  REGION 1..978: note = engineered CasX variant
QEIKRINKIRRRLVKDSNTKKAGKTGPMKTLLVRVMTPDLRERLENLRKKPENIPQPISNTSRANLNKLLTDYTEMKKAILHVYWEEFQKDPVGLMSRVAQPASKKIDQNKLKPEMDEKGNLTTAGFACSQCGQPLFVYKLEQVSEKGKAYTNYFGRCNVAEHEKLILLAQLKPEKDSDEAVTYSLGKFGQRALDFYSIHVTKESTHPVKPLAQIAGNRYASYPVGKALSDACMGTIASFLSKYQDIIIEHQKVVKGNQKRLESLRELAGKENLEYPSVTLPPQPHTKEGVDAYNEVIARVRMWVNLNLWQKLKLSRDDAKPLLRLKGFPSFPLVERQANEVDWWDMVCNVKKLINEKKEDGKVFWQNLAGYKRQEALRPYLSSEEDRKKGKKFARYQLGDLLLHLEKKHGEDWGDVYDEAWERIDKKVEGLSKHIKLEEERRSEDAQSKAALTDWLRAKASFVIEGLKEADKDEFCRCDLKLQKWYGDLRGKPFAIEAENSILDISGFSKQYNCAFIWQKDGVKKLNLYLIINYFKGGKLRFKKIKPEAFEANRFYTVINKKSGEIVPMEVNFNFDDPNLIILPLAFGKRQGREFIWNDLLSLETGSLKLANGRVIEKTLYNRRTRQDEPALFVALTFERREVLDSSNIKPMNLIGVDRGENIPAVIALTDPEGCPLSRFKDSLGNPTHILRIGESYKEKQRTIQAKKEVEQRRAGGYSRKYASKAKNLADDMVRNTARDLLYYAVTQDAMLIFENLSRGFGRQGKRTFMAERQYTRMEDWLTAKLAYEGLPSKTYLSKTLAQYTSKTCSNCGFTITSADYDRVLEKLKKTATGWMTTINGKELKVEGQITYYNRYKRQNVVKDLSVELDRLSEESVNNDISSWTKGRSGEALSLLKKRFSHRPVQEKFVCLNCGFETHADEQAALNIARSWLFLRSQEYKKYQTNKTTGNTDKRAFVETWQSFYRKKLKEVWKPAV

SEQ ID NO: 44801 - protein, 978 aa, synthetic construct
  REGION 1..978: note = engineered CasX variant
QEIKRINKIRRRLVKDSNTKKAGKTGPMKTLLVRVMTPDLRERLENLRKKPENIPQPISNTSRANLNKLLTDYTEMKKAILHVYWEEFQKDPVGLMSRVAQPASKKIDQNKLKPEMDEKGNLTTAGFACSQCGQPLFVYKLEQVSEKGKAYTNYFGRCNVAEHEKLILLAQLKPEKDSDEAVTYSLGKFGQRALDFYSIHVTKESTHPVKPLAQIAGNRYASHPVGKALSDACMGTIASFLSKYQDIIIEHQKVVKGNQKRLESLRELAGKENLEYPSVTLPPQPHTKEGVDAYNEVIARVRMWVNLNLWQKLKLSRDDAKPLLRLKGFPSFPLVERQANEVDWWDMVCNVKKLINEKKEDGKVFWQNLAGYKRQEALRPYLSSEEDRKKGKKFARYQLGDLLLHLEKKHGEDWGDVYDEAWERIDKKVEGLSKHIKLEEERRSEDAQSKAALTDWLRAKASFVIEGLKEADKDEFCRCDLKLQKWYGDLRGKPFAIEAENSILDISGFSKQYNCAFIWQKDGVKKLNLYLIINYFKGGKLRFKKIKPEAFEANRFYTVINKKSGEIVPMEVNFNFDDPNLIILPLAFGKRQGREFIWNDLLSLETGSLKLANGRVIEKTLYNRRTRQDEPALFVALTFERREVLDSSNIKPMNLIGVDRGENIPAVIALTDPEGCPLSRFKDSLGNPTHILRIGESYKEKQRTIQAKKEVEQRRAGGYSRKYASKAKNLADDMVRNTARDLLYYAVTQDAMLIFENLSRGFGRQGKRTFMAERQYTRMEDWLTAKLAYEGLPSKTYLSKTLAQYTSKTCSNCGFTITSADYDRVLEKLKKTATGWMTTINGKELKVEGQITYYNRYKRQNVVKDLSVELDRLSEESVNNDISSWTKGRSGEALSLLKKRFSHRPVQEKFVCLNCGFETHADEQAALNIARSWLFLRSQEYKKYQTNKTTGNTDKRAFVETWQSFYRKKLKEVWKPAV

SEQ ID NO: 44802 - protein, 978 aa, synthetic construct
  REGION 1..978: note = engineered CasX variant
QEIKRINKIRRRLVKDSNTKKAGKTGPMKTLLVRVMTPDLRERLENLRKKPENIPQPISNTSRANLNKLLTDYTEMKKAILHVYWEEFQKDPVGLMSRVAQPASKKIDQNKLKPEMDEKGNLTTAGFACSQCGQPLFVYKLEQVSEKGKAYTNYFGRCNVAEHEKLILLAQLKPEKDSDEAVTYSLGKFGQRALDFYSIHVTKESTHPVKPLAQIAGNRYASSPVGKALSDACMGTIASFLSKYQDIIIEHQKVVKGNQKRLESLRELAGKENLEYPSVTLPPQPHTKEGVDAYNEVIARVRMWVNLNLWQKLKLSRDDAKPLLRLKGFPSFPLVERQANEVDWWDMVCNVKKLINEKKEDGKVFWQNLAGYKRQEALRPYLSSEEDRKKGKKFARYQLGDLLLHLEKKHGEDWGDVYDEAWERIDKKVEGLSKHIKLEEERRSEDAQSKAALTDWLRAKASFVIEGLKEADKDEFCRCDLKLQKWYGDLRGKPFAIEAENSILDISGFSKQYNCAFIWQKDGVKKLNLYLIINYFKGGKLRFKKIKPEAFEANRFYTVINKKSGEIVPMEVNFNFDDPNLIILPLAFGKRQGREFIWNDLLSLETGSLKLANGRVIEKTLYNRRTRQDEPALFVALTFERREVLDSSNIKPMNLIGVDRGENIPAVIALTDPEGCPLSRFKDSLGNPTHILRIGESYKEKQRTIQAKKEVEQRRAGGYSRKYASKAKNLADDMVRNTARDLLYYAVTQDAMLIFENLSRGFGRQGKRTFMAERQYTRMEDWLTAKLAYEGLPSKTYLSKTLAQYTSKTCSNCGFTITSADYDRVLEKLKKTATGWMTTINGKELKVEGQITYYNRYKRQNVVKDLSVELDRLSEESVNNDISSWTKGRSGEALSLLKKRFSHRPVQEKFVCLNCGFETHADEQAALNIARSWLFLRSQEYKKYQTNKTTGNTDKRAFVETWQSFYRKKLKEVWKPAV

SEQ ID NO: 44803 - protein, 978 aa, synthetic construct
  REGION 1..978: note = engineered CasX variant
QEIKRINKIRRRLVKDSNTKKAGKTGPMKTLLVRVMTPDLRERLENLRKKPENIPQPISNTSRANLNKLLTDYTEMKKAILHVYWEEFQKDPVGLMSRVAQPASKKIDQNKLKPEMDEKGNLTTAGFACSQCGQPLFVYKLEQVSEKGKAYTNYFGRCNVAEHEKLILLAQLKPEKDSDEAVTYSLGKFGQRALDFYSIHVTKESTHPVKPLAQIAGNRYASTPVGKALSDACMGTIASFLSKYQDIIIEHQKVVKGNQKRLESLRELAGKENLEYPSVTLPPQPHTKEGVDAYNEVIARVRMWVNLNLWQKLKLSRDDAKPLLRLKGFPSFPLVERQANEVDWWDMVCNVKKLINEKKEDGKVFWQNLAGYKRQEALRPYLSSEEDRKKGKKFARYQLGDLLLHLEKKHGEDWGDVYDEAWERIDKKVEGLSKHIKLEEERRSEDAQSKAALTDWLRAKASFVIEGLKEADKDEFCRCDLKLQKWYGDLRGKPFAIEAENSILDISGFSKQYNCAFIWQKDGVKKLNLYLIINYFKGGKLRFKKIKPEAFEANRFYTVINKKSGEIVPMEVNFNFDDPNLIILPLAFGKRQGREFIWNDLLSLETGSLKLANGRVIEKTLYNRRTRQDEPALFVALTFERREVLDSSNIKPMNLIGVDRGENIPAVIALTDPEGCPLSRFKDSLGNPTHILRIGESYKEKQRTIQAKKEVEQRRAGGYSRKYASKAKNLADDMVRNTARDLLYYAVTQDAMLIFENLSRGFGRQGKRTFMAERQYTRMEDWLTAKLAYEGLPSKTYLSKTLAQYTSKTCSNCGFTITSADYDRVLEKLKKTATGWMTTINGKELKVEGQITYYNRYKRQNVVKDLSVELDRLSEESVNNDISSWTKGRSGEALSLLKKRFSHRPVQEKFVCLNCGFETHADEQAALNIARSWLFLRSQEYKKYQTNKTTGNTDKRAFVETWQSFYRKKLKEVWKPAV

SEQ ID NO: 44804 - protein, 978 aa, synthetic construct
  REGION 1..978: note = engineered CasX variant
QEIKRINKIRRRLVKDSNTKKAGKTGPMKTLLVRVMTPDLRERLENLRKKPENIPQPISNTSRANLNKLLTDYTEMKKAILHVYWEEFQKDPVGLMSRVAQPASKKIDQNKLKPEMDEKGNLTTAGFACSQCGQPLFVYKLEQVSEKGKAYTNYFGRCNVAEHEKLILLAQLKPEKDSDEAVTYSLGKFGQRALDFYSIHVTKESTHPVKPLAQIAGNRYASAPVGKALSDACMGTIASFLSKYQDIIIEHQKVVKGNQKRLESLRELAGKENLEYPSVTLPPQPHTKEGVDAYNEVIARVRMWVNLNLWQKLKLSRDDAKPLLRLKGFPSFPLVERQANEVDWWDMVCNVKKLINEKKEDGKVFWQNLAGYKRQEALRPYLSSEEDRKKGKKFARYQLGDLLLHLEKKHGEDWGDVYDEAWERIDKKVEGLSKHIKLEEERRSEDAQSKAALTDWLRAKASFVIEGLKEADKDEFCRCDLKLQKWYGDLRGKPFAIEAENSILDISGFSKQYNCAFIWQKDGVKKLNLYLIINYFKGGKLRFKKIKPEAFEANRFYTVINKKSGEIVPMEVNFNFDDPNLIILPLAFGKRQGREFIWNDLLSLETGSLKLANGRVIEKTLYNRRTRQDEPALFVALTFERREVLDSSNIKPMNLIGVDRGENIPAVIALTDPEGCPLSRFKDSLGNPTHILRIGESYKEKQRTIQAKKEVEQRRAGGYSRKYASKAKNLADDMVRNTARDLLYYAVTQDAMLIFENLSRGFGRQGKRTFMAERQYTRMEDWLTAKLAYEGLPSKTYLSKTLAQYTSKTCSNCGFTITSADYDRVLEKLKKTATGWMTTINGKELKVEGQITYYNRYKRQNVVKDLSVELDRLSEESVNNDISSWTKGRSGEALSLLKKRFSHRPVQEKFVCLNCGFETHADEQAALNIARSWLFLRSQEYKKYQTNKTTGNTDKRAFVETWQSFYRKKLKEVWKPAV

SEQ ID NO: 44805 - protein, 978 aa, synthetic construct
  REGION 1..978: note = engineered CasX variant
QEIKRINKIRRRLVKDSNTKKAGKTGPMKTLLVRVMTPDLRERLENLRKKPENIPQPISNTSRANLNKLLTDYTEMKKAILHVYWEEFQKDPVGLMSRVAQPASKKIDQNKLKPEMDEKGNLTTAGFACSQCGQPLFVYKLEQVSEKGKAYTNYFGRCNVAEHEKLILLAQLKPEKDSDEAVTYSLGKFGQRALDFYSIHVTKESTHPVKPLAQIAGNRYASVPVGKALSDACMGTIASFLSKYQDIIIEHQKVVKGNQKRLESLRELAGKENLEYPSVTLPPQPHTKEGVDAYNEVIARVRMWVNLNLWQKLKLSRDDAKPLLRLKGFPSFPLVERQANEVDWWDMVCNVKKLINEKKEDGKVFWQNLAGYKRQEALRPYLSSEEDRKKGKKFARYQLGDLLLHLEKKHGEDWGDVYDEAWERIDKKVEGLSKHIKLEEERRSEDAQSKAALTDWLRAKASFVIEGLKEADKDEFCRCDLKLQKWYGDLRGKPFAIEAENSILDISGFSKQYNCAFIWQKDGVKKLNLYLIINYFKGGKLRFKKIKPEAFEANRFYTVINKKSGEIVPMEVNFNFDDPNLIILPLAFGKRQGREFIWNDLLSLETGSLKLANGRVIEKTLYNRRTRQDEPALFVALTFERREVLDSSNIKPMNLIGVDRGENIPAVIALTDPEGCPLSRFKDSLGNPTHILRIGESYKEKQRTIQAKKEVEQRRAGGYSRKYASKAKNLADDMVRNTARDLLYYAVTQDAMLIFENLSRGFGRQGKRTFMAERQYTRMEDWLTAKLAYEGLPSKTYLSKTLAQYTSKTCSNCGFTITSADYDRVLEKLKKTATGWMTTINGKELKVEGQITYYNRYKRQNVVKDLSVELDRLSEESVNNDISSWTKGRSGEALSLLKKRFSHRPVQEKFVCLNCGFETHADEQAALNIARSWLFLRSQEYKKYQTNKTTGNTDKRAFVETWQSFYRKKLKEVWKPAV

SEQ ID NO: 44806 - protein, 978 aa, synthetic construct
  REGION 1..978: note = engineered CasX variant
QEIKRINKIRRRLVKDSNTKKAGKTGPMKTLLVRVMTPDLRERLENLRKKPENIPQPISNTSRANLNKLLTDYTEMKKAILHVYWEEFQKDPVGLMSRVAQPASKKIDQNKLKPEMDEKGNLTTAGFACSQCGQPLFVYKLEQVSEKGKAYTNYFGRCNVAEHEKLIKLAQLKPEKDSDEAVTYSLGKFGQRALDFYSIHVTKESTHPVKPLAQIAGNRYASGPVGKALSDACMGTIASFLSKYQDIIIEHQKVVKGNQKRLESLRELAGKENLEYPSVTLPPQPHTKEGVDAYNEVIARVRMWVNLNLWQKLKLSRDDAKPLLRLKGFPSFPLVERQANEVDWWDMVCNVKKLINEKKEDGKVFWQNLAGYKRQEALRPYLSSEEDRKKGKKFARYQLGDLLLHLEKKHGEDWGDVYDEAWERIDKKVEGLSKHIKLEEERRSEDAQSKAALTDWLRAKASFVIEGLKEADKDEFCRCDLKLQKWYGDLRGKPFAIEAENSILDISGFSKQYNCAFIWQKDGVKKLNLYLIINYFKGGKLRFKKIKPEAFEANRFYTVINKKSGEIVPMEVNFNFDDPNLIILPLAFGKRQGREFIWNDLLSLETGSLKLANGRVIEKTLYNRRTRQDEPALFVALTFERREVLDSSNIKPMNLIGVDRGENIPAVIALTDPEGCPLSRFKDSLGNPTHILRIGESYKEKQRTIQAKKEVEQRRAGGYSRKYASKAKNLADDMVRNTARDLLYYAVTQDAMLIFENLSRGFGRQGKRTFMAERQYTRMEDWLTAKLAYEGLPSKTYLSKTLAQYTSKTCSNCGFTITSADYDRVLEKLKKTATGWMTTINGKELKVEGQITYYNRYKRQNVVKDLSVELDRLSEESVNNDISSWTKGRSGEALSLLKKRFSHRPVQEKFVCLNCGFETHADEQAALNIARSWLFLRSQEYKKYQTNKTTGNTDKRAFVETWQSFYRKKLKEVWKPAV

SEQ ID NO: 44807 - protein, 977 aa, synthetic construct
  REGION 1..977: note = engineered CasX variant
QEIKRINKIRRRLVKDSNTKKAGKTGPMKTLLVRVMTPDLRERLENLRKKPENIPQPISNTSRANLNKLLTDYTEMKKAILHVYWEEFQKDPVGLMSRVAQPASKKIDQNKLKPEMDEKGNLTTAGFACSQCGQPLFVYKLEQVSEKGKAYTNYFGRCNVAEHEKLILLAQLKPEKDSDEAVTYSLGKFGQRALDFYSIHVTKESTHPVKPLAQIAGNRYASPVGKALSDACMGTIASFLSKYQDIIIEHQKVVKGNQKRLESLRELAGKENLEYPSVTLPPQPHTKEGVDAYNEVIARVRMWVNLNLWQKLKLSRDDAKPLLRLKGFPSFPLVERQANEVDWWDMVCNVKKLINEKKEDGKVFWQNLAGYKRQEALRPYLSSEEDRKKGKKFARYQLGDLLLHLEKKHGEDWGDVYDEAWERIDKKVEGLSKHIKLEEERRSEDAQSKAALTDWLRAKASFVIEGLKEADKDEFCRCDLKLQKWYGDLRGKPFAIEAENSILDISGFSKQYNCAFIWQKDGVKKLNLYLIINYFKGGKLRFKKIKPEAFEANRFYTVINKKSGEIVPMEVNFNFDDPNLIILPLAFGKRQGREFIWNDLLSLETGSLKLANGRVIEKTLYNRRTRQDEPALFVALTFERREVLDSSNIKPMNLIGVDRGENIPAVIALTDPEGCPLSRFKDSLGNPTHILRIGESYKEKQRTIQAKKEVEQRRAGGYSRKYASKAKNLADDMVRNTARDLLYYAVTQDAMLIFENLSRGFGRQGKRTFMAERQYTRMEDWLTAKLAYEGLPSKTYLSKTLAQYTSKTCSNCGFTITSADYDRVLEKLKKTATGWMTTINGKELKVEGQITYYNRYKRQNVVKDLSVELDRLSEESVNNDISSWTKGRSGEALSLLKKRFSHRPVQEKFVCLNCGFETHADEQAALNIARSWLFLRSQEYKKYQTNKTTGNTDKRAFVETWQSFYRKKLKEVWKPAV

SEQ ID NO: 44808 - protein, 978 aa, synthetic construct
  REGION 1..978: note = engineered CasX variant
QEIKRINKIRRRLVKDSNTKKAGKTGPMKTLLVRVMTPDLRERLENLRKKPENIPQPISNTSRANLNKLLTDYTEMKKAILHVYWEEFQKDPVGLMSRVAQPASKKIDQNKLKPEMDEKGNLTTAGFACSQCGQPLFVYKLEQVSEKGKAYTNYFGRCNVAEHEKLILLAQLKPEKDSDEAVTYSLGKFGQRALDFYSIHVTKESTHPVKPLAQIAGNRYASYPVGKALSDACMGTIASFLSKYQDIIIEHQKVVKGNQKRLESLRELAGKENLEYPSVTLPPQPHTKEGVDAYNEVIARVRMWVNLNLWQKLKLSRDDAKPLLRLKGFPSFPLVERQANEVDWWDMVCNVKKLINEKKEDGKVFWQNLAGYKRQEALRPYLSSEEDRKKGKKFARYQLGDLLLHLEKKHGEDWGKVYGEAWERIDKKVEGLSKHIKLEEERRSEDAQSKAALTDWLRAKASFVIEGLKEADKDEFCRCDLKLQKWYGDLRGKPFAIEAENSILDISGFSKQYNCAFIWQKDGVKKLNLYLIINYFKGGKLRFKKIKPEAFEANRFYTVINKKSGEIVPMEVNFNFDDPNLIILPLAFGKRQGREFIWNDLLSLETGSLKLANGRVIEKTLYNRRTRQDEPALFVALTFERREVLDSSNIKPMNLIGVDRGENIPAVIALTDPEGCPLSRFKDSLGNPTHILRIGESYKEKQRTIQAKKEVEQRRAGGYSRKYASKAKNLADDMVRNTARDLLYYAVTQDAMLIFENLSRGFGRQGKRTFMAERQYTRMEDWLTAKLAYEGLPSKTYLSKTLAQYTSKTCSNCGFTITSADYDRVLEKLKKTATGWMTTINGKELKVEGQITYYNRYKRQNVVKDLSVELDRLSEESVNNDISSWTKGRSGEALSLLKKRFSHRPVQEKFVCLNCGFETHADEQAALNIARSWLFLRSQEYKKYQTNKTTGNTDKRAFVETWQSFYRKKLKEVWKPAV

SEQ ID NO: 44809 - protein, 978 aa, synthetic construct
  REGION 1..978: note = engineered CasX variant
QEIKRINKIRRRLVKDSNTKKAGKTGPMKTLLVRVMTPDLRERLENLRKKPENIPQPISNTSRANLNKLLTDYTEMKKAILHVYWEEFQKDPVGLMSRVAQPASKKIDQNKLKPEMDEKGNLTTAGFACSQCGQPLFVYKLEQVSEKGKAYTNYFGRCNVAEHEKLILLAQLKPEKDSDEAVTYSLGKFGQRALDFYSIHVTKESTHPVKPLAQIAGNRYASHPVGKALSDACMGTIASFLSKYQDIIIEHQKVVKGNQKRLESLRELAGKENLEYPSVTLPPQPHTKEGVDAYNEVIARVRMWVNLNLWQKLKLSRDDAKPLLRLKGFPSFPLVERQANEVDWWDMVCNVKKLINEKKEDGKVFWQNLAGYKRQEALRPYLSSEEDRKKGKKFARYQLGDLLLHLEKKHGEDWGKVYGEAWERIDKKVEGLSKHIKLEEERRSEDAQSKAALTDWLRAKASFVIEGLKEADKDEFCRCDLKLQKWYGDLRGKPFAIEAENSILDISGFSKQYNCAFIWQKDGVKKLNLYLIINYFKGGKLRFKKIKPEAFEANRFYTVINKKSGEIVPMEVNFNFDDPNLIILPLAFGKRQGREFIWNDLLSLETGSLKLANGRVIEKTLYNRRTRQDEPALFVALTFERREVLDSSNIKPMNLIGVDRGENIPAVIALTDPEGCPLSRFKDSLGNPTHILRIGESYKEKQRTIQAKKEVEQRRAGGYSRKYASKAKNLADDMVRNTARDLLYYAVTQDAMLIFENLSRGFGRQGKRTFMAERQYTRMEDWLTAKLAYEGLPSKTYLSKTLAQYTSKTCSNCGFTITSADYDRVLEKLKKTATGWMTTINGKELKVEGQITYYNRYKRQNVVKDLSVELDRLSEESVNNDISSWTKGRSGEALSLLKKRFSHRPVQEKFVCLNCGFETHADEQAALNIARSWLFLRSQEYKKYQTNKTTGNTDKRAFVETWQSFYRKKLKEVWKPAV

SEQ ID NO: 44810 - protein, 978 aa, synthetic construct
  REGION 1..978: note = engineered CasX variant
QEIKRINKIRRRLVKDSNTKKAGKTGPMKTLLVRVMTPDLRERLENLRKKPENIPQPISNTSRANLNKLLTDYTEMKKAILHVYWEEFQKDPVGLMSRVAQPASKKIDQNKLKPEMDEKGNLTTAGFACSQCGQPLFVYKLEQVSEKGKAYTNYFGRCNVAEHEKLILLAQLKPEKDSDEAVTYSLGKFGQRALDFYSIHVTKESTHPVKPLAQIAGNRYASSPVGKALSDACMGTIASFLSKYQDIIIEHQKVVKGNQKRLESLRELAGKENLEYPSVTLPPQPHTKEGVDAYNEVIARVRMWVNLNLWQKLKLSRDDAKPLLRLKGFPSFPLVERQANEVDWWDMVCNVKKLINEKKEDGKVFWQNLAGYKRQEALRPYLSSEEDRKKGKKFARYQLGDLLLHLEKKHGEDWGKVYGEAWERIDKKVEGLSKHIKLEEERRSEDAQSKAALTDWLRAKASFVIEGLKEADKDEFCRCDLKLQKWYGDLRGKPFAIEAENSILDISGFSKQYNCAFIWQKDGVKKLNLYLIINYFKGGKLRFKKIKPEAFEANRFYTVINKKSGEIVPMEVNFNFDDPNLIILPLAFGKRQGREFIWNDLLSLETGSLKLANGRVIEKTLYNRRTRQDEPALFVALTFERREVLDSSNIKPMNLIGVDRGENIPAVIALTDPEGCPLSRFKDSLGNPTHILRIGESYKEKQRTIQAKKEVEQRRAGGYSRKYASKAKNLADDMVRNTARDLLYYAVTQDAMLIFENLSRGFGRQGKRTFMAERQYTRMEDWLTAKLAYEGLPSKTYLSKTLAQYTSKTCSNCGFTITSADYDRVLEKLKKTATGWMTTINGKELKVEGQITYYNRYKRQNVVKDLSVELDRLSEESVNNDISSWTKGRSGEALSLLKKRFSHRPVQEKFVCLNCGFETHADEQAALNIARSWLFLRSQEYKKYQTNKTTGNTDKRAFVETWQSFYRKKLKEVWKPAV

SEQ ID NO: 44811 - protein, 978 aa, synthetic construct
  REGION 1..978: note = engineered CasX variant
QEIKRINKIRRRLVKDSNTKKAGKTGPMKTLLVRVMTPDLRERLENLRKKPENIPQPISNTSRANLNKLLTDYTEMKKAILHVYWEEFQKDPVGLMSRVAQPASKKIDQNKLKPEMDEKGNLTTAGFACSQCGQPLFVYKLEQVSEKGKAYTNYFGRCNVAEHEKLILLAQLKPEKDSDEAVTYSLGKFGQRALDFYSIHVTKESTHPVKPLAQIAGNRYASTPVGKALSDACMGTIASFLSKYQDIIIEHQKVVKGNQKRLESLRELAGKENLEYPSVTLPPQPHTKEGVDAYNEVIARVRMWVNLNLWQKLKLSRDDAKPLLRLKGFPSFPLVERQANEVDWWDMVCNVKKLINEKKEDGKVFWQNLAGYKRQEALRPYLSSEEDRKKGKKFARYQLGDLLLHLEKKHGEDWGKVYGEAWERIDKKVEGLSKHIKLEEERRSEDAQSKAALTDWLRAKASFVIEGLKEADKDEFCRCDLKLQKWYGDLRGKPFAIEAENSILDISGFSKQYNCAFIWQKDGVKKLNLYLIINYFKGGKLRFKKIKPEAFEANRFYTVINKKSGEIVPMEVNFNFDDPNLIILPLAFGKRQGREFIWNDLLSLETGSLKLANGRVIEKTLYNRRTRQDEPALFVALTFERREVLDSSNIKPMNLIGVDRGENIPAVIALTDPEGCPLSRFKDSLGNPTHILRIGESYKEKQRTIQAKKEVEQRRAGGYSRKYASKAKNLADDMVRNTARDLLYYAVTQDAMLIFENLSRGFGRQGKRTFMAERQYTRMEDWLTAKLAYEGLPSKTYLSKTLAQYTSKTCSNCGFTITSADYDRVLEKLKKTATGWMTTINGKELKVEGQITYYNRYKRQNVVKDLSVELDRLSEESVNNDISSWTKGRSGEALSLLKKRFSHRPVQEKFVCLNCGFETHADEQAALNIARSWLFLRSQEYKKYQTNKTTGNTDKRAFVETWQSFYRKKLKEVWKPAV

SEQ ID NO: 44812 - protein, 978 aa, synthetic construct
  REGION 1..978: note = engineered CasX variant
QEIKRINKIRRRLVKDSNTKKAGKTGPMKTLLVRVMTPDLRERLENLRKKPENIPQPISNTSRANLNKLLTDYTEMKKAILHVYWEEFQKDPVGLMSRVAQPASKKIDQNKLKPEMDEKGNLTTAGFACSQCGQPLFVYKLEQVSEKGKAYTNYFGRCNVAEHEKLILLAQLKPEKDSDEAVTYSLGKFGQRALDFYSIHVTKESTHPVKPLAQIAGNRYASAPVGKALSDACMGTIASFLSKYQDIIIEHQKVVKGNQKRLESLRELAGKENLEYPSVTLPPQPHTKEGVDAYNEVIARVRMWVNLNLWQKLKLSRDDAKPLLRLKGFPSFPLVERQANEVDWWDMVCNVKKLINEKKEDGKVFWQNLAGYKRQEALRPYLSSEEDRKKGKKFARYQLGDLLLHLEKKHGEDWGKVYGEAWERIDKKVEGLSKHIKLEEERRSEDAQSKAALTDWLRAKASFVIEGLKEADKDEFCRCDLKLQKWYGDLRGKPFAIEAENSILDISGFSKQYNCAFIWQKDGVKKLNLYLIINYFKGGKLRFKKIKPEAFEANRFYTVINKKSGEIVPMEVNFNFDDPNLIILPLAFGKRQGREFIWNDLLSLETGSLKLANGRVIEKTLYNRRTRQDEPALFVALTFERREVLDSSNIKPMNLIGVDRGENIPAVIALTDPEGCPLSRFKDSLGNPTHILRIGESYKEKQRTIQAKKEVEQRRAGGYSRKYASKAKNLADDMVRNTARDLLYYAVTQDAMLIFENLSRGFGRQGKRTFMAERQYTRMEDWLTAKLAYEGLPSKTYLSKTLAQYTSKTCSNCGFTITSADYDRVLEKLKKTATGWMTTINGKELKVEGQITYYNRYKRQNVVKDLSVELDRLSEESVNNDISSWTKGRSGEALSLLKKRFSHRPVQEKFVCLNCGFETHADEQAALNIARSWLFLRSQEYKKYQTNKTTGNTDKRAFVETWQSFYRKKLKEVWKPAV

SEQ ID NO: 44813 - protein, 978 aa, synthetic construct
  REGION 1..978: note = engineered CasX variant
QEIKRINKIRRRLVKDSNTKKAGKTGPMKTLLVRVMTPDLRERLENLRKKPENIPQPISNTSRANLNKLLTDYTEMKKAILHVYWEEFQKDPVGLMSRVAQPASKKIDQNKLKPEMDEKGNLTTAGFACSQCGQPLFVYKLEQVSEKGKAYTNYFGRCNVAEHEKLILLAQLKPEKDSDEAVTYSLGKFGQRALDFYSIHVTKESTHPVKPLAQIAGNRYASVPVGKALSDACMGTIASFLSKYQDIIIEHQKVVKGNQKRLESLRELAGKENLEYPSVTLPPQPHTKEGVDAYNEVIARVRMWVNLNLWQKLKLSRDDAKPLLRLKGFPSFPLVERQANEVDWWDMVCNVKKLINEKKEDGKVFWQNLAGYKRQEALRPYLSSEEDRKKGKKFARYQLGDLLLHLEKKHGEDWGKVYGEAWERIDKKVEGLSKHIKLEEERRSEDAQSKAALTDWLRAKASFVIEGLKEADKDEFCRCDLKLQKWYGDLRGKPFAIEAENSILDISGFSKQYNCAFIWQKDGVKKLNLYLIINYFKGGKLRFKKIKPEAFEANRFYTVINKKSGEIVPMEVNFNFDDPNLIILPLAFGKRQGREFIWNDLLSLETGSLKLANGRVIEKTLYNRRTRQDEPALFVALTFERREVLDSSNIKPMNLIGVDRGENIPAVIALTDPEGCPLSRFKDSLGNPTHILRIGESYKEKQRTIQAKKEVEQRRAGGYSRKYASKAKNLADDMVRNTARDLLYYAVTQDAMLIFENLSRGFGRQGKRTFMAERQYTRMEDWLTAKLAYEGLPSKTYLSKTLAQYTSKTCSNCGFTITSADYDRVLEKLKKTATGWMTTINGKELKVEGQITYYNRYKRQNVVKDLSVELDRLSEESVNNDISSWTKGRSGEALSLLKKRFSHRPVQEKFVCLNCGFETHADEQAALNIARSWLFLRSQEYKKYQTNKTTGNTDKRAFVETWQSFYRKKLKEVWKPAV

SEQ ID NO: 44814 - protein, 978 aa, synthetic construct
  REGION 1..978: note = engineered CasX variant
QEIKRINKIRRRLVKDSNTKKAGKTGPMKTLLVRVMTPDLRERLENLRKKPENIPQPISNTSRANLNKLLTDYTEMKKAILHVYWEEFQKDPVGLMSRVAQPASKKIDQNKLKPEMDEKGNLTTAGFACSQCGQPLFVYKLEQVSEKGKAYTNYFGRCNVAEHEKLIKLAQLKPEKDSDEAVTYSLGKFGQRALDFYSIHVTKESTHPVKPLAQIAGNRYASGPVGKALSDACMGTIASFLSKYQDIIIEHQKVVKGNQKRLESLRELAGKENLEYPSVTLPPQPHTKEGVDAYNEVIARVRMWVNLNLWQKLKLSRDDAKPLLRLKGFPSFPLVERQANEVDWWDMVCNVKKLINEKKEDGKVFWQNLAGYKRQEALRPYLSSEEDRKKGKKFARYQLGDLLLHLEKKHGEDWGKVYGEAWERIDKKVEGLSKHIKLEEERRSEDAQSKAALTDWLRAKASFVIEGLKEADKDEFCRCDLKLQKWYGDLRGKPFAIEAENSILDISGFSKQYNCAFIWQKDGVKKLNLYLIINYFKGGKLRFKKIKPEAFEANRFYTVINKKSGEIVPMEVNFNFDDPNLIILPLAFGKRQGREFIWNDLLSLETGSLKLANGRVIEKTLYNRRTRQDEPALFVALTFERREVLDSSNIKPMNLIGVDRGENIPAVIALTDPEGCPLSRFKDSLGNPTHILRIGESYKEKQRTIQAKKEVEQRRAGGYSRKYASKAKNLADDMVRNTARDLLYYAVTQDAMLIFENLSRGFGRQGKRTFMAERQYTRMEDWLTAKLAYEGLPSKTYLSKTLAQYTSKTCSNCGFTITSADYDRVLEKLKKTATGWMTTINGKELKVEGQITYYNRYKRQNVVKDLSVELDRLSEESVNNDISSWTKGRSGEALSLLKKRFSHRPVQEKFVCLNCGFETHADEQAALNIARSWLFLRSQEYKKYQTNKTTGNTDKRAFVETWQSFYRKKLKEVWKPAV

SEQ ID NO: 44815 - protein, 977 aa, synthetic construct
  REGION 1..977: note = engineered CasX variant
QEIKRINKIRRRLVKDSNTKKAGKTGPMKTLLVRVMTPDLRERLENLRKKPENIPQPISNTSRANLNKLLTDYTEMKKAILHVYWEEFQKDPVGLMSRVAQPASKKIDQNKLKPEMDEKGNLTTAGFACSQCGQPLFVYKLEQVSEKGKAYTNYFGRCNVAEHEKLILLAQLKPEKDSDEAVTYSLGKFGQRALDFYSIHVTKESTHPVKPLAQIAGNRYASPVGKALSDACMGTIASFLSKYQDIIIEHQKVVKGNQKRLESLRELAGKENLEYPSVTLPPQPHTKEGVDAYNEVIARVRMWVNLNLWQKLKLSRDDAKPLLRLKGFPSFPLVERQANEVDWWDMVCNVKKLINEKKEDGKVFWQNLAGYKRQEALRPYLSSEEDRKKGKKFARYQLGDLLLHLEKKHGEDWGKVYGEAWERIDKKVEGLSKHIKLEEERRSEDAQSKAALTDWLRAKASFVIEGLKEADKDEFCRCDLKLQKWYGDLRGKPFAIEAENSILDISGFSKQYNCAFIWQKDGVKKLNLYLIINYFKGGKLRFKKIKPEAFEANRFYTVINKKSGEIVPMEVNFNFDDPNLIILPLAFGKRQGREFIWNDLLSLETGSLKLANGRVIEKTLYNRRTRQDEPALFVALTFERREVLDSSNIKPMNLIGVDRGENIPAVIALTDPEGCPLSRFKDSLGNPTHILRIGESYKEKQRTIQAKKEVEQRRAGGYSRKYASKAKNLADDMVRNTARDLLYYAVTQDAMLIFENLSRGFGRQGKRTFMAERQYTRMEDWLTAKLAYEGLPSKTYLSKTLAQYTSKTCSNCGFTITSADYDRVLEKLKKTATGWMTTINGKELKVEGQITYYNRYKRQNVVKDLSVELDRLSEESVNNDISSWTKGRSGEALSLLKKRFSHRPVQEKFVCLNCGFETHADEQAALNIARSWLFLRSQEYKKYQTNKTTGNTDKRAFVETWQSFYRKKLKEVWKPAV

SEQ ID NO: 44816 - protein, 978 aa, synthetic construct
  REGION 1..978: note = engineered CasX variant
QEIKRINKIRRRLVKDSNTKKAGKTGPMKTLLVRVMTPDLRERLENLRKKPENIPQPISNTSRANLNKLLTDYTEMKKAILHVYWEEFQKDPVGLMSRVAQPASKKIDQNKLKPEMDEKGNLTTAGFACSQCGQPLFVYKLEQVSEKGKAYTNYFGRCNVAEHEKLILLAQLKPEKDSDEAVTYSLGKFGQRALDFYSIHVTKESTHPVKPLAQIAGNRYASYPVGKALSDACMGTIASFLSKYQDIIIEHQKVVKGNQKRLESLRELAGKENLEYPSVTLPPQPHTKEGVDAYNEVIARVRMWVNLNLWQKLKLSRDDAKPLLRLKGFPSFPLVERQANEVDWWDMVCNVKKLINEKKEDGKVFWQNLAGYKRQEALRPYLSSEEDRKKGKKFARYQLGDLLLHLEKKHGEDWGKVYDEAWERIDKKVEGLSKHIKLEEERRSEDAQSKAALTDWLRAKASFVIEGKKEADKDEFCRCDLKLQKWYGDLRGKPFAIEAENSILDISGFSKQYNCAFIWQKDGVKKLNLYLIINYFKGGKLRFKKIKPEAFEANRFYTVINKKSGEIVPMEVNFNFDDPNLIILPLAFGKRQGREFIWNDLLSLETGSLKLANGRVIEKTLYNRRTRQDEPALFVALTFERREVLDSSNIKPMNLIGVDRGENIPAVIALTDPEGCPLSRFKDSLGNPTHILRIGESYKEKQRTIQAKKEVEQRRAGGYSRKYASKAKNLADDMVRNTARDLLYYAVTQDAMLIFENLSRGFGRQGKRTFMAERQYTRMEDWLTAKLAYEGLPSKTYLSKTLAQYTSKTCSNCGFTITSADYDRVLEKLKKTATGWMTTINGKELKVEGQITYYNRYKRQNVVKDLSVELDRLSEESVNNDISSWTKGRSGEALSLLKKRFSHRPVQEKFVCLNCGFETHADEQAALNIARSWLFLRSQEYKKYQTNKTTGNTDKRAFVETWQSFYRKKLKEVWKPAV

SEQ ID NO: 44817 - protein, 978 aa, synthetic construct
  REGION 1..978: note = engineered CasX variant
QEIKRINKIRRRLVKDSNTKKAGKTGPMKTLLVRVMTPDLRERLENLRKKPENIPQPISNTSRANLNKLLTDYTEMKKAILHVYWEEFQKDPVGLMSRVAQPASKKIDQNKLKPEMDEKGNLTTAGFACSQCGQPLFVYKLEQVSEKGKAYTNYFGRCNVAEHEKLILLAQLKPEKDSDEAVTYSLGKFGQRALDFYSIHVTKESTHPVKPLAQIAGNRYASHPVGKALSDACMGTIASFLSKYQDIIIEHQKVVKGNQKRLESLRELAGKENLEYPSVTLPPQPHTKEGVDAYNEVIARVRMWVNLNLWQKLKLSRDDAKPLLRLKGFPSFPLVERQANEVDWWDMVCNVKKLINEKKEDGKVFWQNLAGYKRQEALRPYLSSEEDRKKGKKFARYQLGDLLLHLEKKHGEDWGKVYDEAWERIDKKVEGLSKHIKLEEERRSEDAQSKAALTDWLRAKASFVIEGKKEADKDEFCRCDLKLQKWYGDLRGKPFAIEAENSILDISGFSKQYNCAFIWQKDGVKKLNLYLIINYFKGGKLRFKKIKPEAFEANRFYTVINKKSGEIVPMEVNFNFDDPNLIILPLAFGKRQGREFIWNDLLSLETGSLKLANGRVIEKTLYNRRTRQDEPALFVALTFERREVLDSSNIKPMNLIGVDRGENIPAVIALTDPEGCPLSRFKDSLGNPTHILRIGESYKEKQRTIQAKKEVEQRRAGGYSRKYASKAKNLADDMVRNTARDLLYYAVTQDAMLIFENLSRGFGRQGKRTFMAERQYTRMEDWLTAKLAYEGLPSKTYLSKTLAQYTSKTCSNCGFTITSADYDRVLEKLKKTATGWMTTINGKELKVEGQITYYNRYKRQNVVKDLSVELDRLSEESVNNDISSWTKGRSGEALSLLKKRFSHRPVQEKFVCLNCGFETHADEQAALNIARSWLFLRSQEYKKYQTNKTTGNTDKRAFVETWQSFYRKKLKEVWKPAV

SEQ ID NO: 44818 - protein, 978 aa, synthetic construct
  REGION 1..978: note = engineered CasX variant
QEIKRINKIRRRLVKDSNTKKAGKTGPMKTLLVRVMTPDLRERLENLRKKPENIPQPISNTSRANLNKLLTDYTEMKKAILHVYWEEFQKDPVGLMSRVAQPASKKIDQNKLKPEMDEKGNLTTAGFACSQCGQPLFVYKLEQVSEKGKAYTNYFGRCNVAEHEKLILLAQLKPEKDSDEAVTYSLGKFGQRALDFYSIHVTKESTHPVKPLAQIAGNRYASSPVGKALSDACMGTIASFLSKYQDIIIEHQKVVKGNQKRLESLRELAGKENLEYPSVTLPPQPHTKEGVDAYNEVIARVRMWVNLNLWQKLKLSRDDAKPLLRLKGFPSFPLVERQANEVDWWDMVCNVKKLINEKKEDGKVFWQNLAGYKRQEALRPYLSSEEDRKKGKKFARYQLGDLLLHLEKKHGEDWGKVYDEAWERIDKKVEGLSKHIKLEEERRSEDAQSKAALTDWLRAKASFVIEGKKEADKDEFCRCDLKLQKWYGDLRGKPFAIEAENSILDISGFSKQYNCAFIWQKDGVKKLNLYLIINYFKGGKLRFKKIKPEAFEANRFYTVINKKSGEIVPMEVNFNFDDPNLIILPLAFGKRQGREFIWNDLLSLETGSLKLANGRVIEKTLYNRRTRQDEPALFVALTFERREVLDSSNIKPMNLIGVDRGENIPAVIALTDPEGCPLSRFKDSLGNPTHILRIGESYKEKQRTIQAKKEVEQRRAGGYSRKYASKAKNLADDMVRNTARDLLYYAVTQDAMLIFENLSRGFGRQGKRTFMAERQYTRMEDWLTAKLAYEGLPSKTYLSKTLAQYTSKTCSNCGFTITSADYDRVLEKLKKTATGWMTTINGKELKVEGQITYYNRYKRQNVVKDLSVELDRLSEESVNNDISSWTKGRSGEALSLLKKRFSHRPVQEKFVCLNCGFETHADEQAALNIARSWLFLRSQEYKKYQTNKTTGNTDKRAFVETWQSFYRKKLKEVWKPAV

SEQ ID NO: 44819 - protein, 978 aa, synthetic construct
  REGION 1..978: note = engineered CasX variant
QEIKRINKIRRRLVKDSNTKKAGKTGPMKTLLVRVMTPDLRERLENLRKKPENIPQPISNTSRANLNKLLTDYTEMKKAILHVYWEEFQKDPVGLMSRVAQPASKKIDQNKLKPEMDEKGNLTTAGFACSQCGQPLFVYKLEQVSEKGKAYTNYFGRCNVAEHEKLILLAQLKPEKDSDEAVTYSLGKFGQRALDFYSIHVTKESTHPVKPLAQIAGNRYASTPVGKALSDACMGTIASFLSKYQDIIIEHQKVVKGNQKRLESLRELAGKENLEYPSVTLPPQPHTKEGVDAYNEVIARVRMWVNLNLWQKLKLSRDDAKPLLRLKGFPSFPLVERQANEVDWWDMVCNVKKLINEKKEDGKVFWQNLAGYKRQEALRPYLSSEEDRKKGKKFARYQLGDLLLHLEKKHGEDWGKVYDEAWERIDKKVEGLSKHIKLEEERRSEDAQSKAALTDWLRAKASFVIEGKKEADKDEFCRCDLKLQKWYGDLRGKPFAIEAENSILDISGFSKQYNCAFIWQKDGVKKLNLYLIINYFKGGKLRFKKIKPEAFEANRFYTVINKKSGEIVPMEVNFNFDDPNLIILPLAFGKRQGREFIWNDLLSLETGSLKLANGRVIEKTLYNRRTRQDEPALFVALTFERREVLDSSNIKPMNLIGVDRGENIPAVIALTDPEGCPLSRFKDSLGNPTHILRIGESYKEKQRTIQAKKEVEQRRAGGYSRKYASKAKNLADDMVRNTARDLLYYAVTQDAMLIFENLSRGFGRQGKRTFMAERQYTRMEDWLTAKLAYEGLPSKTYLSKTLAQYTSKTCSNCGFTITSADYDRVLEKLKKTATGWMTTINGKELKVEGQITYYNRYKRQNVVKDLSVELDRLSEESVNNDISSWTKGRSGEALSLLKKRFSHRPVQEKFVCLNCGFETHADEQAALNIARSWLFLRSQEYKKYQTNKTTGNTDKRAFVETWQSFYRKKLKEVWKPAV

SEQ ID NO: 44820 - protein, 978 aa, synthetic construct
  REGION 1..978: note = engineered CasX variant
QEIKRINKIRRRLVKDSNTKKAGKTGPMKTLLVRVMTPDLRERLENLRKKPENIPQPISNTSRANLNKLLTDYTEMKKAILHVYWEEFQKDPVGLMSRVAQPASKKIDQNKLKPEMDEKGNLTTAGFACSQCGQPLFVYKLEQVSEKGKAYTNYFGRCNVAEHEKLILLAQLKPEKDSDEAVTYSLGKFGQRALDFYSIHVTKESTHPVKPLAQIAGNRYASAPVGKALSDACMGTIASFLSKYQDIIIEHQKVVKGNQKRLESLRELAGKENLEYPSVTLPPQPHTKEGVDAYNEVIARVRMWVNLNLWQKLKLSRDDAKPLLRLKGFPSFPLVERQANEVDWWDMVCNVKKLINEKKEDGKVFWQNLAGYKRQEALRPYLSSEEDRKKGKKFARYQLGDLLLHLEKKHGEDWGKVYDEAWERIDKKVEGLSKHIKLEEERRSEDAQSKAALTDWLRAKASFVIEGKKEADKDEFCRCDLKLQKWYGDLRGKPFAIEAENSILDISGFSKQYNCAFIWQKDGVKKLNLYLIINYFKGGKLRFKKIKPEAFEANRFYTVINKKSGEIVPMEVNFNFDDPNLIILPLAFGKRQGREFIWNDLLSLETGSLKLANGRVIEKTLYNRRTRQDEPALFVALTFERREVLDSSNIKPMNLIGVDRGENIPAVIALTDPEGCPLSRFKDSLGNPTHILRIGESYKEKQRTIQAKKEVEQRRAGGYSRKYASKAKNLADDMVRNTARDLLYYAVTQDAMLIFENLSRGFGRQGKRTFMAERQYTRMEDWLTAKLAYEGLPSKTYLSKTLAQYTSKTCSNCGFTITSADYDRVLEKLKKTATGWMTTINGKELKVEGQITYYNRYKRQNVVKDLSVELDRLSEESVNNDISSWTKGRSGEALSLLKKRFSHRPVQEKFVCLNCGFETHADEQAALNIARSWLFLRSQEYKKYQTNKTTGNTDKRAFVETWQSFYRKKLKEVWKPAV

SEQ ID NO: 44821 - protein, 978 aa, synthetic construct
  REGION 1..978: note = engineered CasX variant
QEIKRINKIRRRLVKDSNTKKAGKTGPMKTLLVRVMTPDLRERLENLRKKPENIPQPISNTSRANLNKLLTDYTEMKKAILHVYWEEFQKDPVGLMSRVAQPASKKIDQNKLKPEMDEKGNLTTAGFACSQCGQPLFVYKLEQVSEKGKAYTNYFGRCNVAEHEKLILLAQLKPEKDSDEAVTYSLGKFGQRALDFYSIHVTKESTHPVKPLAQIAGNRYASVPVGKALSDACMGTIASFLSKYQDIIIEHQKVVKGNQKRLESLRELAGKENLEYPSVTLPPQPHTKEGVDAYNEVIARVRMWVNLNLWQKLKLSRDDAKPLLRLKGFPSFPLVERQANEVDWWDMVCNVKKLINEKKEDGKVFWQNLAGYKRQEALRPYLSSEEDRKKGKKFARYQLGDLLLHLEKKHGEDWGKVYDEAWERIDKKVEGLSKHIKLEEERRSEDAQSKAALTDWLRAKASFVIEGKKEADKDEFCRCDLKLQKWYGDLRGKPFAIEAENSILDISGFSKQYNCAFIWQKDGVKKLNLYLIINYFKGGKLRFKKIKPEAFEANRFYTVINKKSGEIVPMEVNFNFDDPNLIILPLAFGKRQGREFIWNDLLSLETGSLKLANGRVIEKTLYNRRTRQDEPALFVALTFERREVLDSSNIKPMNLIGVDRGENIPAVIALTDPEGCPLSRFKDSLGNPTHILRIGESYKEKQRTIQAKKEVEQRRAGGYSRKYASKAKNLADDMVRNTARDLLYYAVTQDAMLIFENLSRGFGRQGKRTFMAERQYTRMEDWLTAKLAYEGLPSKTYLSKTLAQYTSKTCSNCGFTITSADYDRVLEKLKKTATGWMTTINGKELKVEGQITYYNRYKRQNVVKDLSVELDRLSEESVNNDISSWTKGRSGEALSLLKKRFSHRPVQEKFVCLNCGFETHADEQAALNIARSWLFLRSQEYKKYQTNKTTGNTDKRAFVETWQSFYRKKLKEVWKPAV

SEQ ID NO: 44822 - protein, 978 aa, synthetic construct
  REGION 1..978: note = engineered CasX variant
QEIKRINKIRRRLVKDSNTKKAGKTGPMKTLLVRVMTPDLRERLENLRKKPENIPQPISNTSRANLNKLLTDYTEMKKAILHVYWEEFQKDPVGLMSRVAQPASKKIDQNKLKPEMDEKGNLTTAGFACSQCGQPLFVYKLEQVSEKGKAYTNYFGRCNVAEHEKLIKLAQLKPEKDSDEAVTYSLGKFGQRALDFYSIHVTKESTHPVKPLAQIAGNRYASGPVGKALSDACMGTIASFLSKYQDIIIEHQKVVKGNQKRLESLRELAGKENLEYPSVTLPPQPHTKEGVDAYNEVIARVRMWVNLNLWQKLKLSRDDAKPLLRLKGFPSFPLVERQANEVDWWDMVCNVKKLINEKKEDGKVFWQNLAGYKRQEALRPYLSSEEDRKKGKKFARYQLGDLLLHLEKKHGEDWGKVYDEAWERIDKKVEGLSKHIKLEEERRSEDAQSKAALTDWLRAKASFVIEGKKEADKDEFCRCDLKLQKWYGDLRGKPFAIEAENSILDISGFSKQYNCAFIWQKDGVKKLNLYLIINYFKGGKLRFKKIKPEAFEANRFYTVINKKSGEIVPMEVNFNFDDPNLIILPLAFGKRQGREFIWNDLLSLETGSLKLANGRVIEKTLYNRRTRQDEPALFVALTFERREVLDSSNIKPMNLIGVDRGENIPAVIALTDPEGCPLSRFKDSLGNPTHILRIGESYKEKQRTIQAKKEVEQRRAGGYSRKYASKAKNLADDMVRNTARDLLYYAVTQDAMLIFENLSRGFGRQGKRTFMAERQYTRMEDWLTAKLAYEGLPSKTYLSKTLAQYTSKTCSNCGFTITSADYDRVLEKLKKTATGWMTTINGKELKVEGQITYYNRYKRQNVVKDLSVELDRLSEESVNNDISSWTKGRSGEALSLLKKRFSHRPVQEKFVCLNCGFETHADEQAALNIARSWLFLRSQEYKKYQTNKTTGNTDKRAFVETWQSFYRKKLKEVWKPAV

SEQ ID NO: 44823 - protein, 977 aa, synthetic construct
  REGION 1..977: note = engineered CasX variant
QEIKRINKIRRRLVKDSNTKKAGKTGPMKTLLVRVMTPDLRERLENLRKKPENIPQPISNTSRANLNKLLTDYTEMKKAILHVYWEEFQKDPVGLMSRVAQPASKKIDQNKLKPEMDEKGNLTTAGFACSQCGQPLFVYKLEQVSEKGKAYTNYFGRCNVAEHEKLILLAQLKPEKDSDEAVTYSLGKFGQRALDFYSIHVTKESTHPVKPLAQIAGNRYASPVGKALSDACMGTIASFLSKYQDIIIEHQKVVKGNQKRLESLRELAGKENLEYPSVTLPPQPHTKEGVDAYNEVIARVRMWVNLNLWQKLKLSRDDAKPLLRLKGFPSFPLVERQANEVDWWDMVCNVKKLINEKKEDGKVFWQNLAGYKRQEALRPYLSSEEDRKKGKKFARYQLGDLLLHLEKKHGEDWGKVYDEAWERIDKKVEGLSKHIKLEEERRSEDAQSKAALTDWLRAKASFVIEGKKEADKDEFCRCDLKLQKWYGDLRGKPFAIEAENSILDISGFSKQYNCAFIWQKDGVKKLNLYLIINYFKGGKLRFKKIKPEAFEANRFYTVINKKSGEIVPMEVNFNFDDPNLIILPLAFGKRQGREFIWNDLLSLETGSLKLANGRVIEKTLYNRRTRQDEPALFVALTFERREVLDSSNIKPMNLIGVDRGENIPAVIALTDPEGCPLSRFKDSLGNPTHILRIGESYKEKQRTIQAKKEVEQRRAGGYSRKYASKAKNLADDMVRNTARDLLYYAVTQDAMLIFENLSRGFGRQGKRTFMAERQYTRMEDWLTAKLAYEGLPSKTYLSKTLAQYTSKTCSNCGFTITSADYDRVLEKLKKTATGWMTTINGKELKVEGQITYYNRYKRQNVVKDLSVELDRLSEESVNNDISSWTKGRSGEALSLLKKRFSHRPVQEKFVCLNCGFETHADEQAALNIARSWLFLRSQEYKKYQTNKTTGNTDKRAFVETWQSFYRKKLKEVWKPAV

SEQ ID NO: 44824 - protein, 978 aa, synthetic construct
  REGION 1..978: note = engineered CasX variant
QEIKRINKIRRRLVKDSNTKKAGKTGPMKTLLVRVMTPDLRERLENLRKKPENIPQPISNTSRANLNKLLTDYTEMKKAILHVYWEEFQKDPVGLMSRVAQPASKKIDQNKLKPEMDEKGNLTTAGFACSQCGQPLFVYKLEQVSEKGKAYTNYFGRCNVAEHEKLILLAQLKPEKDSDEAVTYSLGKFGQRALDFYSIHVTKESTHPVKPLAQIAGNRYASYPVGKALSDACMGTIASFLSKYQDIIIEHQKVVKGNQKRLESLRELAGKENLEYPSVTLPPQPHTKEGVDAYNEVIARVRMWVNLNLWQKLKLSRDDAKPLLRLKGFPSFPLVERQANEVDWWDMVCNVKKLINEKKEDGKVFWQNLAGYKRQEALRPYLSSEEDRKKGKKFARYQLGDLLLHLEKKHGEDWGKVYDEAWERIDKKVEGLSKHIKLEEERRSEDAQSKAALTDWLRAKASFVIEGSKEADKDEFCRCDLKLQKWYGDLRGKPFAIEAENSILDISGFSKQYNCAFIWQKDGVKKLNLYLIINYFKGGKLRFKKIKPEAFEANRFYTVINKKSGEIVPMEVNFNFDDPNLIILPLAFGKRQGREFIWNDLLSLETGSLKLANGRVIEKTLYNRRTRQDEPALFVALTFERREVLDSSNIKPMNLIGVDRGENIPAVIALTDPEGCPLSRFKDSLGNPTHILRIGESYKEKQRTIQAKKEVEQRRAGGYSRKYASKAKNLADDMVRNTARDLLYYAVTQDAMLIFENLSRGFGRQGKRTFMAERQYTRMEDWLTAKLAYEGLPSKTYLSKTLAQYTSKTCSNCGFTITSADYDRVLEKLKKTATGWMTTINGKELKVEGQITYYNRYKRQNVVKDLSVELDRLSEESVNNDISSWTKGRSGEALSLLKKRFSHRPVQEKFVCLNCGFETHADEQAALNIARSWLFLRSQEYKKYQTNKTTGNTDKRAFVETWQSFYRKKLKEVWKPAV

SEQ ID NO: 44825 - protein, 978 aa, synthetic construct
  REGION 1..978: note = engineered CasX variant
QEIKRINKIRRRLVKDSNTKKAGKTGPMKTLLVRVMTPDLRERLENLRKKPENIPQPISNTSRANLNKLLTDYTEMKKAILHVYWEEFQKDPVGLMSRVAQPASKKIDQNKLKPEMDEKGNLTTAGFACSQCGQPLFVYKLEQVSEKGKAYTNYFGRCNVAEHEKLILLAQLKPEKDSDEAVTYSLGKFGQRALDFYSIHVTKESTHPVKPLAQIAGNRYASHPVGKALSDACMGTIASFLSKYQDIIIEHQKVVKGNQKRLESLRELAGKENLEYPSVTLPPQPHTKEGVDAYNEVIARVRMWVNLNLWQKLKLSRDDAKPLLRLKGFPSFPLVERQANEVDWWDMVCNVKKLINEKKEDGKVFWQNLAGYKRQEALRPYLSSEEDRKKGKKFARYQLGDLLLHLEKKHGEDWGKVYDEAWERIDKKVEGLSKHIKLEEERRSEDAQSKAALTDWLRAKASFVIEGSKEADKDEFCRCDLKLQKWYGDLRGKPFAIEAENSILDISGFSKQYNCAFIWQKDGVKKLNLYLIINYFKGGKLRFKKIKPEAFEANRFYTVINKKSGEIVPMEVNFNFDDPNLIILPLAFGKRQGREFIWNDLLSLETGSLKLANGRVIEKTLYNRRTRQDEPALFVALTFERREVLDSSNIKPMNLIGVDRGENIPAVIALTDPEGCPLSRFKDSLGNPTHILRIGESYKEKQRTIQAKKEVEQRRAGGYSRKYASKAKNLADDMVRNTARDLLYYAVTQDAMLIFENLSRGFGRQGKRTFMAERQYTRMEDWLTAKLAYEGLPSKTYLSKTLAQYTSKTCSNCGFTITSADYDRVLEKLKKTATGWMTTINGKELKVEGQITYYNRYKRQNVVKDLSVELDRLSEESVNNDISSWTKGRSGEALSLLKKRFSHRPVQEKFVCLNCGFETHADEQAALNIARSWLFLRSQEYKKYQTNKTTGNTDKRAFVETWQSFYRKKLKEVWKPAV

SEQ ID NO: 44826 - protein, 978 aa, synthetic construct
  REGION 1..978: note = engineered CasX variant
QEIKRINKIRRRLVKDSNTKKAGKTGPMKTLLVRVMTPDLRERLENLRKKPENIPQPISNTSRANLNKLLTDYTEMKKAILHVYWEEFQKDPVGLMSRVAQPASKKIDQNKLKPEMDEKGNLTTAGFACSQCGQPLFVYKLEQVSEKGKAYTNYFGRCNVAEHEKLILLAQLKPEKDSDEAVTYSLGKFGQRALDFYSIHVTKESTHPVKPLAQIAGNRYASSPVGKALSDACMGTIASFLSKYQDIIIEHQKVVKGNQKRLESLRELAGKENLEYPSVTLPPQPHTKEGVDAYNEVIARVRMWVNLNLWQKLKLSRDDAKPLLRLKGFPSFPLVERQANEVDWWDMVCNVKKLINEKKEDGKVFWQNLAGYKRQEALRPYLSSEEDRKKGKKFARYQLGDLLLHLEKKHGEDWGKVYDEAWERIDKKVEGLSKHIKLEEERRSEDAQSKAALTDWLRAKASFVIEGSKEADKDEFCRCDLKLQKWYGDLRGKPFAIEAENSILDISGFSKQYNCAFIWQKDGVKKLNLYLIINYFKGGKLRFKKIKPEAFEANRFYTVINKKSGEIVPMEVNFNFDDPNLIILPLAFGKRQGREFIWNDLLSLETGSLKLANGRVIEKTLYNRRTRQDEPALFVALTFERREVLDSSNIKPMNLIGVDRGENIPAVIALTDPEGCPLSRFKDSLGNPTHILRIGESYKEKQRTIQAKKEVEQRRAGGYSRKYASKAKNLADDMVRNTARDLLYYAVTQDAMLIFENLSRGFGRQGKRTFMAERQYTRMEDWLTAKLAYEGLPSKTYLSKTLAQYTSKTCSNCGFTITSADYDRVLEKLKKTATGWMTTINGKELKVEGQITYYNRYKRQNVVKDLSVELDRLSEESVNNDISSWTKGRSGEALSLLKKRFSHRPVQEKFVCLNCGFETHADEQAALNIARSWLFLRSQEYKKYQTNKTTGNTDKRAFVETWQSFYRKKLKEVWKPAV

SEQ ID NO: 44827 - protein, 978 aa, synthetic construct
  REGION 1..978: note = engineered CasX variant
QEIKRINKIRRRLVKDSNTKKAGKTGPMKTLLVRVMTPDLRERLENLRKKPENIPQPISNTSRANLNKLLTDYTEMKKAILHVYWEEFQKDPVGLMSRVAQPASKKIDQNKLKPEMDEKGNLTTAGFACSQCGQPLFVYKLEQVSEKGKAYTNYFGRCNVAEHEKLILLAQLKPEKDSDEAVTYSLGKFGQRALDFYSIHVTKESTHPVKPLAQIAGNRYASTPVGKALSDACMGTIASFLSKYQDIIIEHQKVVKGNQKRLESLRELAGKENLEYPSVTLPPQPHTKEGVDAYNEVIARVRMWVNLNLWQKLKLSRDDAKPLLRLKGFPSFPLVERQANEVDWWDMVCNVKKLINEKKEDGKVFWQNLAGYKRQEALRPYLSSEEDRKKGKKFARYQLGDLLLHLEKKHGEDWGKVYDEAWERIDKKVEGLSKHIKLEEERRSEDAQSKAALTDWLRAKASFVIEGSKEADKDEFCRCDLKLQKWYGDLRGKPFAIEAENSILDISGFSKQYNCAFIWQKDGVKKLNLYLIINYFKGGKLRFKKIKPEAFEANRFYTVINKKSGEIVPMEVNFNFDDPNLIILPLAFGKRQGREFIWNDLLSLETGSLKLANGRVIEKTLYNRRTRQDEPALFVALTFERREVLDSSNIKPMNLIGVDRGENIPAVIALTDPEGCPLSRFKDSLGNPTHILRIGESYKEKQRTIQAKKEVEQRRAGGYSRKYASKAKNLADDMVRNTARDLLYYAVTQDAMLIFENLSRGFGRQGKRTFMAERQYTRMEDWLTAKLAYEGLPSKTYLSKTLAQYTSKTCSNCGFTITSADYDRVLEKLKKTATGWMTTINGKELKVEGQITYYNRYKRQNVVKDLSVELDRLSEESVNNDISSWTKGRSGEALSLLKKRFSHRPVQEKFVCLNCGFETHADEQAALNIARSWLFLRSQEYKKYQTNKTTGNTDKRAFVETWQSFYRKKLKEVWKPAV

SEQ ID NO: 44828 - protein, 978 aa, synthetic construct
  REGION 1..978: note = engineered CasX variant
QEIKRINKIRRRLVKDSNTKKAGKTGPMKTLLVRVMTPDLRERLENLRKKPENIPQPISNTSRANLNKLLTDYTEMKKAILHVYWEEFQKDPVGLMSRVAQPASKKIDQNKLKPEMDEKGNLTTAGFACSQCGQPLFVYKLEQVSEKGKAYTNYFGRCNVAEHEKLILLAQLKPEKDSDEAVTYSLGKFGQRALDFYSIHVTKESTHPVKPLAQIAGNRYASAPVGKALSDACMGTIASFLSKYQDIIIEHQKVVKGNQKRLESLRELAGKENLEYPSVTLPPQPHTKEGVDAYNEVIARVRMWVNLNLWQKLKLSRDDAKPLLRLKGFPSFPLVERQANEVDWWDMVCNVKKLINEKKEDGKVFWQNLAGYKRQEALRPYLSSEEDRKKGKKFARYQLGDLLLHLEKKHGEDWGKVYDEAWERIDKKVEGLSKHIKLEEERRSEDAQSKAALTDWLRAKASFVIEGSKEADKDEFCRCDLKLQKWYGDLRGKPFAIEAENSILDISGFSKQYNCAFIWQKDGVKKLNLYLIINYFKGGKLRFKKIKPEAFEANRFYTVINKKSGEIVPMEVNFNFDDPNLIILPLAFGKRQGREFIWNDLLSLETGSLKLANGRVIEKTLYNRRTRQDEPALFVALTFERREVLDSSNIKPMNLIGVDRGENIPAVIALTDPEGCPLSRFKDSLGNPTHILRIGESYKEKQRTIQAKKEVEQRRAGGYSRKYASKAKNLADDMVRNTARDLLYYAVTQDAMLIFENLSRGFGRQGKRTFMAERQYTRMEDWLTAKLAYEGLPSKTYLSKTLAQYTSKTCSNCGFTITSADYDRVLEKLKKTATGWMTTINGKELKVEGQITYYNRYKRQNVVKDLSVELDRLSEESVNNDISSWTKGRSGEALSLLKKRFSHRPVQEKFVCLNCGFETHADEQAALNIARSWLFLRSQEYKKYQTNKTTGNTDKRAFVETWQSFYRKKLKEVWKPAV

SEQ ID NO: 44829 - protein, 978 aa, synthetic construct
  REGION 1..978: note = engineered CasX variant
QEIKRINKIRRRLVKDSNTKKAGKTGPMKTLLVRVMTPDLRERLENLRKKPENIPQPISNTSRANLNKLLTDYTEMKKAILHVYWEEFQKDPVGLMSRVAQPASKKIDQNKLKPEMDEKGNLTTAGFACSQCGQPLFVYKLEQVSEKGKAYTNYFGRCNVAEHEKLILLAQLKPEKDSDEAVTYSLGKFGQRALDFYSIHVTKESTHPVKPLAQIAGNRYASVPVGKALSDACMGTIASFLSKYQDIIIEHQKVVKGNQKRLESLRELAGKENLEYPSVTLPPQPHTKEGVDAYNEVIARVRMWVNLNLWQKLKLSRDDAKPLLRLKGFPSFPLVERQANEVDWWDMVCNVKKLINEKKEDGKVFWQNLAGYKRQEALRPYLSSEEDRKKGKKFARYQLGDLLLHLEKKHGEDWGKVYDEAWERIDKKVEGLSKHIKLEEERRSEDAQSKAALTDWLRAKASFVIEGSKEADKDEFCRCDLKLQKWYGDLRGKPFAIEAENSILDISGFSKQYNCAFIWQKDGVKKLNLYLIINYFKGGKLRFKKIKPEAFEANRFYTVINKKSGEIVPMEVNFNFDDPNLIILPLAFGKRQGREFIWNDLLSLETGSLKLANGRVIEKTLYNRRTRQDEPALFVALTFERREVLDSSNIKPMNLIGVDRGENIPAVIALTDPEGCPLSRFKDSLGNPTHILRIGESYKEKQRTIQAKKEVEQRRAGGYSRKYASKAKNLADDMVRNTARDLLYYAVTQDAMLIFENLSRGFGRQGKRTFMAERQYTRMEDWLTAKLAYEGLPSKTYLSKTLAQYTSKTCSNCGFTITSADYDRVLEKLKKTATGWMTTINGKELKVEGQITYYNRYKRQNVVKDLSVELDRLSEESVNNDISSWTKGRSGEALSLLKKRFSHRPVQEKFVCLNCGFETHADEQAALNIARSWLFLRSQEYKKYQTNKTTGNTDKRAFVETWQSFYRKKLKEVWKPAV

SEQ ID NO: 44830 - protein, 978 aa, synthetic construct
  REGION 1..978: note = engineered CasX variant
QEIKRINKIRRRLVKDSNTKKAGKTGPMKTLLVRVMTPDLRERLENLRKKPENIPQPISNTSRANLNKLLTDYTEMKKAILHVYWEEFQKDPVGLMSRVAQPASKKIDQNKLKPEMDEKGNLTTAGFACSQCGQPLFVYKLEQVSEKGKAYTNYFGRCNVAEHEKLIKLAQLKPEKDSDEAVTYSLGKFGQRALDFYSIHVTKESTHPVKPLAQIAGNRYASGPVGKALSDACMGTIASFLSKYQDIIIEHQKVVKGNQKRLESLRELAGKENLEYPSVTLPPQPHTKEGVDAYNEVIARVRMWVNLNLWQKLKLSRDDAKPLLRLKGFPSFPLVERQANEVDWWDMVCNVKKLINEKKEDGKVFWQNLAGYKRQEALRPYLSSEEDRKKGKKFARYQLGDLLLHLEKKHGEDWGKVYDEAWERIDKKVEGLSKHIKLEEERRSEDAQSKAALTDWLRAKASFVIEGSKEADKDEFCRCDLKLQKWYGDLRGKPFAIEAENSILDISGFSKQYNCAFIWQKDGVKKLNLYLIINYFKGGKLRFKKIKPEAFEANRFYTVINKKSGEIVPMEVNFNFDDPNLIILPLAFGKRQGREFIWNDLLSLETGSLKLANGRVIEKTLYNRRTRQDEPALFVALTFERREVLDSSNIKPMNLIGVDRGENIPAVIALTDPEGCPLSRFKDSLGNPTHILRIGESYKEKQRTIQAKKEVEQRRAGGYSRKYASKAKNLADDMVRNTARDLLYYAVTQDAMLIFENLSRGFGRQGKRTFMAERQYTRMEDWLTAKLAYEGLPSKTYLSKTLAQYTSKTCSNCGFTITSADYDRVLEKLKKTATGWMTTINGKELKVEGQITYYNRYKRQNVVKDLSVELDRLSEESVNNDISSWTKGRSGEALSLLKKRFSHRPVQEKFVCLNCGFETHADEQAALNIARSWLFLRSQEYKKYQTNKTTGNTDKRAFVETWQSFYRKKLKEVWKPAV

SEQ ID NO: 44831 - protein, 977 aa, synthetic construct
  REGION 1..977: note = engineered CasX variant
QEIKRINKIRRRLVKDSNTKKAGKTGPMKTLLVRVMTPDLRERLENLRKKPENIPQPISNTSRANLNKLLTDYTEMKKAILHVYWEEFQKDPVGLMSRVAQPASKKIDQNKLKPEMDEKGNLTTAGFACSQCGQPLFVYKLEQVSEKGKAYTNYFGRCNVAEHEKLILLAQLKPEKDSDEAVTYSLGKFGQRALDFYSIHVTKESTHPVKPLAQIAGNRYASPVGKALSDACMGTIASFLSKYQDIIIEHQKVVKGNQKRLESLRELAGKENLEYPSVTLPPQPHTKEGVDAYNEVIARVRMWVNLNLWQKLKLSRDDAKPLLRLKGFPSFPLVERQANEVDWWDMVCNVKKLINEKKEDGKVFWQNLAGYKRQEALRPYLSSEEDRKKGKKFARYQLGDLLLHLEKKHGEDWGKVYDEAWERIDKKVEGLSKHIKLEEERRSEDAQSKAALTDWLRAKASFVIEGSKEADKDEFCRCDLKLQKWYGDLRGKPFAIEAENSILDISGFSKQYNCAFIWQKDGVKKLNLYLIINYFKGGKLRFKKIKPEAFEANRFYTVINKKSGEIVPMEVNFNFDDPNLIILPLAFGKRQGREFIWNDLLSLETGSLKLANGRVIEKTLYNRRTRQDEPALFVALTFERREVLDSSNIKPMNLIGVDRGENIPAVIALTDPEGCPLSRFKDSLGNPTHILRIGESYKEKQRTIQAKKEVEQRRAGGYSRKYASKAKNLADDMVRNTARDLLYYAVTQDAMLIFENLSRGFGRQGKRTFMAERQYTRMEDWLTAKLAYEGLPSKTYLSKTLAQYTSKTCSNCGFTITSADYDRVLEKLKKTATGWMTTINGKELKVEGQITYYNRYKRQNVVKDLSVELDRLSEESVNNDISSWTKGRSGEALSLLKKRFSHRPVQEKFVCLNCGFETHADEQAALNIARSWLFLRSQEYKKYQTNKTTGNTDKRAFVETWQSFYRKKLKEVWKPAV

SEQ ID NO: 44832 - protein, 979 aa, synthetic construct
  REGION 1..979: note = engineered CasX variant
QEIKRINKIRRRLVKDSNTKKAGKTGPMKTLLVRVMTPDLRERLENLRKKPENIPQPISNTSRANLNKLLTDYTEMKKAILHVYWEEFQKDPVGLMSRVAQPASKKIDQNKLKPEMDEKGNLTTAGFACSQCGQPLFVYKLEQVSEKGKAYTNYFGRCNVAEHEKLILLAQLKPEKDSDEAVTYSLGKFGQRALDFYSIHVTKESTHPVKPLAQIAGNRYASYPVGKALSDACMGTIASFLSKYQDIIIEHQKVVKGNQKRLESLRELAGKENLEYPSVTLPPQPHTKEGVDAYNEVIARVRMWVNLNLWQKLKLSRDDAKPLLRLKGFPSFPLVERQANEVDWWDMVCNVKKLINEKKEDGKVFWQNLAGYKRQEALRPYLSSEEDRKKGKKFARYQLGDLLLHLEKKHGEDWGKVYDEAWERIDKKVEGLSKHIKLEEERRSEDAQSKAALTDWLRAKASFVIEGLKEADDKDEFCRCDLKLQKWYGDLRGKPFAIEAENSILDISGFSKQYNCAFIWQKDGVKKLNLYLIINYFKGGKLRFKKIKPEAFEANRFYTVINKKSGEIVPMEVNFNFDDPNLIILPLAFGKRQGREFIWNDLLSLETGSLKLANGRVIEKTLYNRRTRQDEPALFVALTFERREVLDSSNIKPMNLIGVDRGENIPAVIALTDPEGCPLSRFKDSLGNPTHILRIGESYKEKQRTIQAKKEVEQRRAGGYSRKYASKAKNLADDMVRNTARDLLYYAVTQDAMLIFENLSRGFGRQGKRTFMAERQYTRMEDWLTAKLAYEGLPSKTYLSKTLAQYTSKTCSNCGFTITSADYDRVLEKLKKTATGWMTTINGKELKVEGQITYYNRYKRQNVVKDLSVELDRLSEESVNNDISSWTKGRSGEALSLLKKRFSHRPVQEKFVCLNCGFETHADEQAALNIARSWLFLRSQEYKKYQTNKTTGNTDKRAFVETWQSFYRKKLKEVWKPAV

SEQ ID NO: 44833 - protein, 979 aa, synthetic construct
  REGION 1..979: note = engineered CasX variant
QEIKRINKIRRRLVKDSNTKKAGKTGPMKTLLVRVMTPDLRERLENLRKKPENIPQPISNTSRANLNKLLTDYTEMKKAILHVYWEEFQKDPVGLMSRVAQPASKKIDQNKLKPEMDEKGNLTTAGFACSQCGQPLFVYKLEQVSEKGKAYTNYFGRCNVAEHEKLILLAQLKPEKDSDEAVTYSLGKFGQRALDFYSIHVTKESTHPVKPLAQIAGNRYASHPVGKALSDACMGTIASFLSKYQDIIIEHQKVVKGNQKRLESLRELAGKENLEYPSVTLPPQPHTKEGVDAYNEVIARVRMWVNLNLWQKLKLSRDDAKPLLRLKGFPSFPLVERQANEVDWWDMVCNVKKLINEKKEDGKVFWQNLAGYKRQEALRPYLSSEEDRKKGKKFARYQLGDLLLHLEKKHGEDWGKVYDEAWERIDKKVEGLSKHIKLEEERRSEDAQSKAALTDWLRAKASFVIEGLKEADDKDEFCRCDLKLQKWYGDLRGKPFAIEAENSILDISGFSKQYNCAFIWQKDGVKKLNLYLIINYFKGGKLRFKKIKPEAFEANRFYTVINKKSGEIVPMEVNFNFDDPNLIILPLAFGKRQGREFIWNDLLSLETGSLKLANGRVIEKTLYNRRTRQDEPALFVALTFERREVLDSSNIKPMNLIGVDRGENIPAVIALTDPEGCPLSRFKDSLGNPTHILRIGESYKEKQRTIQAKKEVEQRRAGGYSRKYASKAKNLADDMVRNTARDLLYYAVTQDAMLIFENLSRGFGRQGKRTFMAERQYTRMEDWLTAKLAYEGLPSKTYLSKTLAQYTSKTCSNCGFTITSADYDRVLEKLKKTATGWMTTINGKELKVEGQITYYNRYKRQNVVKDLSVELDRLSEESVNNDISSWTKGRSGEALSLLKKRFSHRPVQEKFVCLNCGFETHADEQAALNIARSWLFLRSQEYKKYQTNKTTGNTDKRAFVETWQSFYRKKLKEVWKPAV

SEQ ID NO: 44834 - protein, 979 aa, synthetic construct
  REGION 1..979: note = engineered CasX variant
QEIKRINKIRRRLVKDSNTKKAGKTGPMKTLLVRVMTPDLRERLENLRKKPENIPQPISNTSRANLNKLLTDYTEMKKAILHVYWEEFQKDPVGLMSRVAQPASKKIDQNKLKPEMDEKGNLTTAGFACSQCGQPLFVYKLEQVSEKGKAYTNYFGRCNVAEHEKLILLAQLKPEKDSDEAVTYSLGKFGQRALDFYSIHVTKESTHPVKPLAQIAGNRYASSPVGKALSDACMGTIASFLSKYQDIIIEHQKVVKGNQKRLESLRELAGKENLEYPSVTLPPQPHTKEGVDAYNEVIARVRMWVNLNLWQKLKLSRDDAKPLLRLKGFPSFPLVERQANEVDWWDMVCNVKKLINEKKEDGKVFWQNLAGYKRQEALRPYLSSEEDRKKGKKFARYQLGDLLLHLEKKHGEDWGKVYDEAWERIDKKVEGLSKHIKLEEERRSEDAQSKAALTDWLRAKASFVIEGLKEADDKDEFCRCDLKLQKWYGDLRGKPFAIEAENSILDISGFSKQYNCAFIWQKDGVKKLNLYLIINYFKGGKLRFKKIKPEAFEANRFYTVINKKSGEIVPMEVNFNFDDPNLIILPLAFGKRQGREFIWNDLLSLETGSLKLANGRVIEKTLYNRRTRQDEPALFVALTFERREVLDSSNIKPMNLIGVDRGENIPAVIALTDPEGCPLSRFKDSLGNPTHILRIGESYKEKQRTIQAKKEVEQRRAGGYSRKYASKAKNLADDMVRNTARDLLYYAVTQDAMLIFENLSRGFGRQGKRTFMAERQYTRMEDWLTAKLAYEGLPSKTYLSKTLAQYTSKTCSNCGFTITSADYDRVLEKLKKTATGWMTTINGKELKVEGQITYYNRYKRQNVVKDLSVELDRLSEESVNNDISSWTKGRSGEALSLLKKRFSHRPVQEKFVCLNCGFETHADEQAALNIARSWLFLRSQEYKKYQTNKTTGNTDKRAFVETWQSFYRKKLKEVWKPAV

SEQ ID NO: 44835 - protein, 979 aa, synthetic construct
  REGION 1..979: note = engineered CasX variant
QEIKRINKIRRRLVKDSNTKKAGKTGPMKTLLVRVMTPDLRERLENLRKKPENIPQPISNTSRANLNKLLTDYTEMKKAILHVYWEEFQKDPVGLMSRVAQPASKKIDQNKLKPEMDEKGNLTTAGFACSQCGQPLFVYKLEQVSEKGKAYTNYFGRCNVAEHEKLILLAQLKPEKDSDEAVTYSLGKFGQRALDFYSIHVTKESTHPVKPLAQIAGNRYASTPVGKALSDACMGTIASFLSKYQDIIIEHQKVVKGNQKRLESLRELAGKENLEYPSVTLPPQPHTKEGVDAYNEVIARVRMWVNLNLWQKLKLSRDDAKPLLRLKGFPSFPLVERQANEVDWWDMVCNVKKLINEKKEDGKVFWQNLAGYKRQEALRPYLSSEEDRKKGKKFARYQLGDLLLHLEKKHGEDWGKVYDEAWERIDKKVEGLSKHIKLEEERRSEDAQSKAALTDWLRAKASFVIEGLKEADDKDEFCRCDLKLQKWYGDLRGKPFAIEAENSILDISGFSKQYNCAFIWQKDGVKKLNLYLIINYFKGGKLRFKKIKPEAFEANRFYTVINKKSGEIVPMEVNFNFDDPNLIILPLAFGKRQGREFIWNDLLSLETGSLKLANGRVIEKTLYNRRTRQDEPALFVALTFERREVLDSSNIKPMNLIGVDRGENIPAVIALTDPEGCPLSRFKDSLGNPTHILRIGESYKEKQRTIQAKKEVEQRRAGGYSRKYASKAKNLADDMVRNTARDLLYYAVTQDAMLIFENLSRGFGRQGKRTFMAERQYTRMEDWLTAKLAYEGLPSKTYLSKTLAQYTSKTCSNCGFTITSADYDRVLEKLKKTATGWMTTINGKELKVEGQITYYNRYKRQNVVKDLSVELDRLSEESVNNDISSWTKGRSGEALSLLKKRFSHRPVQEKFVCLNCGFETHADEQAALNIARSWLFLRSQEYKKYQTNKTTGNTDKRAFVETWQSFYRKKLKEVWKPAV

SEQ ID NO: 44836 - protein, 979 aa, synthetic construct
  REGION 1..979: note = engineered CasX variant
QEIKRINKIRRRLVKDSNTKKAGKTGPMKTLLVRVMTPDLRERLENLRKKPENIPQPISNTSRANLNKLLTDYTEMKKAILHVYWEEFQKDPVGLMSRVAQPASKKIDQNKLKPEMDEKGNLTTAGFACSQCGQPLFVYKLEQVSEKGKAYTNYFGRCNVAEHEKLILLAQLKPEKDSDEAVTYSLGKFGQRALDFYSIHVTKESTHPVKPLAQIAGNRYASAPVGKALSDACMGTIASFLSKYQDIIIEHQKVVKGNQKRLESLRELAGKENLEYPSVTLPPQPHTKEGVDAYNEVIARVRMWVNLNLWQKLKLSRDDAKPLLRLKGFPSFPLVERQANEVDWWDMVCNVKKLINEKKEDGKVFWQNLAGYKRQEALRPYLSSEEDRKKGKKFARYQLGDLLLHLEKKHGEDWGKVYDEAWERIDKKVEGLSKHIKLEEERRSEDAQSKAALTDWLRAKASFVIEGLKEADDKDEFCRCDLKLQKWYGDLRGKPFAIEAENSILDISGFSKQYNCAFIWQKDGVKKLNLYLIINYFKGGKLRFKKIKPEAFEANRFYTVINKKSGEIVPMEVNFNFDDPNLIILPLAFGKRQGREFIWNDLLSLETGSLKLANGRVIEKTLYNRRTRQDEPALFVALTFERREVLDSSNIKPMNLIGVDRGENIPAVIALTDPEGCPLSRFKDSLGNPTHILRIGESYKEKQRTIQAKKEVEQRRAGGYSRKYASKAKNLADDMVRNTARDLLYYAVTQDAMLIFENLSRGFGRQGKRTFMAERQYTRMEDWLTAKLAYEGLPSKTYLSKTLAQYTSKTCSNCGFTITSADYDRVLEKLKKTATGWMTTINGKELKVEGQITYYNRYKRQNVVKDLSVELDRLSEESVNNDISSWTKGRSGEALSLLKKRFSHRPVQEKFVCLNCGFETHADEQAALNIARSWLFLRSQEYKKYQTNKTTGNTDKRAFVETWQSFYRKKLKEVWKPAV

SEQ ID NO: 44837 - protein, 979 aa, synthetic construct
  REGION 1..979: note = engineered CasX variant
QEIKRINKIRRRLVKDSNTKKAGKTGPMKTLLVRVMTPDLRERLENLRKKPENIPQPISNTSRANLNKLLTDYTEMKKAILHVYWEEFQKDPVGLMSRVAQPASKKIDQNKLKPEMDEKGNLTTAGFACSQCGQPLFVYKLEQVSEKGKAYTNYFGRCNVAEHEKLILLAQLKPEKDSDEAVTYSLGKFGQRALDFYSIHVTKESTHPVKPLAQIAGNRYASVPVGKALSDACMGTIASFLSKYQDIIIEHQKVVKGNQKRLESLRELAGKENLEYPSVTLPPQPHTKEGVDAYNEVIARVRMWVNLNLWQKLKLSRDDAKPLLRLKGFPSFPLVERQANEVDWWDMVCNVKKLINEKKEDGKVFWQNLAGYKRQEALRPYLSSEEDRKKGKKFARYQLGDLLLHLEKKHGEDWGKVYDEAWERIDKKVEGLSKHIKLEEERRSEDAQSKAALTDWLRAKASFVIEGLKEADDKDEFCRCDLKLQKWYGDLRGKPFAIEAENSILDISGFSKQYNCAFIWQKDGVKKLNLYLIINYFKGGKLRFKKIKPEAFEANRFYTVINKKSGEIVPMEVNFNFDDPNLIILPLAFGKRQGREFIWNDLLSLETGSLKLANGRVIEKTLYNRRTRQDEPALFVALTFERREVLDSSNIKPMNLIGVDRGENIPAVIALTDPEGCPLSRFKDSLGNPTHILRIGESYKEKQRTIQAKKEVEQRRAGGYSRKYASKAKNLADDMVRNTARDLLYYAVTQDAMLIFENLSRGFGRQGKRTFMAERQYTRMEDWLTAKLAYEGLPSKTYLSKTLAQYTSKTCSNCGFTITSADYDRVLEKLKKTATGWMTTINGKELKVEGQITYYNRYKRQNVVKDLSVELDRLSEESVNNDISSWTKGRSGEALSLLKKRFSHRPVQEKFVCLNCGFETHADEQAALNIARSWLFLRSQEYKKYQTNKTTGNTDKRAFVETWQSFYRKKLKEVWKPAV

SEQ ID NO: 44838 - protein, 979 aa, synthetic construct
  REGION 1..979: note = engineered CasX variant
QEIKRINKIRRRLVKDSNTKKAGKTGPMKTLLVRVMTPDLRERLENLRKKPENIPQPISNTSRANLNKLLTDYTEMKKAILHVYWEEFQKDPVGLMSRVAQPASKKIDQNKLKPEMDEKGNLTTAGFACSQCGQPLFVYKLEQVSEKGKAYTNYFGRCNVAEHEKLIKLAQLKPEKDSDEAVTYSLGKFGQRALDFYSIHVTKESTHPVKPLAQIAGNRYASGPVGKALSDACMGTIASFLSKYQDIIIEHQKVVKGNQKRLESLRELAGKENLEYPSVTLPPQPHTKEGVDAYNEVIARVRMWVNLNLWQKLKLSRDDAKPLLRLKGFPSFPLVERQANEVDWWDMVCNVKKLINEKKEDGKVFWQNLAGYKRQEALRPYLSSEEDRKKGKKFARYQLGDLLLHLEKKHGEDWGKVYDEAWERIDKKVEGLSKHIKLEEERRSEDAQSKAALTDWLRAKASFVIEGLKEADDKDEFCRCDLKLQKWYGDLRGKPFAIEAENSILDISGFSKQYNCAFIWQKDGVKKLNLYLIINYFKGGKLRFKKIKPEAFEANRFYTVINKKSGEIVPMEVNFNFDDPNLIILPLAFGKRQGREFIWNDLLSLETGSLKLANGRVIEKTLYNRRTRQDEPALFVALTFERREVLDSSNIKPMNLIGVDRGENIPAVIALTDPEGCPLSRFKDSLGNPTHILRIGESYKEKQRTIQAKKEVEQRRAGGYSRKYASKAKNLADDMVRNTARDLLYYAVTQDAMLIFENLSRGFGRQGKRTFMAERQYTRMEDWLTAKLAYEGLPSKTYLSKTLAQYTSKTCSNCGFTITSADYDRVLEKLKKTATGWMTTINGKELKVEGQITYYNRYKRQNVVKDLSVELDRLSEESVNNDISSWTKGRSGEALSLLKKRFSHRPVQEKFVCLNCGFETHADEQAALNIARSWLFLRSQEYKKYQTNKTTGNTDKRAFVETWQSFYRKKLKEVWKPAV

SEQ ID NO: 44839 - protein, 978 aa, synthetic construct
  REGION 1..978: note = engineered CasX variant
QEIKRINKIRRRLVKDSNTKKAGKTGPMKTLLVRVMTPDLRERLENLRKKPENIPQPISNTSRANLNKLLTDYTEMKKAILHVYWEEFQKDPVGLMSRVAQPASKKIDQNKLKPEMDEKGNLTTAGFACSQCGQPLFVYKLEQVSEKGKAYTNYFGRCNVAEHEKLILLAQLKPEKDSDEAVTYSLGKFGQRALDFYSIHVTKESTHPVKPLAQIAGNRYASPVGKALSDACMGTIASFLSKYQDIIIEHQKVVKGNQKRLESLRELAGKENLEYPSVTLPPQPHTKEGVDAYNEVIARVRMWVNLNLWQKLKLSRDDAKPLLRLKGFPSFPLVERQANEVDWWDMVCNVKKLINEKKEDGKVFWQNLAGYKRQEALRPYLSSEEDRKKGKKFARYQLGDLLLHLEKKHGEDWGKVYDEAWERIDKKVEGLSKHIKLEEERRSEDAQSKAALTDWLRAKASFVIEGLKEADDKDEFCRCDLKLQKWYGDLRGKPFAIEAENSILDISGFSKQYNCAFIWQKDGVKKLNLYLIINYFKGGKLRFKKIKPEAFEANRFYTVINKKSGEIVPMEVNFNFDDPNLIILPLAFGKRQGREFIWNDLLSLETGSLKLANGRVIEKTLYNRRTRQDEPALFVALTFERREVLDSSNIKPMNLIGVDRGENIPAVIALTDPEGCPLSRFKDSLGNPTHILRIGESYKEKQRTIQAKKEVEQRRAGGYSRKYASKAKNLADDMVRNTARDLLYYAVTQDAMLIFENLSRGFGRQGKRTFMAERQYTRMEDWLTAKLAYEGLPSKTYLSKTLAQYTSKTCSNCGFTITSADYDRVLEKLKKTATGWMTTINGKELKVEGQITYYNRYKRQNVVKDLSVELDRLSEESVNNDISSWTKGRSGEALSLLKKRFSHRPVQEKFVCLNCGFETHADEQAALNIARSWLFLRSQEYKKYQTNKTTGNTDKRAFVETWQSFYRKKLKEVWKPAV

SEQ ID NO: 44840 - protein, 979 aa, synthetic construct
  REGION 1..979: note = engineered CasX variant
QEIKRINKIRRRLVKDSNTKKAGKTGPMKTLLVRVMTPDLRERLENLRKKPENIPQPISNTSRANLNKLLTDYTEMKKAILHVYWEEFQKDPVGLMSRVAQPASKKIDQNKLKPEMDEKGNLTTAGFACSQCGQPLFVYKLEQVSEKGKAYTNYFGRCNVAEHEKLILLAQLKPEKDSDEAVTYSLGKFGQRALDFYSIHVTKESTHPVKPLAQIAGNRYASYPVGKALSDACMGTIASFLSKYQDIIIEHQKVVKGNQKRLESLRELAGKENLEYPSVTLPPQPHTKEGVDAYNEVIARVRMWVNLNLWQKLKLSRDDAKPLLRLKGFPSFPLVERQANEVDWWDMVCNVKKLINEKKEDGKVFWQNLAGYKRQEALRPYLSSEEDRKKGKKFARYQLGDLLLHLEKKHGEDWGKVYDEAWERIDKKVEGLSKHIKLEEERRSEDAQSKAALTDWLRAKASFVIEGLKEADKDEFCRCDLKLQKWYGDLRGKPFAIEAENSILDISGFSKQYNCAFIWQKDGVKKLNLYLIINYFKGGKLRFKKIKPEAFEANRFYTVINKKSGEIVPMEVNFNFDDPNLIILPLAFGKRQGREFIWNDLLSLETGSLKLANGRVIEKTLYNRRTRQDEPALFVALTFERREVLDSSNIKPMNLIGVDRGENIPAVIALTDPEGCPLSRFKDSLGNPTHILRIGESYKEKQRTIQAKKEVEQRRAGGYSRKYASKAKNLADDMVRNTARDLLYYAVTQDAMLIFENLSRGFGRQGKRTFMAERQYTRMEDWLTAKLAYEGLPSKTYLSKTLAQYTSKTCSNCGFTITSADYDRVLEKLKKTATGWMTTINGKELKVEGQITYYNRYKRQNVVKDLSVELDRLSEESVNNDISSWTKGRSGNEALSLLKKRFSHRPVQEKFVCLNCGFETHADEQAALNIARSWLFLRSQEYKKYQTNKTTGNTDKRAFVETWQSFYRKKLKEVWKPAV

SEQ ID NO: 44841 - protein, 979 aa, synthetic construct
  REGION 1..979: note = engineered CasX variant
QEIKRINKIRRRLVKDSNTKKAGKTGPMKTLLVRVMTPDLRERLENLRKKPENIPQPISNTSRANLNKLLTDYTEMKKAILHVYWEEFQKDPVGLMSRVAQPASKKIDQNKLKPEMDEKGNLTTAGFACSQCGQPLFVYKLEQVSEKGKAYTNYFGRCNVAEHEKLILLAQLKPEKDSDEAVTYSLGKFGQRALDFYSIHVTKESTHPVKPLAQIAGNRYASHPVGKALSDACMGTIASFLSKYQDIIIEHQKVVKGNQKRLESLRELAGKENLEYPSVTLPPQPHTKEGVDAYNEVIARVRMWVNLNLWQKLKLSRDDAKPLLRLKGFPSFPLVERQANEVDWWDMVCNVKKLINEKKEDGKVFWQNLAGYKRQEALRPYLSSEEDRKKGKKFARYQLGDLLLHLEKKHGEDWGKVYDEAWERIDKKVEGLSKHIKLEEERRSEDAQSKAALTDWLRAKASFVIEGLKEADKDEFCRCDLKLQKWYGDLRGKPFAIEAENSILDISGFSKQYNCAFIWQKDGVKKLNLYLIINYFKGGKLRFKKIKPEAFEANRFYTVINKKSGEIVPMEVNFNFDDPNLIILPLAFGKRQGREFIWNDLLSLETGSLKLANGRVIEKTLYNRRTRQDEPALFVALTFERREVLDSSNIKPMNLIGVDRGENIPAVIALTDPEGCPLSRFKDSLGNPTHILRIGESYKEKQRTIQAKKEVEQRRAGGYSRKYASKAKNLADDMVRNTARDLLYYAVTQDAMLIFENLSRGFGRQGKRTFMAERQYTRMEDWLTAKLAYEGLPSKTYLSKTLAQYTSKTCSNCGFTITSADYDRVLEKLKKTATGWMTTINGKELKVEGQITYYNRYKRQNVVKDLSVELDRLSEESVNNDISSWTKGRSGNEALSLLKKRFSHRPVQEKFVCLNCGFETHADEQAALNIARSWLFLRSQEYKKYQTNKTTGNTDKRAFVETWQSFYRKKLKEVWKPAV

SEQ ID NO: 44842 - protein, 979 aa, synthetic construct
  REGION 1..979: note = engineered CasX variant
QEIKRINKIRRRLVKDSNTKKAGKTGPMKTLLVRVMTPDLRERLENLRKKPENIPQPISNTSRANLNKLLTDYTEMKKAILHVYWEEFQKDPVGLMSRVAQPASKKIDQNKLKPEMDEKGNLTTAGFACSQCGQPLFVYKLEQVSEKGKAYTNYFGRCNVAEHEKLILLAQLKPEKDSDEAVTYSLGKFGQRALDFYSIHVTKESTHPVKPLAQIAGNRYASSPVGKALSDACMGTIASFLSKYQDIIIEHQKVVKGNQKRLESLRELAGKENLEYPSVTLPPQPHTKEGVDAYNEVIARVRMWVNLNLWQKLKLSRDDAKPLLRLKGFPSFPLVERQANEVDWWDMVCNVKKLINEKKEDGKVFWQNLAGYKRQEALRPYLSSEEDRKKGKKFARYQLGDLLLHLEKKHGEDWGKVYDEAWERIDKKVEGLSKHIKLEEERRSEDAQSKAALTDWLRAKASFVIEGLKEADKDEFCRCDLKLQKWYGDLRGKPFAIEAENSILDISGFSKQYNCAFIWQKDGVKKLNLYLIINYFKGGKLRFKKIKPEAFEANRFYTVINKKSGEIVPMEVNFNFDDPNLIILPLAFGKRQGREFIWNDLLSLETGSLKLANGRVIEKTLYNRRTRQDEPALFVALTFERREVLDSSNIKPMNLIGVDRGENIPAVIALTDPEGCPLSRFKDSLGNPTHILRIGESYKEKQRTIQAKKEVEQRRAGGYSRKYASKAKNLADDMVRNTARDLLYYAVTQDAMLIFENLSRGFGRQGKRTFMAERQYTRMEDWLTAKLAYEGLPSKTYLSKTLAQYTSKTCSNCGFTITSADYDRVLEKLKKTATGWMTTINGKELKVEGQITYYNRYKRQNVVKDLSVELDRLSEESVNNDISSWTKGRSGNEALSLLKKRFSHRPVQEKFVCLNCGFETHADEQAALNIARSWLFLRSQEYKKYQTNKTTGNTDKRAFVETWQSFYRKKLKEVWKPAV

SEQ ID NO: 44843 - protein, 979 aa, synthetic construct
  REGION 1..979: note = engineered CasX variant
QEIKRINKIRRRLVKDSNTKKAGKTGPMKTLLVRVMTPDLRERLENLRKKPENIPQPISNTSRANLNKLLTDYTEMKKAILHVYWEEFQKDPVGLMSRVAQPASKKIDQNKLKPEMDEKGNLTTAGFACSQCGQPLFVYKLEQVSEKGKAYTNYFGRCNVAEHEKLILLAQLKPEKDSDEAVTYSLGKFGQRALDFYSIHVTKESTHPVKPLAQIAGNRYASTPVGKALSDACMGTIASFLSKYQDIIIEHQKVVKGNQKRLESLRELAGKENLEYPSVTLPPQPHTKEGVDAYNEVIARVRMWVNLNLWQKLKLSRDDAKPLLRLKGFPSFPLVERQANEVDWWDMVCNVKKLINEKKEDGKVFWQNLAGYKRQEALRPYLSSEEDRKKGKKFARYQLGDLLLHLEKKHGEDWGKVYDEAWERIDKKVEGLSKHIKLEEERRSEDAQSKAALTDWLRAKASFVIEGLKEADKDEFCRCDLKLQKWYGDLRGKPFAIEAENSILDISGFSKQYNCAFIWQKDGVKKLNLYLIINYFKGGKLRFKKIKPEAFEANRFYTVINKKSGEIVPMEVNFNFDDPNLIILPLAFGKRQGREFIWNDLLSLETGSLKLANGRVIEKTLYNRRTRQDEPALFVALTFERREVLDSSNIKPMNLIGVDRGENIPAVIALTDPEGCPLSRFKDSLGNPTHILRIGESYKEKQRTIQAKKEVEQRRAGGYSRKYASKAKNLADDMVRNTARDLLYYAVTQDAMLIFENLSRGFGRQGKRTFMAERQYTRMEDWLTAKLAYEGLPSKTYLSKTLAQYTSKTCSNCGFTITSADYDRVLEKLKKTATGWMTTINGKELKVEGQITYYNRYKRQNVVKDLSVELDRLSEESVNNDISSWTKGRSGNEALSLLKKRFSHRPVQEKFVCLNCGFETHADEQAALNIARSWLFLRSQEYKKYQTNKTTGNTDKRAFVETWQSFYRKKLKEVWKPAV

SEQ ID NO: 44844 - protein, 979 aa, synthetic construct
  REGION 1..979: note = engineered CasX variant
QEIKRINKIRRRLVKDSNTKKAGKTGPMKTLLVRVMTPDLRERLENLRKKPENIPQPISNTSRANLNKLLTDYTEMKKAILHVYWEEFQKDPVGLMSRVAQPASKKIDQNKLKPEMDEKGNLTTAGFACSQCGQPLFVYKLEQVSEKGKAYTNYFGRCNVAEHEKLILLAQLKPEKDSDEAVTYSLGKFGQRALDFYSIHVTKESTHPVKPLAQIAGNRYASAPVGKALSDACMGTIASFLSKYQDIIIEHQKVVKGNQKRLESLRELAGKENLEYPSVTLPPQPHTKEGVDAYNEVIARVRMWVNLNLWQKLKLSRDDAKPLLRLKGFPSFPLVERQANEVDWWDMVCNVKKLINEKKEDGKVFWQNLAGYKRQEALRPYLSSEEDRKKGKKFARYQLGDLLLHLEKKHGEDWGKVYDEAWERIDKKVEGLSKHIKLEEERRSEDAQSKAALTDWLRAKASFVIEGLKEADKDEFCRCDLKLQKWYGDLRGKPFAIEAENSILDISGFSKQYNCAFIWQKDGVKKLNLYLIINYFKGGKLRFKKIKPEAFEANRFYTVINKKSGEIVPMEVNFNFDDPNLIILPLAFGKRQGREFIWNDLLSLETGSLKLANGRVIEKTLYNRRTRQDEPALFVALTFERREVLDSSNIKPMNLIGVDRGENIPAVIALTDPEGCPLSRFKDSLGNPTHILRIGESYKEKQRTIQAKKEVEQRRAGGYSRKYASKAKNLADDMVRNTARDLLYYAVTQDAMLIFENLSRGFGRQGKRTFMAERQYTRMEDWLTAKLAYEGLPSKTYLSKTLAQYTSKTCSNCGFTITSADYDRVLEKLKKTATGWMTTINGKELKVEGQITYYNRYKRQNVVKDLSVELDRLSEESVNNDISSWTKGRSGNEALSLLKKRFSHRPVQEKFVCLNCGFETHADEQAALNIARSWLFLRSQEYKKYQTNKTTGNTDKRAFVETWQSFYRKKLKEVWKPAV

SEQ ID NO: 44845 - protein, 979 aa, synthetic construct
  REGION 1..979: note = engineered CasX variant
QEIKRINKIRRRLVKDSNTKKAGKTGPMKTLLVRVMTPDLRERLENLRKKPENIPQPISNTSRANLNKLLTDYTEMKKAILHVYWEEFQKDPVGLMSRVAQPASKKIDQNKLKPEMDEKGNLTTAGFACSQCGQPLFVYKLEQVSEKGKAYTNYFGRCNVAEHEKLILLAQLKPEKDSDEAVTYSLGKFGQRALDFYSIHVTKESTHPVKPLAQIAGNRYASVPVGKALSDACMGTIASFLSKYQDIIIEHQKVVKGNQKRLESLRELAGKENLEYPSVTLPPQPHTKEGVDAYNEVIARVRMWVNLNLWQKLKLSRDDAKPLLRLKGFPSFPLVERQANEVDWWDMVCNVKKLINEKKEDGKVFWQNLAGYKRQEALRPYLSSEEDRKKGKKFARYQLGDLLLHLEKKHGEDWGKVYDEAWERIDKKVEGLSKHIKLEEERRSEDAQSKAALTDWLRAKASFVIEGLKEADKDEFCRCDLKLQKWYGDLRGKPFAIEAENSILDISGFSKQYNCAFIWQKDGVKKLNLYLIINYFKGGKLRFKKIKPEAFEANRFYTVINKKSGEIVPMEVNFNFDDPNLIILPLAFGKRQGREFIWNDLLSLETGSLKLANGRVIEKTLYNRRTRQDEPALFVALTFERREVLDSSNIKPMNLIGVDRGENIPAVIALTDPEGCPLSRFKDSLGNPTHILRIGESYKEKQRTIQAKKEVEQRRAGGYSRKYASKAKNLADDMVRNTARDLLYYAVTQDAMLIFENLSRGFGRQGKRTFMAERQYTRMEDWLTAKLAYEGLPSKTYLSKTLAQYTSKTCSNCGFTITSADYDRVLEKLKKTATGWMTTINGKELKVEGQITYYNRYKRQNVVKDLSVELDRLSEESVNNDISSWTKGRSGNEALSLLKKRFSHRPVQEKFVCLNCGFETHADEQAALNIARSWLFLRSQEYKKYQTNKTTGNTDKRAFVETWQSFYRKKLKEVWKPAV

SEQ ID NO: 44846 - protein, 979 aa, synthetic construct
  REGION 1..979: note = engineered CasX variant
QEIKRINKIRRRLVKDSNTKKAGKTGPMKTLLVRVMTPDLRERLENLRKKPENIPQPISNTSRANLNKLLTDYTEMKKAILHVYWEEFQKDPVGLMSRVAQPASKKIDQNKLKPEMDEKGNLTTAGFACSQCGQPLFVYKLEQVSEKGKAYTNYFGRCNVAEHEKLIKLAQLKPEKDSDEAVTYSLGKFGQRALDFYSIHVTKESTHPVKPLAQIAGNRYASGPVGKALSDACMGTIASFLSKYQDIIIEHQKVVKGNQKRLESLRELAGKENLEYPSVTLPPQPHTKEGVDAYNEVIARVRMWVNLNLWQKLKLSRDDAKPLLRLKGFPSFPLVERQANEVDWWDMVCNVKKLINEKKEDGKVFWQNLAGYKRQEALRPYLSSEEDRKKGKKFARYQLGDLLLHLEKKHGEDWGKVYDEAWERIDKKVEGLSKHIKLEEERRSEDAQSKAALTDWLRAKASFVIEGLKEADKDEFCRCDLKLQKWYGDLRGKPFAIEAENSILDISGFSKQYNCAFIWQKDGVKKLNLYLIINYFKGGKLRFKKIKPEAFEANRFYTVINKKSGEIVPMEVNFNFDDPNLIILPLAFGKRQGREFIWNDLLSLETGSLKLANGRVIEKTLYNRRTRQDEPALFVALTFERREVLDSSNIKPMNLIGVDRGENIPAVIALTDPEGCPLSRFKDSLGNPTHILRIGESYKEKQRTIQAKKEVEQRRAGGYSRKYASKAKNLADDMVRNTARDLLYYAVTQDAMLIFENLSRGFGRQGKRTFMAERQYTRMEDWLTAKLAYEGLPSKTYLSKTLAQYTSKTCSNCGFTITSADYDRVLEKLKKTATGWMTTINGKELKVEGQITYYNRYKRQNVVKDLSVELDRLSEESVNNDISSWTKGRSGNEALSLLKKRFSHRPVQEKFVCLNCGFETHADEQAALNIARSWLFLRSQEYKKYQTNKTTGNTDKRAFVETWQSFYRKKLKEVWKPAV

SEQ ID NO: 44847 - protein, 978 aa, synthetic construct
  REGION 1..978: note = engineered CasX variant
QEIKRINKIRRRLVKDSNTKKAGKTGPMKTLLVRVMTPDLRERLENLRKKPENIPQPISNTSRANLNKLLTDYTEMKKAILHVYWEEFQKDPVGLMSRVAQPASKKIDQNKLKPEMDEKGNLTTAGFACSQCGQPLFVYKLEQVSEKGKAYTNYFGRCNVAEHEKLILLAQLKPEKDSDEAVTYSLGKFGQRALDFYSIHVTKESTHPVKPLAQIAGNRYASPVGKALSDACMGTIASFLSKYQDIIIEHQKVVKGNQKRLESLRELAGKENLEYPSVTLPPQPHTKEGVDAYNEVIARVRMWVNLNLWQKLKLSRDDAKPLLRLKGFPSFPLVERQANEVDWWDMVCNVKKLINEKKEDGKVFWQNLAGYKRQEALRPYLSSEEDRKKGKKFARYQLGDLLLHLEKKHGEDWGKVYDEAWERIDKKVEGLSKHIKLEEERRSEDAQSKAALTDWLRAKASFVIEGLKEADKDEFCRCDLKLQKWYGDLRGKPFAIEAENSILDISGFSKQYNCAFIWQKDGVKKLNLYLIINYFKGGKLRFKKIKPEAFEANRFYTVINKKSGEIVPMEVNFNFDDPNLIILPLAFGKRQGREFIWNDLLSLETGSLKLANGRVIEKTLYNRRTRQDEPALFVALTFERREVLDSSNIKPMNLIGVDRGENIPAVIALTDPEGCPLSRFKDSLGNPTHILRIGESYKEKQRTIQAKKEVEQRRAGGYSRKYASKAKNLADDMVRNTARDLLYYAVTQDAMLIFENLSRGFGRQGKRTFMAERQYTRMEDWLTAKLAYEGLPSKTYLSKTLAQYTSKTCSNCGFTITSADYDRVLEKLKKTATGWMTTINGKELKVEGQITYYNRYKRQNVVKDLSVELDRLSEESVNNDISSWTKGRSGNEALSLLKKRFSHRPVQEKFVCLNCGFETHADEQAALNIARSWLFLRSQEYKKYQTNKTTGNTDKRAFVETWQSFYRKKLKEVWKPAV

SEQ ID NO: 44848 - protein, 978 aa, synthetic construct
  REGION 1..978: note = engineered CasX variant
QEIKRINKIRRRLVKDSNTKKAGKTGPMKTLLVRVMTPDLRERLENLRKKPENIPQPISNTSRANLNKLLTDYTEMKKAILHVYWEEFQKDPVGLMSRVAQPASKKIDQNKLKPEMDEKGNLTTAGFACSQCGQPLFVYKLEQVSEKGKAYTNYFGRCNVAEHEKLILLAQLKPEKDSDEAVTYSLGKFGQRALDFYSIHVTKESTHPVKPLAQIAGNRYASYPVGKALSDACMGTIASFLSKYQDIIIEHQKVVKGNQKRLESLRELAGKENLEYPSVTLPPQPHTKEGVDAYNEVIARVRMWVNLNLWQKLKLSRDDAKPLLRLKGFPSFPLVERQANEVDWWDMVCNVKKLINEKKEDGKVFWQNLAGYKRQEALRPYLSSEEDRQKGKKFARYQLGDLLLHLEKKHGEDWGKVYDEAWERIDKKVEGLSKHIKLEEERRSEDAQSKAALTDWLRAKASFVIEGLKEADKDEFCRCDLKLQKWYGDLRGKPFAIEAENSILDISGFSKQYNCAFIWQKDGVKKLNLYLIINYFKGGKLRFKKIKPEAFEANRFYTVINKKSGEIVPMEVNFNFDDPNLIILPLAFGKRQGREFIWNDLLSLETGSLKLANGRVIEKTLYNRRTRQDEPALFVALTFERREVLDSSNIKPMNLIGVDRGENIPAVIALTDPEGCPLSRFKDSLGNPTHILRIGESYKEKQRTIQAKKEVEQRRAGGYSRKYASKAKNLADDMVRNTARDLLYYAVTQDAMLIFENLSRGFGRQGKRTFMAERQYTRMEDWLTAKLAYEGLPSKTYLSKTLAQYTSKTCSNCGFTITSADYDRVLEKLKKTATGWMTTINGKELKVEGQITYYNRYKRQNVVKDLSVELDRLSEESVNNDISSWTKGRSGEALSLLKKRFSHRPVQEKFVCLNCGFETHADEQAALNIARSWLFLRSQEYKKYQTNKTTGNTDKRAFVETWQSFYRKKLKEVWKPAV

SEQ ID NO: 44849 - protein, 978 aa, synthetic construct
  REGION 1..978: note = engineered CasX variant
QEIKRINKIRRRLVKDSNTKKAGKTGPMKTLLVRVMTPDLRERLENLRKKPENIPQPISNTSRANLNKLLTDYTEMKKAILHVYWEEFQKDPVGLMSRVAQPASKKIDQNKLKPEMDEKGNLTTAGFACSQCGQPLFVYKLEQVSEKGKAYTNYFGRCNVAEHEKLILLAQLKPEKDSDEAVTYSLGKFGQRALDFYSIHVTKESTHPVKPLAQIAGNRYASHPVGKALSDACMGTIASFLSKYQDIIIEHQKVVKGNQKRLESLRELAGKENLEYPSVTLPPQPHTKEGVDAYNEVIARVRMWVNLNLWQKLKLSRDDAKPLLRLKGFPSFPLVERQANEVDWWDMVCNVKKLINEKKEDGKVFWQNLAGYKRQEALRPYLSSEEDRQKGKKFARYQLGDLLLHLEKKHGEDWGKVYDEAWERIDKKVEGLSKHIKLEEERRSEDAQSKAALTDWLRAKASFVIEGLKEADKDEFCRCDLKLQKWYGDLRGKPFAIEAENSILDISGFSKQYNCAFIWQKDGVKKLNLYLIINYFKGGKLRFKKIKPEAFEANRFYTVINKKSGEIVPMEVNFNFDDPNLIILPLAFGKRQGREFIWNDLLSLETGSLKLANGRVIEKTLYNRRTRQDEPALFVALTFERREVLDSSNIKPMNLIGVDRGENIPAVIALTDPEGCPLSRFKDSLGNPTHILRIGESYKEKQRTIQAKKEVEQRRAGGYSRKYASKAKNLADDMVRNTARDLLYYAVTQDAMLIFENLSRGFGRQGKRTFMAERQYTRMEDWLTAKLAYEGLPSKTYLSKTLAQYTSKTCSNCGFTITSADYDRVLEKLKKTATGWMTTINGKELKVEGQITYYNRYKRQNVVKDLSVELDRLSEESVNNDISSWTKGRSGEALSLLKKRFSHRPVQEKFVCLNCGFETHADEQAALNIARSWLFLRSQEYKKYQTNKTTGNTDKRAFVETWQSFYRKKLKEVWKPAV

SEQ ID NO: 44850 - protein, 978 aa, synthetic construct
  REGION 1..978: note = engineered CasX variant
QEIKRINKIRRRLVKDSNTKKAGKTGPMKTLLVRVMTPDLRERLENLRKKPENIPQPISNTSRANLNKLLTDYTEMKKAILHVYWEEFQKDPVGLMSRVAQPASKKIDQNKLKPEMDEKGNLTTAGFACSQCGQPLFVYKLEQVSEKGKAYTNYFGRCNVAEHEKLILLAQLKPEKDSDEAVTYSLGKFGQRALDFYSIHVTKESTHPVKPLAQIAGNRYASSPVGKALSDACMGTIASFLSKYQDIIIEHQKVVKGNQKRLESLRELAGKENLEYPSVTLPPQPHTKEGVDAYNEVIARVRMWVNLNLWQKLKLSRDDAKPLLRLKGFPSFPLVERQANEVDWWDMVCNVKKLINEKKEDGKVFWQNLAGYKRQEALRPYLSSEEDRQKGKKFARYQLGDLLLHLEKKHGEDWGKVYDEAWERIDKKVEGLSKHIKLEEERRSEDAQSKAALTDWLRAKASFVIEGLKEADKDEFCRCDLKLQKWYGDLRGKPFAIEAENSILDISGFSKQYNCAFIWQKDGVKKLNLYLIINYFKGGKLRFKKIKPEAFEANRFYTVINKKSGEIVPMEVNFNFDDPNLIILPLAFGKRQGREFIWNDLLSLETGSLKLANGRVIEKTLYNRRTRQDEPALFVALTFERREVLDSSNIKPMNLIGVDRGENIPAVIALTDPEGCPLSRFKDSLGNPTHILRIGESYKEKQRTIQAKKEVEQRRAGGYSRKYASKAKNLADDMVRNTARDLLYYAVTQDAMLIFENLSRGFGRQGKRTFMAERQYTRMEDWLTAKLAYEGLPSKTYLSKTLAQYTSKTCSNCGFTITSADYDRVLEKLKKTATGWMTTINGKELKVEGQITYYNRYKRQNVVKDLSVELDRLSEESVNNDISSWTKGRSGEALSLLKKRFSHRPVQEKFVCLNCGFETHADEQAALNIARSWLFLRSQEYKKYQTNKTTGNTDKRAFVETWQSFYRKKLKEVWKPAV

SEQ ID NO: 44851 - protein, 978 aa, synthetic construct
  REGION 1..978: note = engineered CasX variant
QEIKRINKIRRRLVKDSNTKKAGKTGPMKTLLVRVMTPDLRERLENLRKKPENIPQPISNTSRANLNKLLTDYTEMKKAILHVYWEEFQKDPVGLMSRVAQPASKKIDQNKLKPEMDEKGNLTTAGFACSQCGQPLFVYKLEQVSEKGKAYTNYFGRCNVAEHEKLILLAQLKPEKDSDEAVTYSLGKFGQRALDFYSIHVTKESTHPVKPLAQIAGNRYASTPVGKALSDACMGTIASFLSKYQDIIIEHQKVVKGNQKRLESLRELAGKENLEYPSVTLPPQPHTKEGVDAYNEVIARVRMWVNLNLWQKLKLSRDDAKPLLRLKGFPSFPLVERQANEVDWWDMVCNVKKLINEKKEDGKVFWQNLAGYKRQEALRPYLSSEEDRQKGKKFARYQLGDLLLHLEKKHGEDWGKVYDEAWERIDKKVEGLSKHIKLEEERRSEDAQSKAALTDWLRAKASFVIEGLKEADKDEFCRCDLKLQKWYGDLRGKPFAIEAENSILDISGFSKQYNCAFIWQKDGVKKLNLYLIINYFKGGKLRFKKIKPEAFEANRFYTVINKKSGEIVPMEVNFNFDDPNLIILPLAFGKRQGREFIWNDLLSLETGSLKLANGRVIEKTLYNRRTRQDEPALFVALTFERREVLDSSNIKPMNLIGVDRGENIPAVIALTDPEGCPLSRFKDSLGNPTHILRIGESYKEKQRTIQAKKEVEQRRAGGYSRKYASKAKNLADDMVRNTARDLLYYAVTQDAMLIFENLSRGFGRQGKRTFMAERQYTRMEDWLTAKLAYEGLPSKTYLSKTLAQYTSKTCSNCGFTITSADYDRVLEKLKKTATGWMTTINGKELKVEGQITYYNRYKRQNVVKDLSVELDRLSEESVNNDISSWTKGRSGEALSLLKKRFSHRPVQEKFVCLNCGFETHADEQAALNIARSWLFLRSQEYKKYQTNKTTGNTDKRAFVETWQSFYRKKLKEVWKPAV

SEQ ID NO: 44852 - protein, 978 aa, synthetic construct
  REGION 1..978: note = engineered CasX variant
QEIKRINKIRRRLVKDSNTKKAGKTGPMKTLLVRVMTPDLRERLENLRKKPENIPQPISNTSRANLNKLLTDYTEMKKAILHVYWEEFQKDPVGLMSRVAQPASKKIDQNKLKPEMDEKGNLTTAGFACSQCGQPLFVYKLEQVSEKGKAYTNYFGRCNVAEHEKLILLAQLKPEKDSDEAVTYSLGKFGQRALDFYSIHVTKESTHPVKPLAQIAGNRYASAPVGKALSDACMGTIASFLSKYQDIIIEHQKVVKGNQKRLESLRELAGKENLEYPSVTLPPQPHTKEGVDAYNEVIARVRMWVNLNLWQKLKLSRDDAKPLLRLKGFPSFPLVERQANEVDWWDMVCNVKKLINEKKEDGKVFWQNLAGYKRQEALRPYLSSEEDRQKGKKFARYQLGDLLLHLEKKHGEDWGKVYDEAWERIDKKVEGLSKHIKLEEERRSEDAQSKAALTDWLRAKASFVIEGLKEADKDEFCRCDLKLQKWYGDLRGKPFAIEAENSILDISGFSKQYNCAFIWQKDGVKKLNLYLIINYFKGGKLRFKKIKPEAFEANRFYTVINKKSGEIVPMEVNFNFDDPNLIILPLAFGKRQGREFIWNDLLSLETGSLKLANGRVIEKTLYNRRTRQDEPALFVALTFERREVLDSSNIKPMNLIGVDRGENIPAVIALTDPEGCPLSRFKDSLGNPTHILRIGESYKEKQRTIQAKKEVEQRRAGGYSRKYASKAKNLADDMVRNTARDLLYYAVTQDAMLIFENLSRGFGRQGKRTFMAERQYTRMEDWLTAKLAYEGLPSKTYLSKTLAQYTSKTCSNCGFTITSADYDRVLEKLKKTATGWMTTINGKELKVEGQITYYNRYKRQNVVKDLSVELDRLSEESVNNDISSWTKGRSGEALSLLKKRFSHRPVQEKFVCLNCGFETHADEQAALNIARSWLFLRSQEYKKYQTNKTTGNTDKRAFVETWQSFYRKKLKEVWKPAV

SEQ ID NO: 44853 - protein, 978 aa, synthetic construct
  REGION 1..978: note = engineered CasX variant
QEIKRINKIRRRLVKDSNTKKAGKTGPMKTLLVRVMTPDLRERLENLRKKPENIPQPISNTSRANLNKLLTDYTEMKKAILHVYWEEFQKDPVGLMSRVAQPASKKIDQNKLKPEMDEKGNLTTAGFACSQCGQPLFVYKLEQVSEKGKAYTNYFGRCNVAEHEKLILLAQLKPEKDSDEAVTYSLGKFGQRALDFYSIHVTKESTHPVKPLAQIAGNRYASVPVGKALSDACMGTIASFLSKYQDIIIEHQKVVKGNQKRLESLRELAGKENLEYPSVTLPPQPHTKEGVDAYNEVIARVRMWVNLNLWQKLKLSRDDAKPLLRLKGFPSFPLVERQANEVDWWDMVCNVKKLINEKKEDGKVFWQNLAGYKRQEALRPYLSSEEDRQKGKKFARYQLGDLLLHLEKKHGEDWGKVYDEAWERIDKKVEGLSKHIKLEEERRSEDAQSKAALTDWLRAKASFVIEGLKEADKDEFCRCDLKLQKWYGDLRGKPFAIEAENSILDISGFSKQYNCAFIWQKDGVKKLNLYLIINYFKGGKLRFKKIKPEAFEANRFYTVINKKSGEIVPMEVNFNFDDPNLIILPLAFGKRQGREFIWNDLLSLETGSLKLANGRVIEKTLYNRRTRQDEPALFVALTFERREVLDSSNIKPMNLIGVDRGENIPAVIALTDPEGCPLSRFKDSLGNPTHILRIGESYKEKQRTIQAKKEVEQRRAGGYSRKYASKAKNLADDMVRNTARDLLYYAVTQDAMLIFENLSRGFGRQGKRTFMAERQYTRMEDWLTAKLAYEGLPSKTYLSKTLAQYTSKTCSNCGFTITSADYDRVLEKLKKTATGWMTTINGKELKVEGQITYYNRYKRQNVVKDLSVELDRLSEESVNNDISSWTKGRSGEALSLLKKRFSHRPVQEKFVCLNCGFETHADEQAALNIARSWLFLRSQEYKKYQTNKTTGNTDKRAFVETWQSFYRKKLKEVWKPAV

SEQ ID NO: 44854 - protein, 978 aa, synthetic construct
  REGION 1..978: note = engineered CasX variant
QEIKRINKIRRRLVKDSNTKKAGKTGPMKTLLVRVMTPDLRERLENLRKKPENIPQPISNTSRANLNKLLTDYTEMKKAILHVYWEEFQKDPVGLMSRVAQPASKKIDQNKLKPEMDEKGNLTTAGFACSQCGQPLFVYKLEQVSEKGKAYTNYFGRCNVAEHEKLIKLAQLKPEKDSDEAVTYSLGKFGQRALDFYSIHVTKESTHPVKPLAQIAGNRYASGPVGKALSDACMGTIASFLSKYQDIIIEHQKVVKGNQKRLESLRELAGKENLEYPSVTLPPQPHTKEGVDAYNEVIARVRMWVNLNLWQKLKLSRDDAKPLLRLKGFPSFPLVERQANEVDWWDMVCNVKKLINEKKEDGKVFWQNLAGYKRQEALRPYLSSEEDRQKGKKFARYQLGDLLLHLEKKHGEDWGKVYDEAWERIDKKVEGLSKHIKLEEERRSEDAQSKAALTDWLRAKASFVIEGLKEADKDEFCRCDLKLQKWYGDLRGKPFAIEAENSILDISGFSKQYNCAFIWQKDGVKKLNLYLIINYFKGGKLRFKKIKPEAFEANRFYTVINKKSGEIVPMEVNFNFDDPNLIILPLAFGKRQGREFIWNDLLSLETGSLKLANGRVIEKTLYNRRTRQDEPALFVALTFERREVLDSSNIKPMNLIGVDRGENIPAVIALTDPEGCPLSRFKDSLGNPTHILRIGESYKEKQRTIQAKKEVEQRRAGGYSRKYASKAKNLADDMVRNTARDLLYYAVTQDAMLIFENLSRGFGRQGKRTFMAERQYTRMEDWLTAKLAYEGLPSKTYLSKTLAQYTSKTCSNCGFTITSADYDRVLEKLKKTATGWMTTINGKELKVEGQITYYNRYKRQNVVKDLSVELDRLSEESVNNDISSWTKGRSGEALSLLKKRFSHRPVQEKFVCLNCGFETHADEQAALNIARSWLFLRSQEYKKYQTNKTTGNTDKRAFVETWQSFYRKKLKEVWKPAV

SEQ ID NO: 44855 - protein, 977 aa, synthetic construct
  REGION 1..977: note = engineered CasX variant
QEIKRINKIRRRLVKDSNTKKAGKTGPMKTLLVRVMTPDLRERLENLRKKPENIPQPISNTSRANLNKLLTDYTEMKKAILHVYWEEFQKDPVGLMSRVAQPASKKIDQNKLKPEMDEKGNLTTAGFACSQCGQPLFVYKLEQVSEKGKAYTNYFGRCNVAEHEKLILLAQLKPEKDSDEAVTYSLGKFGQRALDFYSIHVTKESTHPVKPLAQIAGNRYASPVGKALSDACMGTIASFLSKYQDIIIEHQKVVKGNQKRLESLRELAGKENLEYPSVTLPPQPHTKEGVDAYNEVIARVRMWVNLNLWQKLKLSRDDAKPLLRLKGFPSFPLVERQANEVDWWDMVCNVKKLINEKKEDGKVFWQNLAGYKRQEALRPYLSSEEDRQKGKKFARYQLGDLLLHLEKKHGEDWGKVYDEAWERIDKKVEGLSKHIKLEEERRSEDAQSKAALTDWLRAKASFVIEGLKEADKDEFCRCDLKLQKWYGDLRGKPFAIEAENSILDISGFSKQYNCAFIWQKDGVKKLNLYLIINYFKGGKLRFKKIKPEAFEANRFYTVINKKSGEIVPMEVNFNFDDPNLIILPLAFGKRQGREFIWNDLLSLETGSLKLANGRVIEKTLYNRRTRQDEPALFVALTFERREVLDSSNIKPMNLIGVDRGENIPAVIALTDPEGCPLSRFKDSLGNPTHILRIGESYKEKQRTIQAKKEVEQRRAGGYSRKYASKAKNLADDMVRNTARDLLYYAVTQDAMLIFENLSRGFGRQGKRTFMAERQYTRMEDWLTAKLAYEGLPSKTYLSKTLAQYTSKTCSNCGFTITSADYDRVLEKLKKTATGWMTTINGKELKVEGQITYYNRYKRQNVVKDLSVELDRLSEESVNNDISSWTKGRSGEALSLLKKRFSHRPVQEKFVCLNCGFETHADEQAALNIARSWLFLRSQEYKKYQTNKTTGNTDKRAFVETWQSFYRKKLKEVWKPAV

SEQ ID NO: 44856 - protein, 978 aa, synthetic construct
  REGION 1..978: note = engineered CasX variant
QEIKRINKIRRRLVKDSNTKKAGKTGPMKTLLVRVMTPDLRERLENLRKKPENIPQPISNTSRANLNKLLTDYTEMKKAILHVYWEEFQKDPVGLMSRVAQPASKKIDQNKLKPEMDEKGNLTTAGFACSQCGQPLFVYKLEQVSEKGKAYTNYFGRCNVAEHEKLILLAQLKPEKDSDEAVTYSLGKFGQRALDFYSIHVTKESTHPVKPLAQIAGNRYASYPVGKALSDACMGTIASFLSKYQDIIIEHQKVVKGNQKRLESLRELAGKENLEYPSVTLPPQPHTKEGVDAYNEVIARVRMWVNLNLWQKLKLSRDDAKPLLRLKGFPSFPLVERQANEVDWWDMVCNVKKLINEKKEDGKVFWQNLAGYKRQEALRPYLSSEEDRKKGKKFARYQLGDLLLHLEKKHGEDWGKVYDEAWERIDKKVEGLSKHIKLEEERRSEDAQSKAALTDWLRAKASFVIEGLKEADKDEFCRCDLKLQKWYGDLRGKPFAIEAENSILDISGFSKQYNCAFIWQKDGVKKLNLYLIINYFKGGKLRFKKIKPEAFEANRFYTVINKKSGEIVPMEVNFNFDDPNLIILPLAFGKRQGREFIWNDLLSLETGSLKLANGRVIEKTLYNRRTRQDEPALFVALTFERREVLDSSNIKPMNLIGVDRGENIPAVIALTDPEGCPLSRFKDSLGNPTHILRIGESYKEKQRTIQAKKEVEQRRAGGYSRKYASKAKNLADDMVRNTARDLLYYAVTQDAMLIFENLSRGFGRQGKRTFMAERQYTRMEDWLTAKLAYEGLPSQTYLSKTLAQYTSKTCSNCGFTITSADYDRVLEKLKKTATGWMTTINGKELKVEGQITYYNRYKRQNVVKDLSVELDRLSEESVNNDISSWTKGRSGEALSLLKKRFSHRPVQEKFVCLNCGFETHADEQAALNIARSWLFLRSQEYKKYQTNKTTGNTDKRAFVETWQSFYRKKLKEVWKPAV

SEQ ID NO: 44857 - protein, 978 aa, synthetic construct
  REGION 1..978: note = engineered CasX variant
QEIKRINKIRRRLVKDSNTKKAGKTGPMKTLLVRVMTPDLRERLENLRKKPENIPQPISNTSRANLNKLLTDYTEMKKAILHVYWEEFQKDPVGLMSRVAQPASKKIDQNKLKPEMDEKGNLTTAGFACSQCGQPLFVYKLEQVSEKGKAYTNYFGRCNVAEHEKLILLAQLKPEKDSDEAVTYSLGKFGQRALDFYSIHVTKESTHPVKPLAQIAGNRYASHPVGKALSDACMGTIASFLSKYQDIIIEHQKVVKGNQKRLESLRELAGKENLEYPSVTLPPQPHTKEGVDAYNEVIARVRMWVNLNLWQKLKLSRDDAKPLLRLKGFPSFPLVERQANEVDWWDMVCNVKKLINEKKEDGKVFWQNLAGYKRQEALRPYLSSEEDRKKGKKFARYQLGDLLLHLEKKHGEDWGKVYDEAWERIDKKVEGLSKHIKLEEERRSEDAQSKAALTDWLRAKASFVIEGLKEADKDEFCRCDLKLQKWYGDLRGKPFAIEAENSILDISGFSKQYNCAFIWQKDGVKKLNLYLIINYFKGGKLRFKKIKPEAFEANRFYTVINKKSGEIVPMEVNFNFDDPNLIILPLAFGKRQGREFIWNDLLSLETGSLKLANGRVIEKTLYNRRTRQDEPALFVALTFERREVLDSSNIKPMNLIGVDRGENIPAVIALTDPEGCPLSRFKDSLGNPTHILRIGESYKEKQRTIQAKKEVEQRRAGGYSRKYASKAKNLADDMVRNTARDLLYYAVTQDAMLIFENLSRGFGRQGKRTFMAERQYTRMEDWLTAKLAYEGLPSQTYLSKTLAQYTSKTCSNCGFTITSADYDRVLEKLKKTATGWMTTINGKELKVEGQITYYNRYKRQNVVKDLSVELDRLSEESVNNDISSWTKGRSGEALSLLKKRFSHRPVQEKFVCLNCGFETHADEQAALNIARSWLFLRSQEYKKYQTNKTTGNTDKRAFVETWQSFYRKKLKEVWKPAV

SEQ ID NO: 44858 - protein, 978 aa, synthetic construct
  REGION 1..978: note = engineered CasX variant
QEIKRINKIRRRLVKDSNTKKAGKTGPMKTLLVRVMTPDLRERLENLRKKPENIPQPISNTSRANLNKLLTDYTEMKKAILHVYWEEFQKDPVGLMSRVAQPASKKIDQNKLKPEMDEKGNLTTAGFACSQCGQPLFVYKLEQVSEKGKAYTNYFGRCNVAEHEKLILLAQLKPEKDSDEAVTYSLGKFGQRALDFYSIHVTKESTHPVKPLAQIAGNRYASSPVGKALSDACMGTIASFLSKYQDIIIEHQKVVKGNQKRLESLRELAGKENLEYPSVTLPPQPHTKEGVDAYNEVIARVRMWVNLNLWQKLKLSRDDAKPLLRLKGFPSFPLVERQANEVDWWDMVCNVKKLINEKKEDGKVFWQNLAGYKRQEALRPYLSSEEDRKKGKKFARYQLGDLLLHLEKKHGEDWGKVYDEAWERIDKKVEGLSKHIKLEEERRSEDAQSKAALTDWLRAKASFVIEGLKEADKDEFCRCDLKLQKWYGDLRGKPFAIEAENSILDISGFSKQYNCAFIWQKDGVKKLNLYLIINYFKGGKLRFKKIKPEAFEANRFYTVINKKSGEIVPMEVNFNFDDPNLIILPLAFGKRQGREFIWNDLLSLETGSLKLANGRVIEKTLYNRRTRQDEPALFVALTFERREVLDSSNIKPMNLIGVDRGENIPAVIALTDPEGCPLSRFKDSLGNPTHILRIGESYKEKQRTIQAKKEVEQRRAGGYSRKYASKAKNLADDMVRNTARDLLYYAVTQDAMLIFENLSRGFGRQGKRTFMAERQYTRMEDWLTAKLAYEGLPSQTYLSKTLAQYTSKTCSNCGFTITSADYDRVLEKLKKTATGWMTTINGKELKVEGQITYYNRYKRQNVVKDLSVELDRLSEESVNNDISSWTKGRSGEALSLLKKRFSHRPVQEKFVCLNCGFETHADEQAALNIARSWLFLRSQEYKKYQTNKTTGNTDKRAFVETWQSFYRKKLKEVWKPAV

SEQ ID NO: 44859 - protein, 978 aa, synthetic construct
  REGION 1..978: note = engineered CasX variant
QEIKRINKIRRRLVKDSNTKKAGKTGPMKTLLVRVMTPDLRERLENLRKKPENIPQPISNTSRANLNKLLTDYTEMKKAILHVYWEEFQKDPVGLMSRVAQPASKKIDQNKLKPEMDEKGNLTTAGFACSQCGQPLFVYKLEQVSEKGKAYTNYFGRCNVAEHEKLILLAQLKPEKDSDEAVTYSLGKFGQRALDFYSIHVTKESTHPVKPLAQIAGNRYASTPVGKALSDACMGTIASFLSKYQDIIIEHQKVVKGNQKRLESLRELAGKENLEYPSVTLPPQPHTKEGVDAYNEVIARVRMWVNLNLWQKLKLSRDDAKPLLRLKGFPSFPLVERQANEVDWWDMVCNVKKLINEKKEDGKVFWQNLAGYKRQEALRPYLSSEEDRKKGKKFARYQLGDLLLHLEKKHGEDWGKVYDEAWERIDKKVEGLSKHIKLEEERRSEDAQSKAALTDWLRAKASFVIEGLKEADKDEFCRCDLKLQKWYGDLRGKPFAIEAENSILDISGFSKQYNCAFIWQKDGVKKLNLYLIINYFKGGKLRFKKIKPEAFEANRFYTVINKKSGEIVPMEVNFNFDDPNLIILPLAFGKRQGREFIWNDLLSLETGSLKLANGRVIEKTLYNRRTRQDEPALFVALTFERREVLDSSNIKPMNLIGVDRGENIPAVIALTDPEGCPLSRFKDSLGNPTHILRIGESYKEKQRTIQAKKEVEQRRAGGYSRKYASKAKNLADDMVRNTARDLLYYAVTQDAMLIFENLSRGFGRQGKRTFMAERQYTRMEDWLTAKLAYEGLPSQTYLSKTLAQYTSKTCSNCGFTITSADYDRVLEKLKKTATGWMTTINGKELKVEGQITYYNRYKRQNVVKDLSVELDRLSEESVNNDISSWTKGRSGEALSLLKKRFSHRPVQEKFVCLNCGFETHADEQAALNIARSWLFLRSQEYKKYQTNKTTGNTDKRAFVETWQSFYRKKLKEVWKPAV

SEQ ID NO: 44860 - protein, 978 aa, synthetic construct
  REGION 1..978: note = engineered CasX variant
QEIKRINKIRRRLVKDSNTKKAGKTGPMKTLLVRVMTPDLRERLENLRKKPENIPQPISNTSRANLNKLLTDYTEMKKAILHVYWEEFQKDPVGLMSRVAQPASKKIDQNKLKPEMDEKGNLTTAGFACSQCGQPLFVYKLEQVSEKGKAYTNYFGRCNVAEHEKLILLAQLKPEKDSDEAVTYSLGKFGQRALDFYSIHVTKESTHPVKPLAQIAGNRYASAPVGKALSDACMGTIASFLSKYQDIIIEHQKVVKGNQKRLESLRELAGKENLEYPSVTLPPQPHTKEGVDAYNEVIARVRMWVNLNLWQKLKLSRDDAKPLLRLKGFPSFPLVERQANEVDWWDMVCNVKKLINEKKEDGKVFWQNLAGYKRQEALRPYLSSEEDRKKGKKFARYQLGDLLLHLEKKHGEDWGKVYDEAWERIDKKVEGLSKHIKLEEERRSEDAQSKAALTDWLRAKASFVIEGLKEADKDEFCRCDLKLQKWYGDLRGKPFAIEAENSILDISGFSKQYNCAFIWQKDGVKKLNLYLIINYFKGGKLRFKKIKPEAFEANRFYTVINKKSGEIVPMEVNFNFDDPNLIILPLAFGKRQGREFIWNDLLSLETGSLKLANGRVIEKTLYNRRTRQDEPALFVALTFERREVLDSSNIKPMNLIGVDRGENIPAVIALTDPEGCPLSRFKDSLGNPTHILRIGESYKEKQRTIQAKKEVEQRRAGGYSRKYASKAKNLADDMVRNTARDLLYYAVTQDAMLIFENLSRGFGRQGKRTFMAERQYTRMEDWLTAKLAYEGLPSQTYLSKTLAQYTSKTCSNCGFTITSADYDRVLEKLKKTATGWMTTINGKELKVEGQITYYNRYKRQNVVKDLSVELDRLSEESVNNDISSWTKGRSGEALSLLKKRFSHRPVQEKFVCLNCGFETHADEQAALNIARSWLFLRSQEYKKYQTNKTTGNTDKRAFVETWQSFYRKKLKEVWKPAV

SEQ ID NO: 44861 - protein, 978 aa, synthetic construct
  REGION 1..978: note = engineered CasX variant
QEIKRINKIRRRLVKDSNTKKAGKTGPMKTLLVRVMTPDLRERLENLRKKPENIPQPISNTSRANLNKLLTDYTEMKKAILHVYWEEFQKDPVGLMSRVAQPASKKIDQNKLKPEMDEKGNLTTAGFACSQCGQPLFVYKLEQVSEKGKAYTNYFGRCNVAEHEKLILLAQLKPEKDSDEAVTYSLGKFGQRALDFYSIHVTKESTHPVKPLAQIAGNRYASVPVGKALSDACMGTIASFLSKYQDIIIEHQKVVKGNQKRLESLRELAGKENLEYPSVTLPPQPHTKEGVDAYNEVIARVRMWVNLNLWQKLKLSRDDAKPLLRLKGFPSFPLVERQANEVDWWDMVCNVKKLINEKKEDGKVFWQNLAGYKRQEALRPYLSSEEDRKKGKKFARYQLGDLLLHLEKKHGEDWGKVYDEAWERIDKKVEGLSKHIKLEEERRSEDAQSKAALTDWLRAKASFVIEGLKEADKDEFCRCDLKLQKWYGDLRGKPFAIEAENSILDISGFSKQYNCAFIWQKDGVKKLNLYLIINYFKGGKLRFKKIKPEAFEANRFYTVINKKSGEIVPMEVNFNFDDPNLIILPLAFGKRQGREFIWNDLLSLETGSLKLANGRVIEKTLYNRRTRQDEPALFVALTFERREVLDSSNIKPMNLIGVDRGENIPAVIALTDPEGCPLSRFKDSLGNPTHILRIGESYKEKQRTIQAKKEVEQRRAGGYSRKYASKAKNLADDMVRNTARDLLYYAVTQDAMLIFENLSRGFGRQGKRTFMAERQYTRMEDWLTAKLAYEGLPSQTYLSKTLAQYTSKTCSNCGFTITSADYDRVLEKLKKTATGWMTTINGKELKVEGQITYYNRYKRQNVVKDLSVELDRLSEESVNNDISSWTKGRSGEALSLLKKRFSHRPVQEKFVCLNCGFETHADEQAALNIARSWLFLRSQEYKKYQTNKTTGNTDKRAFVETWQSFYRKKLKEVWKPAV

SEQ ID NO: 44862 - protein, 978 aa, synthetic construct
  REGION 1..978: note = engineered CasX variant
QEIKRINKIRRRLVKDSNTKKAGKTGPMKTLLVRVMTPDLRERLENLRKKPENIPQPISNTSRANLNKLLTDYTEMKKAILHVYWEEFQKDPVGLMSRVAQPASKKIDQNKLKPEMDEKGNLTTAGFACSQCGQPLFVYKLEQVSEKGKAYTNYFGRCNVAEHEKLIKLAQLKPEKDSDEAVTYSLGKFGQRALDFYSIHVTKESTHPVKPLAQIAGNRYASGPVGKALSDACMGTIASFLSKYQDIIIEHQKVVKGNQKRLESLRELAGKENLEYPSVTLPPQPHTKEGVDAYNEVIARVRMWVNLNLWQKLKLSRDDAKPLLRLKGFPSFPLVERQANEVDWWDMVCNVKKLINEKKEDGKVFWQNLAGYKRQEALRPYLSSEEDRKKGKKFARYQLGDLLLHLEKKHGEDWGKVYDEAWERIDKKVEGLSKHIKLEEERRSEDAQSKAALTDWLRAKASFVIEGLKEADKDEFCRCDLKLQKWYGDLRGKPFAIEAENSILDISGFSKQYNCAFIWQKDGVKKLNLYLIINYFKGGKLRFKKIKPEAFEANRFYTVINKKSGEIVPMEVNFNFDDPNLIILPLAFGKRQGREFIWNDLLSLETGSLKLANGRVIEKTLYNRRTRQDEPALFVALTFERREVLDSSNIKPMNLIGVDRGENIPAVIALTDPEGCPLSRFKDSLGNPTHILRIGESYKEKQRTIQAKKEVEQRRAGGYSRKYASKAKNLADDMVRNTARDLLYYAVTQDAMLIFENLSRGFGRQGKRTFMAERQYTRMEDWLTAKLAYEGLPSQTYLSKTLAQYTSKTCSNCGFTITSADYDRVLEKLKKTATGWMTTINGKELKVEGQITYYNRYKRQNVVKDLSVELDRLSEESVNNDISSWTKGRSGEALSLLKKRFSHRPVQEKFVCLNCGFETHADEQAALNIARSWLFLRSQEYKKYQTNKTTGNTDKRAFVETWQSFYRKKLKEVWKPAV

SEQ ID NO: 44863 - protein, 977 aa, synthetic construct
  REGION 1..977: note = engineered CasX variant
QEIKRINKIRRRLVKDSNTKKAGKTGPMKTLLVRVMTPDLRERLENLRKKPENIPQPISNTSRANLNKLLTDYTEMKKAILHVYWEEFQKDPVGLMSRVAQPASKKIDQNKLKPEMDEKGNLTTAGFACSQCGQPLFVYKLEQVSEKGKAYTNYFGRCNVAEHEKLILLAQLKPEKDSDEAVTYSLGKFGQRALDFYSIHVTKESTHPVKPLAQIAGNRYASPVGKALSDACMGTIASFLSKYQDIIIEHQKVVKGNQKRLESLRELAGKENLEYPSVTLPPQPHTKEGVDAYNEVIARVRMWVNLNLWQKLKLSRDDAKPLLRLKGFPSFPLVERQANEVDWWDMVCNVKKLINEKKEDGKVFWQNLAGYKRQEALRPYLSSEEDRKKGKKFARYQLGDLLLHLEKKHGEDWGKVYDEAWERIDKKVEGLSKHIKLEEERRSEDAQSKAALTDWLRAKASFVIEGLKEADKDEFCRCDLKLQKWYGDLRGKPFAIEAENSILDISGFSKQYNCAFIWQKDGVKKLNLYLIINYFKGGKLRFKKIKPEAFEANRFYTVINKKSGEIVPMEVNFNFDDPNLIILPLAFGKRQGREFIWNDLLSLETGSLKLANGRVIEKTLYNRRTRQDEPALFVALTFERREVLDSSNIKPMNLIGVDRGENIPAVIALTDPEGCPLSRFKDSLGNPTHILRIGESYKEKQRTIQAKKEVEQRRAGGYSRKYASKAKNLADDMVRNTARDLLYYAVTQDAMLIFENLSRGFGRQGKRTFMAERQYTRMEDWLTAKLAYEGLPSQTYLSKTLAQYTSKTCSNCGFTITSADYDRVLEKLKKTATGWMTTINGKELKVEGQITYYNRYKRQNVVKDLSVELDRLSEESVNNDISSWTKGRSGEALSLLKKRFSHRPVQEKFVCLNCGFETHADEQAALNIARSWLFLRSQEYKKYQTNKTTGNTDKRAFVETWQSFYRKKLKEVWKPAV

SEQ ID NO: 44864 - protein, 978 aa, synthetic construct
  REGION 1..978: note = engineered CasX variant
QEIKRINKIRRRLVKDSNTKKAGKTGPMKTLLVRVMTPDLRERLENLRKKPENIPQPISNTSRANLNKLLTDYTEMKKAILHVYWEEFQKDPVGLMSRVAQPASKKIDQNKLKPEMDEKGNLTTAGFACSQCGQPLFVYKLEQVSEKGKAYTNYFGRCNVAEHEKLILLAQLKPEKDSDEAVTYSLGKFGQRALDFYSIHVTKESTHPVKPLAQIAGNRYASYPVGKALSDACMGTIASFLSKYQDIIIEHQKVVKGNQKRLESLRELAGKENLEYPSVTLPPQPHTKEGVDAYNEVIARVRMWVNLNLWQKLKLSRDDAKPLLRLKGFPSFPLVERQANEVDWWDMVCNVKKLINEKKEDGKVFWQNLAGYKRQEALRPYLSSEEDRKKGKKFARYQLGDLLLHLEKKHGEDWGKVYDEAWERIDKKVEGLSKHIKLEEERRSEDAQSKAALTDWLRAKASFVIEGLKEADKDEFCRCDLKLQKWYGDLRGKPFAIEAENSILDISGFSKQYNCAFIWQKDGVKKLNLYLIINYFKGGKLRFKKIKPEAFEANRFYTVINKKSGEIVPMEVNFNFDDPNLIILPLAFGKRQGREFIWNDLLSLETGSLKLANGRVIEKTLYNRRTRQDEPALFVALTFERREVLDSSNIKPMNLIGVDRGENIPAVIALTDPEGCPLSRFKDSLGNPTHILRIGESYKEKQRTIQAKKEVEQRRAGGYSRKYASKAKNLADDMVRNTARDLLYYAVTQDAMLIFENLSRGFGRQGKRTFMAERQYTRMEDWLTAKLAYNGLPSKTYLSKTLAQYTSKTCSNCGFTITSADYDRVLEKLKKTATGWMTTINGKELKVEGQITYYNRYKRQNVVKDLSVELDRLSEESVNNDISSWTKGRSGEALSLLKKRFSHRPVQEKFVCLNCGFETHADEQAALNIARSWLFLRSQEYKKYQTNKTTGNTDKRAFVETWQSFYRKKLKEVWKPAV

SEQ ID NO: 44865 - protein, 978 aa, synthetic construct
  REGION 1..978: note = engineered CasX variant
QEIKRINKIRRRLVKDSNTKKAGKTGPMKTLLVRVMTPDLRERLENLRKKPENIPQPISNTSRANLNKLLTDYTEMKKAILHVYWEEFQKDPVGLMSRVAQPASKKIDQNKLKPEMDEKGNLTTAGFACSQCGQPLFVYKLEQVSEKGKAYTNYFGRCNVAEHEKLILLAQLKPEKDSDEAVTYSLGKFGQRALDFYSIHVTKESTHPVKPLAQIAGNRYASHPVGKALSDACMGTIASFLSKYQDIIIEHQKVVKGNQKRLESLRELAGKENLEYPSVTLPPQPHTKEGVDAYNEVIARVRMWVNLNLWQKLKLSRDDAKPLLRLKGFPSFPLVERQANEVDWWDMVCNVKKLINEKKEDGKVFWQNLAGYKRQEALRPYLSSEEDRKKGKKFARYQLGDLLLHLEKKHGEDWGKVYDEAWERIDKKVEGLSKHIKLEEERRSEDAQSKAALTDWLRAKASFVIEGLKEADKDEFCRCDLKLQKWYGDLRGKPFAIEAENSILDISGFSKQYNCAFIWQKDGVKKLNLYLIINYFKGGKLRFKKIKPEAFEANRFYTVINKKSGEIVPMEVNFNFDDPNLIILPLAFGKRQGREFIWNDLLSLETGSLKLANGRVIEKTLYNRRTRQDEPALFVALTFERREVLDSSNIKPMNLIGVDRGENIPAVIALTDPEGCPLSRFKDSLGNPTHILRIGESYKEKQRTIQAKKEVEQRRAGGYSRKYASKAKNLADDMVRNTARDLLYYAVTQDAMLIFENLSRGFGRQGKRTFMAERQYTRMEDWLTAKLAYNGLPSKTYLSKTLAQYTSKTCSNCGFTITSADYDRVLEKLKKTATGWMTTINGKELKVEGQITYYNRYKRQNVVKDLSVELDRLSEESVNNDISSWTKGRSGEALSLLKKRFSHRPVQEKFVCLNCGFETHADEQAALNIARSWLFLRSQEYKKYQTNKTTGNTDKRAFVETWQSFYRKKLKEVWKPAV

SEQ ID NO: 44866 - protein, 978 aa, synthetic construct
  REGION 1..978: note = engineered CasX variant
QEIKRINKIRRRLVKDSNTKKAGKTGPMKTLLVRVMTPDLRERLENLRKKPENIPQPISNTSRANLNKLLTDYTEMKKAILHVYWEEFQKDPVGLMSRVAQPASKKIDQNKLKPEMDEKGNLTTAGFACSQCGQPLFVYKLEQVSEKGKAYTNYFGRCNVAEHEKLILLAQLKPEKDSDEAVTYSLGKFGQRALDFYSIHVTKESTHPVKPLAQIAGNRYASSPVGKALSDACMGTIASFLSKYQDIIIEHQKVVKGNQKRLESLRELAGKENLEYPSVTLPPQPHTKEGVDAYNEVIARVRMWVNLNLWQKLKLSRDDAKPLLRLKGFPSFPLVERQANEVDWWDMVCNVKKLINEKKEDGKVFWQNLAGYKRQEALRPYLSSEEDRKKGKKFARYQLGDLLLHLEKKHGEDWGKVYDEAWERIDKKVEGLSKHIKLEEERRSEDAQSKAALTDWLRAKASFVIEGLKEADKDEFCRCDLKLQKWYGDLRGKPFAIEAENSILDISGFSKQYNCAFIWQKDGVKKLNLYLIINYFKGGKLRFKKIKPEAFEANRFYTVINKKSGEIVPMEVNFNFDDPNLIILPLAFGKRQGREFIWNDLLSLETGSLKLANGRVIEKTLYNRRTRQDEPALFVALTFERREVLDSSNIKPMNLIGVDRGENIPAVIALTDPEGCPLSRFKDSLGNPTHILRIGESYKEKQRTIQAKKEVEQRRAGGYSRKYASKAKNLADDMVRNTARDLLYYAVTQDAMLIFENLSRGFGRQGKRTFMAERQYTRMEDWLTAKLAYNGLPSKTYLSKTLAQYTSKTCSNCGFTITSADYDRVLEKLKKTATGWMTTINGKELKVEGQITYYNRYKRQNVVKDLSVELDRLSEESVNNDISSWTKGRSGEALSLLKKRFSHRPVQEKFVCLNCGFETHADEQAALNIARSWLFLRSQEYKKYQTNKTTGNTDKRAFVETWQSFYRKKLKEVWKPAV

SEQ ID NO: 44867 - protein, 978 aa, synthetic construct
  REGION 1..978: note = engineered CasX variant
QEIKRINKIRRRLVKDSNTKKAGKTGPMKTLLVRVMTPDLRERLENLRKKPENIPQPISNTSRANLNKLLTDYTEMKKAILHVYWEEFQKDPVGLMSRVAQPASKKIDQNKLKPEMDEKGNLTTAGFACSQCGQPLFVYKLEQVSEKGKAYTNYFGRCNVAEHEKLILLAQLKPEKDSDEAVTYSLGKFGQRALDFYSIHVTKESTHPVKPLAQIAGNRYASTPVGKALSDACMGTIASFLSKYQDIIIEHQKVVKGNQKRLESLRELAGKENLEYPSVTLPPQPHTKEGVDAYNEVIARVRMWVNLNLWQKLKLSRDDAKPLLRLKGFPSFPLVERQANEVDWWDMVCNVKKLINEKKEDGKVFWQNLAGYKRQEALRPYLSSEEDRKKGKKFARYQLGDLLLHLEKKHGEDWGKVYDEAWERIDKKVEGLSKHIKLEEERRSEDAQSKAALTDWLRAKASFVIEGLKEADKDEFCRCDLKLQKWYGDLRGKPFAIEAENSILDISGFSKQYNCAFIWQKDGVKKLNLYLIINYFKGGKLRFKKIKPEAFEANRFYTVINKKSGEIVPMEVNFNFDDPNLIILPLAFGKRQGREFIWNDLLSLETGSLKLANGRVIEKTLYNRRTRQDEPALFVALTFERREVLDSSNIKPMNLIGVDRGENIPAVIALTDPEGCPLSRFKDSLGNPTHILRIGESYKEKQRTIQAKKEVEQRRAGGYSRKYASKAKNLADDMVRNTARDLLYYAVTQDAMLIFENLSRGFGRQGKRTFMAERQYTRMEDWLTAKLAYNGLPSKTYLSKTLAQYTSKTCSNCGFTITSADYDRVLEKLKKTATGWMTTINGKELKVEGQITYYNRYKRQNVVKDLSVELDRLSEESVNNDISSWTKGRSGEALSLLKKRFSHRPVQEKFVCLNCGFETHADEQAALNIARSWLFLRSQEYKKYQTNKTTGNTDKRAFVETWQSFYRKKLKEVWKPAV

SEQ ID NO: 44868 - protein, 978 aa, synthetic construct
  REGION 1..978: note = engineered CasX variant
QEIKRINKIRRRLVKDSNTKKAGKTGPMKTLLVRVMTPDLRERLENLRKKPENIPQPISNTSRANLNKLLTDYTEMKKAILHVYWEEFQKDPVGLMSRVAQPASKKIDQNKLKPEMDEKGNLTTAGFACSQCGQPLFVYKLEQVSEKGKAYTNYFGRCNVAEHEKLILLAQLKPEKDSDEAVTYSLGKFGQRALDFYSIHVTKESTHPVKPLAQIAGNRYASAPVGKALSDACMGTIASFLSKYQDIIIEHQKVVKGNQKRLESLRELAGKENLEYPSVTLPPQPHTKEGVDAYNEVIARVRMWVNLNLWQKLKLSRDDAKPLLRLKGFPSFPLVERQANEVDWWDMVCNVKKLINEKKEDGKVFWQNLAGYKRQEALRPYLSSEEDRKKGKKFARYQLGDLLLHLEKKHGEDWGKVYDEAWERIDKKVEGLSKHIKLEEERRSEDAQSKAALTDWLRAKASFVIEGLKEADKDEFCRCDLKLQKWYGDLRGKPFAIEAENSILDISGFSKQYNCAFIWQKDGVKKLNLYLIINYFKGGKLRFKKIKPEAFEANRFYTVINKKSGEIVPMEVNFNFDDPNLIILPLAFGKRQGREFIWNDLLSLETGSLKLANGRVIEKTLYNRRTRQDEPALFVALTFERREVLDSSNIKPMNLIGVDRGENIPAVIALTDPEGCPLSRFKDSLGNPTHILRIGESYKEKQRTIQAKKEVEQRRAGGYSRKYASKAKNLADDMVRNTARDLLYYAVTQDAMLIFENLSRGFGRQGKRTFMAERQYTRMEDWLTAKLAYNGLPSKTYLSKTLAQYTSKTCSNCGFTITSADYDRVLEKLKKTATGWMTTINGKELKVEGQITYYNRYKRQNVVKDLSVELDRLSEESVNNDISSWTKGRSGEALSLLKKRFSHRPVQEKFVCLNCGFETHADEQAALNIARSWLFLRSQEYKKYQTNKTTGNTDKRAFVETWQSFYRKKLKEVWKPAV

SEQ ID NO: 44869 - protein, 978 aa, synthetic construct
  REGION 1..978: note = engineered CasX variant
QEIKRINKIRRRLVKDSNTKKAGKTGPMKTLLVRVMTPDLRERLENLRKKPENIPQPISNTSRANLNKLLTDYTEMKKAILHVYWEEFQKDPVGLMSRVAQPASKKIDQNKLKPEMDEKGNLTTAGFACSQCGQPLFVYKLEQVSEKGKAYTNYFGRCNVAEHEKLILLAQLKPEKDSDEAVTYSLGKFGQRALDFYSIHVTKESTHPVKPLAQIAGNRYASVPVGKALSDACMGTIASFLSKYQDIIIEHQKVVKGNQKRLESLRELAGKENLEYPSVTLPPQPHTKEGVDAYNEVIARVRMWVNLNLWQKLKLSRDDAKPLLRLKGFPSFPLVERQANEVDWWDMVCNVKKLINEKKEDGKVFWQNLAGYKRQEALRPYLSSEEDRKKGKKFARYQLGDLLLHLEKKHGEDWGKVYDEAWERIDKKVEGLSKHIKLEEERRSEDAQSKAALTDWLRAKASFVIEGLKEADKDEFCRCDLKLQKWYGDLRGKPFAIEAENSILDISGFSKQYNCAFIWQKDGVKKLNLYLIINYFKGGKLRFKKIKPEAFEANRFYTVINKKSGEIVPMEVNFNFDDPNLIILPLAFGKRQGREFIWNDLLSLETGSLKLANGRVIEKTLYNRRTRQDEPALFVALTFERREVLDSSNIKPMNLIGVDRGENIPAVIALTDPEGCPLSRFKDSLGNPTHILRIGESYKEKQRTIQAKKEVEQRRAGGYSRKYASKAKNLADDMVRNTARDLLYYAVTQDAMLIFENLSRGFGRQGKRTFMAERQYTRMEDWLTAKLAYNGLPSKTYLSKTLAQYTSKTCSNCGFTITSADYDRVLEKLKKTATGWMTTINGKELKVEGQITYYNRYKRQNVVKDLSVELDRLSEESVNNDISSWTKGRSGEALSLLKKRFSHRPVQEKFVCLNCGFETHADEQAALNIARSWLFLRSQEYKKYQTNKTTGNTDKRAFVETWQSFYRKKLKEVWKPAV

SEQ ID NO: 44870 - protein, 978 aa, synthetic construct
  REGION 1..978: note = engineered CasX variant
QEIKRINKIRRRLVKDSNTKKAGKTGPMKTLLVRVMTPDLRERLENLRKKPENIPQPISNTSRANLNKLLTDYTEMKKAILHVYWEEFQKDPVGLMSRVAQPASKKIDQNKLKPEMDEKGNLTTAGFACSQCGQPLFVYKLEQVSEKGKAYTNYFGRCNVAEHEKLIKLAQLKPEKDSDEAVTYSLGKFGQRALDFYSIHVTKESTHPVKPLAQIAGNRYASGPVGKALSDACMGTIASFLSKYQDIIIEHQKVVKGNQKRLESLRELAGKENLEYPSVTLPPQPHTKEGVDAYNEVIARVRMWVNLNLWQKLKLSRDDAKPLLRLKGFPSFPLVERQANEVDWWDMVCNVKKLINEKKEDGKVFWQNLAGYKRQEALRPYLSSEEDRKKGKKFARYQLGDLLLHLEKKHGEDWGKVYDEAWERIDKKVEGLSKHIKLEEERRSEDAQSKAALTDWLRAKASFVIEGLKEADKDEFCRCDLKLQKWYGDLRGKPFAIEAENSILDISGFSKQYNCAFIWQKDGVKKLNLYLIINYFKGGKLRFKKIKPEAFEANRFYTVINKKSGEIVPMEVNFNFDDPNLIILPLAFGKRQGREFIWNDLLSLETGSLKLANGRVIEKTLYNRRTRQDEPALFVALTFERREVLDSSNIKPMNLIGVDRGENIPAVIALTDPEGCPLSRFKDSLGNPTHILRIGESYKEKQRTIQAKKEVEQRRAGGYSRKYASKAKNLADDMVRNTARDLLYYAVTQDAMLIFENLSRGFGRQGKRTFMAERQYTRMEDWLTAKLAYNGLPSKTYLSKTLAQYTSKTCSNCGFTITSADYDRVLEKLKKTATGWMTTINGKELKVEGQITYYNRYKRQNVVKDLSVELDRLSEESVNNDISSWTKGRSGEALSLLKKRFSHRPVQEKFVCLNCGFETHADEQAALNIARSWLFLRSQEYKKYQTNKTTGNTDKRAFVETWQSFYRKKLKEVWKPAV

SEQ ID NO: 44871 - protein, 977 aa, synthetic construct
  REGION 1..977: note = engineered CasX variant
QEIKRINKIRRRLVKDSNTKKAGKTGPMKTLLVRVMTPDLRERLENLRKKPENIPQPISNTSRANLNKLLTDYTEMKKAILHVYWEEFQKDPVGLMSRVAQPASKKIDQNKLKPEMDEKGNLTTAGFACSQCGQPLFVYKLEQVSEKGKAYTNYFGRCNVAEHEKLILLAQLKPEKDSDEAVTYSLGKFGQRALDFYSIHVTKESTHPVKPLAQIAGNRYASPVGKALSDACMGTIASFLSKYQDIIIEHQKVVKGNQKRLESLRELAGKENLEYPSVTLPPQPHTKEGVDAYNEVIARVRMWVNLNLWQKLKLSRDDAKPLLRLKGFPSFPLVERQANEVDWWDMVCNVKKLINEKKEDGKVFWQNLAGYKRQEALRPYLSSEEDRKKGKKFARYQLGDLLLHLEKKHGEDWGKVYDEAWERIDKKVEGLSKHIKLEEERRSEDAQSKAALTDWLRAKASFVIEGLKEADKDEFCRCDLKLQKWYGDLRGKPFAIEAENSILDISGFSKQYNCAFIWQKDGVKKLNLYLIINYFKGGKLRFKKIKPEAFEANRFYTVINKKSGEIVPMEVNFNFDDPNLIILPLAFGKRQGREFIWNDLLSLETGSLKLANGRVIEKTLYNRRTRQDEPALFVALTFERREVLDSSNIKPMNLIGVDRGENIPAVIALTDPEGCPLSRFKDSLGNPTHILRIGESYKEKQRTIQAKKEVEQRRAGGYSRKYASKAKNLADDMVRNTARDLLYYAVTQDAMLIFENLSRGFGRQGKRTFMAERQYTRMEDWLTAKLAYNGLPSKTYLSKTLAQYTSKTCSNCGFTITSADYDRVLEKLKKTATGWMTTINGKELKVEGQITYYNRYKRQNVVKDLSVELDRLSEESVNNDISSWTKGRSGEALSLLKKRFSHRPVQEKFVCLNCGFETHADEQAALNIARSWLFLRSQEYKKYQTNKTTGNTDKRAFVETWQSFYRKKLKEVWKPAV

SEQ ID NO: 44872 - protein, 978 aa, synthetic construct
  REGION 1..978: note = engineered CasX variant
QEIKRINKIRRRLVKDSNTKKAGKTGPMKTLLVRVMTPDLRERLENLRKKPENIPQPISNTSRANLNKLLTDYTEMKKAILHVYWEEFQKDPVGLMSRVAQPASKKIDQNKLKPEMDEKGNLTTAGFACSQCGQPLFVYKLEQVSEKGKAYTNYFGRCNVAEHEKLIQLAQLKPEKDSDEAVTYSLGKFGQRALDFYSIHVTKESTHPVKPLAQIAGNRYASYPVGKALSDACMGTIASFLSKYQDIIIEHQKVVKGNQKRLESLRELAGKENLEYPSVTLPPQPHTKEGVDAYNEVIARVRMWVNLNLWQKLKLSRDDAKPLLRLKGFPSFPLVERQANEVDWWDMVCNVKKLINEKKEDGKVFWQNLAGYKRQEALRPYLSSEEDRKKGKKFARYQLGDLLLHLEKKHGEDWGKVYDEAWERIDKKVEGLSKHIKLEEERRSEDAQSKAALTDWLRAKASFVIEGLKEADKDEFCRCDLKLQKWYGDLRGKPFAIEAENSILDISGFSKQYNCAFIWQKDGVKKLNLYLIINYFKGGKLRFKKIKPEAFEANRFYTVINKKSGEIVPMEVNFNFDDPNLIILPLAFGKRQGREFIWNDLLSLETGSLKLANGRVIEKTLYNRRTRQDEPALFVALTFERREVLDSSNIKPMNLIGVDRGENIPAVIALTDPEGCPLSRFKDSLGNPTHILRIGESYKEKQRTIQAKKEVEQRRAGGYSRKYASKAKNLADDMVRNTARDLLYYAVTQDAMLIFENLSRGFGRQGKRTFMAERQYTRMEDWLTAKLAYEGLPSKTYLSKTLAQYTSKTCSNCGFTITSADYDRVLEKLKKTATGWMTTINGKELKVEGQITYYNRYKRQNVVKDLSVELDRLSEESVNNDISSWTKGRSGEALSLLKKRFSHRPVQEKFVCLNCGFETHADEQAALNIARSWLFLRSQEYKKYQTNKTTGNTDKRAFVETWQSFYRKKLKEVWKPAV

SEQ ID NO: 44873 - protein, 978 aa, synthetic construct
  REGION 1..978: note = engineered CasX variant
QEIKRINKIRRRLVKDSNTKKAGKTGPMKTLLVRVMTPDLRERLENLRKKPENIPQPISNTSRANLNKLLTDYTEMKKAILHVYWEEFQKDPVGLMSRVAQPASKKIDQNKLKPEMDEKGNLTTAGFACSQCGQPLFVYKLEQVSEKGKAYTNYFGRCNVAEHEKLIQLAQLKPEKDSDEAVTYSLGKFGQRALDFYSIHVTKESTHPVKPLAQIAGNRYASHPVGKALSDACMGTIASFLSKYQDIIIEHQKVVKGNQKRLESLRELAGKENLEYPSVTLPPQPHTKEGVDAYNEVIARVRMWVNLNLWQKLKLSRDDAKPLLRLKGFPSFPLVERQANEVDWWDMVCNVKKLINEKKEDGKVFWQNLAGYKRQEALRPYLSSEEDRKKGKKFARYQLGDLLLHLEKKHGEDWGKVYDEAWERIDKKVEGLSKHIKLEEERRSEDAQSKAALTDWLRAKASFVIEGLKEADKDEFCRCDLKLQKWYGDLRGKPFAIEAENSILDISGFSKQYNCAFIWQKDGVKKLNLYLIINYFKGGKLRFKKIKPEAFEANRFYTVINKKSGEIVPMEVNFNFDDPNLIILPLAFGKRQGREFIWNDLLSLETGSLKLANGRVIEKTLYNRRTRQDEPALFVALTFERREVLDSSNIKPMNLIGVDRGENIPAVIALTDPEGCPLSRFKDSLGNPTHILRIGESYKEKQRTIQAKKEVEQRRAGGYSRKYASKAKNLADDMVRNTARDLLYYAVTQDAMLIFENLSRGFGRQGKRTFMAERQYTRMEDWLTAKLAYEGLPSKTYLSKTLAQYTSKTCSNCGFTITSADYDRVLEKLKKTATGWMTTINGKELKVEGQITYYNRYKRQNVVKDLSVELDRLSEESVNNDISSWTKGRSGEALSLLKKRFSHRPVQEKFVCLNCGFETHADEQAALNIARSWLFLRSQEYKKYQTNKTTGNTDKRAFVETWQSFYRKKLKEVWKPAV

SEQ ID NO: 44874 - protein, 978 aa, synthetic construct
  REGION 1..978: note = engineered CasX variant
QEIKRINKIRRRLVKDSNTKKAGKTGPMKTLLVRVMTPDLRERLENLRKKPENIPQPISNTSRANLNKLLTDYTEMKKAILHVYWEEFQKDPVGLMSRVAQPASKKIDQNKLKPEMDEKGNLTTAGFACSQCGQPLFVYKLEQVSEKGKAYTNYFGRCNVAEHEKLIQLAQLKPEKDSDEAVTYSLGKFGQRALDFYSIHVTKESTHPVKPLAQIAGNRYASSPVGKALSDACMGTIASFLSKYQDIIIEHQKVVKGNQKRLESLRELAGKENLEYPSVTLPPQPHTKEGVDAYNEVIARVRMWVNLNLWQKLKLSRDDAKPLLRLKGFPSFPLVERQANEVDWWDMVCNVKKLINEKKEDGKVFWQNLAGYKRQEALRPYLSSEEDRKKGKKFARYQLGDLLLHLEKKHGEDWGKVYDEAWERIDKKVEGLSKHIKLEEERRSEDAQSKAALTDWLRAKASFVIEGLKEADKDEFCRCDLKLQKWYGDLRGKPFAIEAENSILDISGFSKQYNCAFIWQKDGVKKLNLYLIINYFKGGKLRFKKIKPEAFEANRFYTVINKKSGEIVPMEVNFNFDDPNLIILPLAFGKRQGREFIWNDLLSLETGSLKLANGRVIEKTLYNRRTRQDEPALFVALTFERREVLDSSNIKPMNLIGVDRGENIPAVIALTDPEGCPLSRFKDSLGNPTHILRIGESYKEKQRTIQAKKEVEQRRAGGYSRKYASKAKNLADDMVRNTARDLLYYAVTQDAMLIFENLSRGFGRQGKRTFMAERQYTRMEDWLTAKLAYEGLPSKTYLSKTLAQYTSKTCSNCGFTITSADYDRVLEKLKKTATGWMTTINGKELKVEGQITYYNRYKRQNVVKDLSVELDRLSEESVNNDISSWTKGRSGEALSLLKKRFSHRPVQEKFVCLNCGFETHADEQAALNIARSWLFLRSQEYKKYQTNKTTGNTDKRAFVETWQSFYRKKLKEVWKPAV

SEQ ID NO: 44875 - protein, 978 aa, synthetic construct
  REGION 1..978: note = engineered CasX variant
QEIKRINKIRRRLVKDSNTKKAGKTGPMKTLLVRVMTPDLRERLENLRKKPENIPQPISNTSRANLNKLLTDYTEMKKAILHVYWEEFQKDPVGLMSRVAQPASKKIDQNKLKPEMDEKGNLTTAGFACSQCGQPLFVYKLEQVSEKGKAYTNYFGRCNVAEHEKLIQLAQLKPEKDSDEAVTYSLGKFGQRALDFYSIHVTKESTHPVKPLAQIAGNRYASTPVGKALSDACMGTIASFLSKYQDIIIEHQKVVKGNQKRLESLRELAGKENLEYPSVTLPPQPHTKEGVDAYNEVIARVRMWVNLNLWQKLKLSRDDAKPLLRLKGFPSFPLVERQANEVDWWDMVCNVKKLINEKKEDGKVFWQNLAGYKRQEALRPYLSSEEDRKKGKKFARYQLGDLLLHLEKKHGEDWGKVYDEAWERIDKKVEGLSKHIKLEEERRSEDAQSKAALTDWLRAKASFVIEGLKEADKDEFCRCDLKLQKWYGDLRGKPFAIEAENSILDISGFSKQYNCAFIWQKDGVKKLNLYLIINYFKGGKLRFKKIKPEAFEANRFYTVINKKSGEIVPMEVNFNFDDPNLIILPLAFGKRQGREFIWNDLLSLETGSLKLANGRVIEKTLYNRRTRQDEPALFVALTFERREVLDSSNIKPMNLIGVDRGENIPAVIALTDPEGCPLSRFKDSLGNPTHILRIGESYKEKQRTIQAKKEVEQRRAGGYSRKYASKAKNLADDMVRNTARDLLYYAVTQDAMLIFENLSRGFGRQGKRTFMAERQYTRMEDWLTAKLAYEGLPSKTYLSKTLAQYTSKTCSNCGFTITSADYDRVLEKLKKTATGWMTTINGKELKVEGQITYYNRYKRQNVVKDLSVELDRLSEESVNNDISSWTKGRSGEALSLLKKRFSHRPVQEKFVCLNCGFETHADEQAALNIARSWLFLRSQEYKKYQTNKTTGNTDKRAFVETWQSFYRKKLKEVWKPAV

SEQ ID NO: 44876 - protein, 978 aa, synthetic construct
  REGION 1..978: note = engineered CasX variant
QEIKRINKIRRRLVKDSNTKKAGKTGPMKTLLVRVMTPDLRERLENLRKKPENIPQPISNTSRANLNKLLTDYTEMKKAILHVYWEEFQKDPVGLMSRVAQPASKKIDQNKLKPEMDEKGNLTTAGFACSQCGQPLFVYKLEQVSEKGKAYTNYFGRCNVAEHEKLIQLAQLKPEKDSDEAVTYSLGKFGQRALDFYSIHVTKESTHPVKPLAQIAGNRYASAPVGKALSDACMGTIASFLSKYQDIIIEHQKVVKGNQKRLESLRELAGKENLEYPSVTLPPQPHTKEGVDAYNEVIARVRMWVNLNLWQKLKLSRDDAKPLLRLKGFPSFPLVERQANEVDWWDMVCNVKKLINEKKEDGKVFWQNLAGYKRQEALRPYLSSEEDRKKGKKFARYQLGDLLLHLEKKHGEDWGKVYDEAWERIDKKVEGLSKHIKLEEERRSEDAQSKAALTDWLRAKASFVIEGLKEADKDEFCRCDLKLQKWYGDLRGKPFAIEAENSILDISGFSKQYNCAFIWQKDGVKKLNLYLIINYFKGGKLRFKKIKPEAFEANRFYTVINKKSGEIVPMEVNFNFDDPNLIILPLAFGKRQGREFIWNDLLSLETGSLKLANGRVIEKTLYNRRTRQDEPALFVALTFERREVLDSSNIKPMNLIGVDRGENIPAVIALTDPEGCPLSRFKDSLGNPTHILRIGESYKEKQRTIQAKKEVEQRRAGGYSRKYASKAKNLADDMVRNTARDLLYYAVTQDAMLIFENLSRGFGRQGKRTFMAERQYTRMEDWLTAKLAYEGLPSKTYLSKTLAQYTSKTCSNCGFTITSADYDRVLEKLKKTATGWMTTINGKELKVEGQITYYNRYKRQNVVKDLSVELDRLSEESVNNDISSWTKGRSGEALSLLKKRFSHRPVQEKFVCLNCGFETHADEQAALNIARSWLFLRSQEYKKYQTNKTTGNTDKRAFVETWQSFYRKKLKEVWKPAV

SEQ ID NO: 44877 - protein, 978 aa, synthetic construct
  REGION 1..978: note = engineered CasX variant
QEIKRINKIRRRLVKDSNTKKAGKTGPMKTLLVRVMTPDLRERLENLRKKPENIPQPISNTSRANLNKLLTDYTEMKKAILHVYWEEFQKDPVGLMSRVAQPASKKIDQNKLKPEMDEKGNLTTAGFACSQCGQPLFVYKLEQVSEKGKAYTNYFGRCNVAEHEKLIQLAQLKPEKDSDEAVTYSLGKFGQRALDFYSIHVTKESTHPVKPLAQIAGNRYASVPVGKALSDACMGTIASFLSKYQDIIIEHQKVVKGNQKRLESLRELAGKENLEYPSVTLPPQPHTKEGVDAYNEVIARVRMWVNLNLWQKLKLSRDDAKPLLRLKGFPSFPLVERQANEVDWWDMVCNVKKLINEKKEDGKVFWQNLAGYKRQEALRPYLSSEEDRKKGKKFARYQLGDLLLHLEKKHGEDWGKVYDEAWERIDKKVEGLSKHIKLEEERRSEDAQSKAALTDWLRAKASFVIEGLKEADKDEFCRCDLKLQKWYGDLRGKPFAIEAENSILDISGFSKQYNCAFIWQKDGVKKLNLYLIINYFKGGKLRFKKIKPEAFEANRFYTVINKKSGEIVPMEVNFNFDDPNLIILPLAFGKRQGREFIWNDLLSLETGSLKLANGRVIEKTLYNRRTRQDEPALFVALTFERREVLDSSNIKPMNLIGVDRGENIPAVIALTDPEGCPLSRFKDSLGNPTHILRIGESYKEKQRTIQAKKEVEQRRAGGYSRKYASKAKNLADDMVRNTARDLLYYAVTQDAMLIFENLSRGFGRQGKRTFMAERQYTRMEDWLTAKLAYEGLPSKTYLSKTLAQYTSKTCSNCGFTITSADYDRVLEKLKKTATGWMTTINGKELKVEGQITYYNRYKRQNVVKDLSVELDRLSEESVNNDISSWTKGRSGEALSLLKKRFSHRPVQEKFVCLNCGFETHADEQAALNIARSWLFLRSQEYKKYQTNKTTGNTDKRAFVETWQSFYRKKLKEVWKPAV

SEQ ID NO: 44878 - protein, 979 aa, synthetic construct
  REGION 1..979: note = engineered CasX variant
QEIKRINKIRRRLVKDSNTKKAGKTGPMKTLLVRVMTPDLRERLENLRKKPENIPQPISNTSRANLNKLLTDYTEMKKAILHVYWEEFQKDPVGLMSRVAQPASKKIDQNKLKPEMDEKGNLTTAGFACSQCGQPLFVYKLEQVSEKGKAYTNYFGRCNVAEHEKLIQKLAQLKPEKDSDEAVTYSLGKFGQRALDFYSIHVTKESTHPVKPLAQIAGNRYASGPVGKALSDACMGTIASFLSKYQDIIIEHQKVVKGNQKRLESLRELAGKENLEYPSVTLPPQPHTKEGVDAYNEVIARVRMWVNLNLWQKLKLSRDDAKPLLRLKGFPSFPLVERQANEVDWWDMVCNVKKLINEKKEDGKVFWQNLAGYKRQEALRPYLSSEEDRKKGKKFARYQLGDLLLHLEKKHGEDWGKVYDEAWERIDKKVEGLSKHIKLEEERRSEDAQSKAALTDWLRAKASFVIEGLKEADKDEFCRCDLKLQKWYGDLRGKPFAIEAENSILDISGFSKQYNCAFIWQKDGVKKLNLYLIINYFKGGKLRFKKIKPEAFEANRFYTVINKKSGEIVPMEVNFNFDDPNLIILPLAFGKRQGREFIWNDLLSLETGSLKLANGRVIEKTLYNRRTRQDEPALFVALTFERREVLDSSNIKPMNLIGVDRGENIPAVIALTDPEGCPLSRFKDSLGNPTHILRIGESYKEKQRTIQAKKEVEQRRAGGYSRKYASKAKNLADDMVRNTARDLLYYAVTQDAMLIFENLSRGFGRQGKRTFMAERQYTRMEDWLTAKLAYEGLPSKTYLSKTLAQYTSKTCSNCGFTITSADYDRVLEKLKKTATGWMTTINGKELKVEGQITYYNRYKRQNVVKDLSVELDRLSEESVNNDISSWTKGRSGEALSLLKKRFSHRPVQEKFVCLNCGFETHADEQAALNIARSWLFLRSQEYKKYQTNKTTGNTDKRAFVETWQSFYRKKLKEVWKPAV

SEQ ID NO: 44879 - protein, 977 aa, synthetic construct
  REGION 1..977: note = engineered CasX variant
QEIKRINKIRRRLVKDSNTKKAGKTGPMKTLLVRVMTPDLRERLENLRKKPENIPQPISNTSRANLNKLLTDYTEMKKAILHVYWEEFQKDPVGLMSRVAQPASKKIDQNKLKPEMDEKGNLTTAGFACSQCGQPLFVYKLEQVSEKGKAYTNYFGRCNVAEHEKLIQLAQLKPEKDSDEAVTYSLGKFGQRALDFYSIHVTKESTHPVKPLAQIAGNRYASPVGKALSDACMGTIASFLSKYQDIIIEHQKVVKGNQKRLESLRELAGKENLEYPSVTLPPQPHTKEGVDAYNEVIARVRMWVNLNLWQKLKLSRDDAKPLLRLKGFPSFPLVERQANEVDWWDMVCNVKKLINEKKEDGKVFWQNLAGYKRQEALRPYLSSEEDRKKGKKFARYQLGDLLLHLEKKHGEDWGKVYDEAWERIDKKVEGLSKHIKLEEERRSEDAQSKAALTDWLRAKASFVIEGLKEADKDEFCRCDLKLQKWYGDLRGKPFAIEAENSILDISGFSKQYNCAFIWQKDGVKKLNLYLIINYFKGGKLRFKKIKPEAFEANRFYTVINKKSGEIVPMEVNFNFDDPNLIILPLAFGKRQGREFIWNDLLSLETGSLKLANGRVIEKTLYNRRTRQDEPALFVALTFERREVLDSSNIKPMNLIGVDRGENIPAVIALTDPEGCPLSRFKDSLGNPTHILRIGESYKEKQRTIQAKKEVEQRRAGGYSRKYASKAKNLADDMVRNTARDLLYYAVTQDAMLIFENLSRGFGRQGKRTFMAERQYTRMEDWLTAKLAYEGLPSKTYLSKTLAQYTSKTCSNCGFTITSADYDRVLEKLKKTATGWMTTINGKELKVEGQITYYNRYKRQNVVKDLSVELDRLSEESVNNDISSWTKGRSGEALSLLKKRFSHRPVQEKFVCLNCGFETHADEQAALNIARSWLFLRSQEYKKYQTNKTTGNTDKRAFVETWQSFYRKKLKEVWKPAV

SEQ ID NO: 44880 - protein, 978 aa, synthetic construct
  REGION 1..978: note = engineered CasX variant
QEIKRINKIRRRLVKDSNTKKAGKTGPMKTLLVRVMTPDLRERLENLRKKPENIPQPISNTSRANLNKLLTDYTEMKKAILHVYWEEFQKDPVGLMSRVAQPASKKIDQNKLKPEMDEKGNLTTAGFACSQCGQPLFVYKLEQVSEKGKAYTNYFGRCNVAEHEKLILLAQLKPEKDSDEAVTYSLGKFGQRALDFYSIHVTKESTHPVKPLAQIAGNRYASYPVGKALSDACMGTIASFLSKYQDIIIEHQKVVKGNQKRLESLRELAGKENLEYPSVTLPPQPHTKEGVDAYNEVIARVRMWVNLNLWQKLKLSRDDAKPLLRLKGFPSFPLVERQANEVDWWDMVCNVKKLINEKKEDGKVFWQNLAIYKRQEALRPYLSSEEDRKKGKKFARYQLGDLLLHLEKKHGEDWGKVYDEAWERIDKKVEGLSKHIKLEEERRSEDAQSKAALTDWLRAKASFVIEGLKEADKDEFCRCDLKLQKWYGDLRGKPFAIEAENSILDISGFSKQYNCAFIWQKDGVKKLNLYLIINYFKGGKLRFKKIKPEAFEANRFYTVINKKSGEIVPMEVNFNFDDPNLIILPLAFGKRQGREFIWNDLLSLETGSLKLANGRVIEKTLYNRRTRQDEPALFVALTFERREVLDSSNIKPMNLIGVDRGENIPAVIALTDPEGCPLSRFKDSLGNPTHILRIGESYKEKQRTIQAKKEVEQRRAGGYSRKYASKAKNLADDMVRNTARDLLYYAVTQDAMLIFENLSRGFGRQGKRTFMAERQYTRMEDWLTAKLAYEGLPSKTYLSKTLAQYTSKTCSNCGFTITSADYDRVLEKLKKTATGWMTTINGKELKVEGQITYYNRYKRQNVVKDLSVELDRLSEESVNNDISSWTKGRSGEALSLLKKRFSHRPVQEKFVCLNCGFETHADEQAALNIARSWLFLRSQEYKKYQTNKTTGNTDKRAFVETWQSFYRKKLKEVWKPAV

SEQ ID NO: 44881 - protein, 978 aa, synthetic construct
  REGION 1..978: note = engineered CasX variant
QEIKRINKIRRRLVKDSNTKKAGKTGPMKTLLVRVMTPDLRERLENLRKKPENIPQPISNTSRANLNKLLTDYTEMKKAILHVYWEEFQKDPVGLMSRVAQPASKKIDQNKLKPEMDEKGNLTTAGFACSQCGQPLFVYKLEQVSEKGKAYTNYFGRCNVAEHEKLILLAQLKPEKDSDEAVTYSLGKFGQRALDFYSIHVTKESTHPVKPLAQIAGNRYASHPVGKALSDACMGTIASFLSKYQDIIIEHQKVVKGNQKRLESLRELAGKENLEYPSVTLPPQPHTKEGVDAYNEVIARVRMWVNLNLWQKLKLSRDDAKPLLRLKGFPSFPLVERQANEVDWWDMVCNVKKLINEKKEDGKVFWQNLAIYKRQEALRPYLSSEEDRKKGKKFARYQLGDLLLHLEKKHGEDWGKVYDEAWERIDKKVEGLSKHIKLEEERRSEDAQSKAALTDWLRAKASFVIEGLKEADKDEFCRCDLKLQKWYGDLRGKPFAIEAENSILDISGFSKQYNCAFIWQKDGVKKLNLYLIINYFKGGKLRFKKIKPEAFEANRFYTVINKKSGEIVPMEVNFNFDDPNLIILPLAFGKRQGREFIWNDLLSLETGSLKLANGRVIEKTLYNRRTRQDEPALFVALTFERREVLDSSNIKPMNLIGVDRGENIPAVIALTDPEGCPLSRFKDSLGNPTHILRIGESYKEKQRTIQAKKEVEQRRAGGYSRKYASKAKNLADDMVRNTARDLLYYAVTQDAMLIFENLSRGFGRQGKRTFMAERQYTRMEDWLTAKLAYEGLPSKTYLSKTLAQYTSKTCSNCGFTITSADYDRVLEKLKKTATGWMTTINGKELKVEGQITYYNRYKRQNVVKDLSVELDRLSEESVNNDISSWTKGRSGEALSLLKKRFSHRPVQEKFVCLNCGFETHADEQAALNIARSWLFLRSQEYKKYQTNKTTGNTDKRAFVETWQSFYRKKLKEVWKPAV

SEQ ID NO: 44882 - protein, 978 aa, synthetic construct
  REGION 1..978: note = engineered CasX variant
QEIKRINKIRRRLVKDSNTKKAGKTGPMKTLLVRVMTPDLRERLENLRKKPENIPQPISNTSRANLNKLLTDYTEMKKAILHVYWEEFQKDPVGLMSRVAQPASKKIDQNKLKPEMDEKGNLTTAGFACSQCGQPLFVYKLEQVSEKGKAYTNYFGRCNVAEHEKLILLAQLKPEKDSDEAVTYSLGKFGQRALDFYSIHVTKESTHPVKPLAQIAGNRYASSPVGKALSDACMGTIASFLSKYQDIIIEHQKVVKGNQKRLESLRELAGKENLEYPSVTLPPQPHTKEGVDAYNEVIARVRMWVNLNLWQKLKLSRDDAKPLLRLKGFPSFPLVERQANEVDWWDMVCNVKKLINEKKEDGKVFWQNLAIYKRQEALRPYLSSEEDRKKGKKFARYQLGDLLLHLEKKHGEDWGKVYDEAWERIDKKVEGLSKHIKLEEERRSEDAQSKAALTDWLRAKASFVIEGLKEADKDEFCRCDLKLQKWYGDLRGKPFAIEAENSILDISGFSKQYNCAFIWQKDGVKKLNLYLIINYFKGGKLRFKKIKPEAFEANRFYTVINKKSGEIVPMEVNFNFDDPNLIILPLAFGKRQGREFIWNDLLSLETGSLKLANGRVIEKTLYNRRTRQDEPALFVALTFERREVLDSSNIKPMNLIGVDRGENIPAVIALTDPEGCPLSRFKDSLGNPTHILRIGESYKEKQRTIQAKKEVEQRRAGGYSRKYASKAKNLADDMVRNTARDLLYYAVTQDAMLIFENLSRGFGRQGKRTFMAERQYTRMEDWLTAKLAYEGLPSKTYLSKTLAQYTSKTCSNCGFTITSADYDRVLEKLKKTATGWMTTINGKELKVEGQITYYNRYKRQNVVKDLSVELDRLSEESVNNDISSWTKGRSGEALSLLKKRFSHRPVQEKFVCLNCGFETHADEQAALNIARSWLFLRSQEYKKYQTNKTTGNTDKRAFVETWQSFYRKKLKEVWKPAV

SEQ ID NO: 44883 - protein, 978 aa, synthetic construct
  REGION 1..978: note = engineered CasX variant
QEIKRINKIRRRLVKDSNTKKAGKTGPMKTLLVRVMTPDLRERLENLRKKPENIPQPISNTSRANLNKLLTDYTEMKKAILHVYWEEFQKDPVGLMSRVAQPASKKIDQNKLKPEMDEKGNLTTAGFACSQCGQPLFVYKLEQVSEKGKAYTNYFGRCNVAEHEKLILLAQLKPEKDSDEAVTYSLGKFGQRALDFYSIHVTKESTHPVKPLAQIAGNRYASTPVGKALSDACMGTIASFLSKYQDIIIEHQKVVKGNQKRLESLRELAGKENLEYPSVTLPPQPHTKEGVDAYNEVIARVRMWVNLNLWQKLKLSRDDAKPLLRLKGFPSFPLVERQANEVDWWDMVCNVKKLINEKKEDGKVFWQNLAIYKRQEALRPYLSSEEDRKKGKKFARYQLGDLLLHLEKKHGEDWGKVYDEAWERIDKKVEGLSKHIKLEEERRSEDAQSKAALTDWLRAKASFVIEGLKEADKDEFCRCDLKLQKWYGDLRGKPFAIEAENSILDISGFSKQYNCAFIWQKDGVKKLNLYLIINYFKGGKLRFKKIKPEAFEANRFYTVINKKSGEIVPMEVNFNFDDPNLIILPLAFGKRQGREFIWNDLLSLETGSLKLANGRVIEKTLYNRRTRQDEPALFVALTFERREVLDSSNIKPMNLIGVDRGENIPAVIALTDPEGCPLSRFKDSLGNPTHILRIGESYKEKQRTIQAKKEVEQRRAGGYSRKYASKAKNLADDMVRNTARDLLYYAVTQDAMLIFENLSRGFGRQGKRTFMAERQYTRMEDWLTAKLAYEGLPSKTYLSKTLAQYTSKTCSNCGFTITSADYDRVLEKLKKTATGWMTTINGKELKVEGQITYYNRYKRQNVVKDLSVELDRLSEESVNNDISSWTKGRSGEALSLLKKRFSHRPVQEKFVCLNCGFETHADEQAALNIARSWLFLRSQEYKKYQTNKTTGNTDKRAFVETWQSFYRKKLKEVWKPAV

SEQ ID NO: 44884 - protein, 978 aa, synthetic construct
  REGION 1..978: note = engineered CasX variant
QEIKRINKIRRRLVKDSNTKKAGKTGPMKTLLVRVMTPDLRERLENLRKKPENIPQPISNTSRANLNKLLTDYTEMKKAILHVYWEEFQKDPVGLMSRVAQPASKKIDQNKLKPEMDEKGNLTTAGFACSQCGQPLFVYKLEQVSEKGKAYTNYFGRCNVAEHEKLILLAQLKPEKDSDEAVTYSLGKFGQRALDFYSIHVTKESTHPVKPLAQIAGNRYASAPVGKALSDACMGTIASFLSKYQDIIIEHQKVVKGNQKRLESLRELAGKENLEYPSVTLPPQPHTKEGVDAYNEVIARVRMWVNLNLWQKLKLSRDDAKPLLRLKGFPSFPLVERQANEVDWWDMVCNVKKLINEKKEDGKVFWQNLAIYKRQEALRPYLSSEEDRKKGKKFARYQLGDLLLHLEKKHGEDWGKVYDEAWERIDKKVEGLSKHIKLEEERRSEDAQSKAALTDWLRAKASFVIEGLKEADKDEFCRCDLKLQKWYGDLRGKPFAIEAENSILDISGFSKQYNCAFIWQKDGVKKLNLYLIINYFKGGKLRFKKIKPEAFEANRFYTVINKKSGEIVPMEVNFNFDDPNLIILPLAFGKRQGREFIWNDLLSLETGSLKLANGRVIEKTLYNRRTRQDEPALFVALTFERREVLDSSNIKPMNLIGVDRGENIPAVIALTDPEGCPLSRFKDSLGNPTHILRIGESYKEKQRTIQAKKEVEQRRAGGYSRKYASKAKNLADDMVRNTARDLLYYAVTQDAMLIFENLSRGFGRQGKRTFMAERQYTRMEDWLTAKLAYEGLPSKTYLSKTLAQYTSKTCSNCGFTITSADYDRVLEKLKKTATGWMTTINGKELKVEGQITYYNRYKRQNVVKDLSVELDRLSEESVNNDISSWTKGRSGEALSLLKKRFSHRPVQEKFVCLNCGFETHADEQAALNIARSWLFLRSQEYKKYQTNKTTGNTDKRAFVETWQSFYRKKLKEVWKPAV

SEQ ID NO: 44885 - protein, 978 aa, synthetic construct
  REGION 1..978: note = engineered CasX variant
QEIKRINKIRRRLVKDSNTKKAGKTGPMKTLLVRVMTPDLRERLENLRKKPENIPQPISNTSRANLNKLLTDYTEMKKAILHVYWEEFQKDPVGLMSRVAQPASKKIDQNKLKPEMDEKGNLTTAGFACSQCGQPLFVYKLEQVSEKGKAYTNYFGRCNVAEHEKLILLAQLKPEKDSDEAVTYSLGKFGQRALDFYSIHVTKESTHPVKPLAQIAGNRYASVPVGKALSDACMGTIASFLSKYQDIIIEHQKVVKGNQKRLESLRELAGKENLEYPSVTLPPQPHTKEGVDAYNEVIARVRMWVNLNLWQKLKLSRDDAKPLLRLKGFPSFPLVERQANEVDWWDMVCNVKKLINEKKEDGKVFWQNLAIYKRQEALRPYLSSEEDRKKGKKFARYQLGDLLLHLEKKHGEDWGKVYDEAWERIDKKVEGLSKHIKLEEERRSEDAQSKAALTDWLRAKASFVIEGLKEADKDEFCRCDLKLQKWYGDLRGKPFAIEAENSILDISGFSKQYNCAFIWQKDGVKKLNLYLIINYFKGGKLRFKKIKPEAFEANRFYTVINKKSGEIVPMEVNFNFDDPNLIILPLAFGKRQGREFIWNDLLSLETGSLKLANGRVIEKTLYNRRTRQDEPALFVALTFERREVLDSSNIKPMNLIGVDRGENIPAVIALTDPEGCPLSRFKDSLGNPTHILRIGESYKEKQRTIQAKKEVEQRRAGGYSRKYASKAKNLADDMVRNTARDLLYYAVTQDAMLIFENLSRGFGRQGKRTFMAERQYTRMEDWLTAKLAYEGLPSKTYLSKTLAQYTSKTCSNCGFTITSADYDRVLEKLKKTATGWMTTINGKELKVEGQITYYNRYKRQNVVKDLSVELDRLSEESVNNDISSWTKGRSGEALSLLKKRFSHRPVQEKFVCLNCGFETHADEQAALNIARSWLFLRSQEYKKYQTNKTTGNTDKRAFVETWQSFYRKKLKEVWKPAV

SEQ ID NO: 44886 - protein, 978 aa, synthetic construct
  REGION 1..978: note = engineered CasX variant
QEIKRINKIRRRLVKDSNTKKAGKTGPMKTLLVRVMTPDLRERLENLRKKPENIPQPISNTSRANLNKLLTDYTEMKKAILHVYWEEFQKDPVGLMSRVAQPASKKIDQNKLKPEMDEKGNLTTAGFACSQCGQPLFVYKLEQVSEKGKAYTNYFGRCNVAEHEKLIKLAQLKPEKDSDEAVTYSLGKFGQRALDFYSIHVTKESTHPVKPLAQIAGNRYASGPVGKALSDACMGTIASFLSKYQDIIIEHQKVVKGNQKRLESLRELAGKENLEYPSVTLPPQPHTKEGVDAYNEVIARVRMWVNLNLWQKLKLSRDDAKPLLRLKGFPSFPLVERQANEVDWWDMVCNVKKLINEKKEDGKVFWQNLAIYKRQEALRPYLSSEEDRKKGKKFARYQLGDLLLHLEKKHGEDWGKVYDEAWERIDKKVEGLSKHIKLEEERRSEDAQSKAALTDWLRAKASFVIEGLKEADKDEFCRCDLKLQKWYGDLRGKPFAIEAENSILDISGFSKQYNCAFIWQKDGVKKLNLYLIINYFKGGKLRFKKIKPEAFEANRFYTVINKKSGEIVPMEVNFNFDDPNLIILPLAFGKRQGREFIWNDLLSLETGSLKLANGRVIEKTLYNRRTRQDEPALFVALTFERREVLDSSNIKPMNLIGVDRGENIPAVIALTDPEGCPLSRFKDSLGNPTHILRIGESYKEKQRTIQAKKEVEQRRAGGYSRKYASKAKNLADDMVRNTARDLLYYAVTQDAMLIFENLSRGFGRQGKRTFMAERQYTRMEDWLTAKLAYEGLPSKTYLSKTLAQYTSKTCSNCGFTITSADYDRVLEKLKKTATGWMTTINGKELKVEGQITYYNRYKRQNVVKDLSVELDRLSEESVNNDISSWTKGRSGEALSLLKKRFSHRPVQEKFVCLNCGFETHADEQAALNIARSWLFLRSQEYKKYQTNKTTGNTDKRAFVETWQSFYRKKLKEVWKPAV

SEQ ID NO: 44887 - protein, 977 aa, synthetic construct
  REGION 1..977: note = engineered CasX variant
QEIKRINKIRRRLVKDSNTKKAGKTGPMKTLLVRVMTPDLRERLENLRKKPENIPQPISNTSRANLNKLLTDYTEMKKAILHVYWEEFQKDPVGLMSRVAQPASKKIDQNKLKPEMDEKGNLTTAGFACSQCGQPLFVYKLEQVSEKGKAYTNYFGRCNVAEHEKLILLAQLKPEKDSDEAVTYSLGKFGQRALDFYSIHVTKESTHPVKPLAQIAGNRYASPVGKALSDACMGTIASFLSKYQDIIIEHQKVVKGNQKRLESLRELAGKENLEYPSVTLPPQPHTKEGVDAYNEVIARVRMWVNLNLWQKLKLSRDDAKPLLRLKGFPSFPLVERQANEVDWWDMVCNVKKLINEKKEDGKVFWQNLAIYKRQEALRPYLSSEEDRKKGKKFARYQLGDLLLHLEKKHGEDWGKVYDEAWERIDKKVEGLSKHIKLEEERRSEDAQSKAALTDWLRAKASFVIEGLKEADKDEFCRCDLKLQKWYGDLRGKPFAIEAENSILDISGFSKQYNCAFIWQKDGVKKLNLYLIINYFKGGKLRFKKIKPEAFEANRFYTVINKKSGEIVPMEVNFNFDDPNLIILPLAFGKRQGREFIWNDLLSLETGSLKLANGRVIEKTLYNRRTRQDEPALFVALTFERREVLDSSNIKPMNLIGVDRGENIPAVIALTDPEGCPLSRFKDSLGNPTHILRIGESYKEKQRTIQAKKEVEQRRAGGYSRKYASKAKNLADDMVRNTARDLLYYAVTQDAMLIFENLSRGFGRQGKRTFMAERQYTRMEDWLTAKLAYEGLPSKTYLSKTLAQYTSKTCSNCGFTITSADYDRVLEKLKKTATGWMTTINGKELKVEGQITYYNRYKRQNVVKDLSVELDRLSEESVNNDISSWTKGRSGEALSLLKKRFSHRPVQEKFVCLNCGFETHADEQAALNIARSWLFLRSQEYKKYQTNKTTGNTDKRAFVETWQSFYRKKLKEVWKPAV

SEQ ID NO: 44888 - protein, 978 aa, synthetic construct
  REGION 1..978: note = engineered CasX variant
QEIKRINKIRRRLVKDSNTKKAGKTGPMKTLLVRVMTPDLRERLENLRKKPENIPQPISNTSRANLNKLLTDYTEMKKAILHVYWEEFQKDPVGLMSRVAQPASKKIDQNKLKPEMDEKGNLTTAGFACSQCGQPLFVYKLEQVSEKGKAYTNYFGRCNVAEHEKLILLAQLKPEKDSDEAVTYSLGKFGQRALDFYSIHVTKESTHPVKPLAQIAGNRYASYPVGKALSDACMGTIASFLSKYQDIIIEHQKVVKGNQKRLESLRELAGKENLEYPSVTLPPQPHTKEGVDAYNEVIARVRMWVNLNLWQKLKLSRDDAKPLLRLKGFPSFPLVERQANEVDWWDMVCNVKKLINEKKEDGKVFWQNLAGYKRQEALRPYLSSEEDREKGKKFARYQLGDLLLHLEKKHGEDWGKVYDEAWERIDKKVEGLSKHIKLEEERRSEDAQSKAALTDWLRAKASFVIEGLKEADKDEFCRCDLKLQKWYGDLRGKPFAIEAENSILDISGFSKQYNCAFIWQKDGVKKLNLYLIINYFKGGKLRFKKIKPEAFEANRFYTVINKKSGEIVPMEVNFNFDDPNLIILPLAFGKRQGREFIWNDLLSLETGSLKLANGRVIEKTLYNRRTRQDEPALFVALTFERREVLDSSNIKPMNLIGVDRGENIPAVIALTDPEGCPLSRFKDSLGNPTHILRIGESYKEKQRTIQAKKEVEQRRAGGYSRKYASKAKNLADDMVRNTARDLLYYAVTQDAMLIFENLSRGFGRQGKRTFMAERQYTRMEDWLTAKLAYEGLPSKTYLSKTLAQYTSKTCSNCGFTITSADYDRVLEKLKKTATGWMTTINGKELKVEGQITYYNRYKRQNVVKDLSVELDRLSEESVNNDISSWTKGRSGEALSLLKKRFSHRPVQEKFVCLNCGFETHADEQAALNIARSWLFLRSQEYKKYQTNKTTGNTDKRAFVETWQSFYRKKLKEVWKPAV

SEQ ID NO: 44889 - protein, 978 aa, synthetic construct
  REGION 1..978: note = engineered CasX variant
QEIKRINKIRRRLVKDSNTKKAGKTGPMKTLLVRVMTPDLRERLENLRKKPENIPQPISNTSRANLNKLLTDYTEMKKAILHVYWEEFQKDPVGLMSRVAQPASKKIDQNKLKPEMDEKGNLTTAGFACSQCGQPLFVYKLEQVSEKGKAYTNYFGRCNVAEHEKLILLAQLKPEKDSDEAVTYSLGKFGQRALDFYSIHVTKESTHPVKPLAQIAGNRYASHPVGKALSDACMGTIASFLSKYQDIIIEHQKVVKGNQKRLESLRELAGKENLEYPSVTLPPQPHTKEGVDAYNEVIARVRMWVNLNLWQKLKLSRDDAKPLLRLKGFPSFPLVERQANEVDWWDMVCNVKKLINEKKEDGKVFWQNLAGYKRQEALRPYLSSEEDREKGKKFARYQLGDLLLHLEKKHGEDWGKVYDEAWERIDKKVEGLSKHIKLEEERRSEDAQSKAALTDWLRAKASFVIEGLKEADKDEFCRCDLKLQKWYGDLRGKPFAIEAENSILDISGFSKQYNCAFIWQKDGVKKLNLYLIINYFKGGKLRFKKIKPEAFEANRFYTVINKKSGEIVPMEVNFNFDDPNLIILPLAFGKRQGREFIWNDLLSLETGSLKLANGRVIEKTLYNRRTRQDEPALFVALTFERREVLDSSNIKPMNLIGVDRGENIPAVIALTDPEGCPLSRFKDSLGNPTHILRIGESYKEKQRTIQAKKEVEQRRAGGYSRKYASKAKNLADDMVRNTARDLLYYAVTQDAMLIFENLSRGFGRQGKRTFMAERQYTRMEDWLTAKLAYEGLPSKTYLSKTLAQYTSKTCSNCGFTITSADYDRVLEKLKKTATGWMTTINGKELKVEGQITYYNRYKRQNVVKDLSVELDRLSEESVNNDISSWTKGRSGEALSLLKKRFSHRPVQEKFVCLNCGFETHADEQAALNIARSWLFLRSQEYKKYQTNKTTGNTDKRAFVETWQSFYRKKLKEVWKPAV

SEQ ID NO: 44890 - protein, 978 aa, synthetic construct
  REGION 1..978: note = engineered CasX variant
QEIKRINKIRRRLVKDSNTKKAGKTGPMKTLLVRVMTPDLRERLENLRKKPENIPQPISNTSRANLNKLLTDYTEMKKAILHVYWEEFQKDPVGLMSRVAQPASKKIDQNKLKPEMDEKGNLTTAGFACSQCGQPLFVYKLEQVSEKGKAYTNYFGRCNVAEHEKLILLAQLKPEKDSDEAVTYSLGKFGQRALDFYSIHVTKESTHPVKPLAQIAGNRYASSPVGKALSDACMGTIASFLSKYQDIIIEHQKVVKGNQKRLESLRELAGKENLEYPSVTLPPQPHTKEGVDAYNEVIARVRMWVNLNLWQKLKLSRDDAKPLLRLKGFPSFPLVERQANEVDWWDMVCNVKKLINEKKEDGKVFWQNLAGYKRQEALRPYLSSEEDREKGKKFARYQLGDLLLHLEKKHGEDWGKVYDEAWERIDKKVEGLSKHIKLEEERRSEDAQSKAALTDWLRAKASFVIEGLKEADKDEFCRCDLKLQKWYGDLRGKPFAIEAENSILDISGFSKQYNCAFIWQKDGVKKLNLYLIINYFKGGKLRFKKIKPEAFEANRFYTVINKKSGEIVPMEVNFNFDDPNLIILPLAFGKRQGREFIWNDLLSLETGSLKLANGRVIEKTLYNRRTRQDEPALFVALTFERREVLDSSNIKPMNLIGVDRGENIPAVIALTDPEGCPLSRFKDSLGNPTHILRIGESYKEKQRTIQAKKEVEQRRAGGYSRKYASKAKNLADDMVRNTARDLLYYAVTQDAMLIFENLSRGFGRQGKRTFMAERQYTRMEDWLTAKLAYEGLPSKTYLSKTLAQYTSKTCSNCGFTITSADYDRVLEKLKKTATGWMTTINGKELKVEGQITYYNRYKRQNVVKDLSVELDRLSEESVNNDISSWTKGRSGEALSLLKKRFSHRPVQEKFVCLNCGFETHADEQAALNIARSWLFLRSQEYKKYQTNKTTGNTDKRAFVETWQSFYRKKLKEVWKPAV

SEQ ID NO: 44891 - protein, 978 aa, synthetic construct
  REGION 1..978: note = engineered CasX variant
QEIKRINKIRRRLVKDSNTKKAGKTGPMKTLLVRVMTPDLRERLENLRKKPENIPQPISNTSRANLNKLLTDYTEMKKAILHVYWEEFQKDPVGLMSRVAQPASKKIDQNKLKPEMDEKGNLTTAGFACSQCGQPLFVYKLEQVSEKGKAYTNYFGRCNVAEHEKLILLAQLKPEKDSDEAVTYSLGKFGQRALDFYSIHVTKESTHPVKPLAQIAGNRYASTPVGKALSDACMGTIASFLSKYQDIIIEHQKVVKGNQKRLESLRELAGKENLEYPSVTLPPQPHTKEGVDAYNEVIARVRMWVNLNLWQKLKLSRDDAKPLLRLKGFPSFPLVERQANEVDWWDMVCNVKKLINEKKEDGKVFWQNLAGYKRQEALRPYLSSEEDREKGKKFARYQLGDLLLHLEKKHGEDWGKVYDEAWERIDKKVEGLSKHIKLEEERRSEDAQSKAALTDWLRAKASFVIEGLKEADKDEFCRCDLKLQKWYGDLRGKPFAIEAENSILDISGFSKQYNCAFIWQKDGVKKLNLYLIINYFKGGKLRFKKIKPEAFEANRFYTVINKKSGEIVPMEVNFNFDDPNLIILPLAFGKRQGREFIWNDLLSLETGSLKLANGRVIEKTLYNRRTRQDEPALFVALTFERREVLDSSNIKPMNLIGVDRGENIPAVIALTDPEGCPLSRFKDSLGNPTHILRIGESYKEKQRTIQAKKEVEQRRAGGYSRKYASKAKNLADDMVRNTARDLLYYAVTQDAMLIFENLSRGFGRQGKRTFMAERQYTRMEDWLTAKLAYEGLPSKTYLSKTLAQYTSKTCSNCGFTITSADYDRVLEKLKKTATGWMTTINGKELKVEGQITYYNRYKRQNVVKDLSVELDRLSEESVNNDISSWTKGRSGEALSLLKKRFSHRPVQEKFVCLNCGFETHADEQAALNIARSWLFLRSQEYKKYQTNKTTGNTDKRAFVETWQSFYRKKLKEVWKPAV

SEQ ID NO: 44892 - protein, 978 aa, synthetic construct
  REGION 1..978: note = engineered CasX variant
QEIKRINKIRRRLVKDSNTKKAGKTGPMKTLLVRVMTPDLRERLENLRKKPENIPQPISNTSRANLNKLLTDYTEMKKAILHVYWEEFQKDPVGLMSRVAQPASKKIDQNKLKPEMDEKGNLTTAGFACSQCGQPLFVYKLEQVSEKGKAYTNYFGRCNVAEHEKLILLAQLKPEKDSDEAVTYSLGKFGQRALDFYSIHVTKESTHPVKPLAQIAGNRYASAPVGKALSDACMGTIASFLSKYQDIIIEHQKVVKGNQKRLESLRELAGKENLEYPSVTLPPQPHTKEGVDAYNEVIARVRMWVNLNLWQKLKLSRDDAKPLLRLKGFPSFPLVERQANEVDWWDMVCNVKKLINEKKEDGKVFWQNLAGYKRQEALRPYLSSEEDREKGKKFARYQLGDLLLHLEKKHGEDWGKVYDEAWERIDKKVEGLSKHIKLEEERRSEDAQSKAALTDWLRAKASFVIEGLKEADKDEFCRCDLKLQKWYGDLRGKPFAIEAENSILDISGFSKQYNCAFIWQKDGVKKLNLYLIINYFKGGKLRFKKIKPEAFEANRFYTVINKKSGEIVPMEVNFNFDDPNLIILPLAFGKRQGREFIWNDLLSLETGSLKLANGRVIEKTLYNRRTRQDEPALFVALTFERREVLDSSNIKPMNLIGVDRGENIPAVIALTDPEGCPLSRFKDSLGNPTHILRIGESYKEKQRTIQAKKEVEQRRAGGYSRKYASKAKNLADDMVRNTARDLLYYAVTQDAMLIFENLSRGFGRQGKRTFMAERQYTRMEDWLTAKLAYEGLPSKTYLSKTLAQYTSKTCSNCGFTITSADYDRVLEKLKKTATGWMTTINGKELKVEGQITYYNRYKRQNVVKDLSVELDRLSEESVNNDISSWTKGRSGEALSLLKKRFSHRPVQEKFVCLNCGFETHADEQAALNIARSWLFLRSQEYKKYQTNKTTGNTDKRAFVETWQSFYRKKLKEVWKPAV

SEQ ID NO: 44893 - protein, 978 aa, synthetic construct
  REGION 1..978: note = engineered CasX variant
QEIKRINKIRRRLVKDSNTKKAGKTGPMKTLLVRVMTPDLRERLENLRKKPENIPQPISNTSRANLNKLLTDYTEMKKAILHVYWEEFQKDPVGLMSRVAQPASKKIDQNKLKPEMDEKGNLTTAGFACSQCGQPLFVYKLEQVSEKGKAYTNYFGRCNVAEHEKLILLAQLKPEKDSDEAVTYSLGKFGQRALDFYSIHVTKESTHPVKPLAQIAGNRYASVPVGKALSDACMGTIASFLSKYQDIIIEHQKVVKGNQKRLESLRELAGKENLEYPSVTLPPQPHTKEGVDAYNEVIARVRMWVNLNLWQKLKLSRDDAKPLLRLKGFPSFPLVERQANEVDWWDMVCNVKKLINEKKEDGKVFWQNLAGYKRQEALRPYLSSEEDREKGKKFARYQLGDLLLHLEKKHGEDWGKVYDEAWERIDKKVEGLSKHIKLEEERRSEDAQSKAALTDWLRAKASFVIEGLKEADKDEFCRCDLKLQKWYGDLRGKPFAIEAENSILDISGFSKQYNCAFIWQKDGVKKLNLYLIINYFKGGKLRFKKIKPEAFEANRFYTVINKKSGEIVPMEVNFNFDDPNLIILPLAFGKRQGREFIWNDLLSLETGSLKLANGRVIEKTLYNRRTRQDEPALFVALTFERREVLDSSNIKPMNLIGVDRGENIPAVIALTDPEGCPLSRFKDSLGNPTHILRIGESYKEKQRTIQAKKEVEQRRAGGYSRKYASKAKNLADDMVRNTARDLLYYAVTQDAMLIFENLSRGFGRQGKRTFMAERQYTRMEDWLTAKLAYEGLPSKTYLSKTLAQYTSKTCSNCGFTITSADYDRVLEKLKKTATGWMTTINGKELKVEGQITYYNRYKRQNVVKDLSVELDRLSEESVNNDISSWTKGRSGEALSLLKKRFSHRPVQEKFVCLNCGFETHADEQAALNIARSWLFLRSQEYKKYQTNKTTGNTDKRAFVETWQSFYRKKLKEVWKPAV

SEQ ID NO: 44894 - protein, 978 aa, synthetic construct
  REGION 1..978: note = engineered CasX variant
QEIKRINKIRRRLVKDSNTKKAGKTGPMKTLLVRVMTPDLRERLENLRKKPENIPQPISNTSRANLNKLLTDYTEMKKAILHVYWEEFQKDPVGLMSRVAQPASKKIDQNKLKPEMDEKGNLTTAGFACSQCGQPLFVYKLEQVSEKGKAYTNYFGRCNVAEHEKLIKLAQLKPEKDSDEAVTYSLGKFGQRALDFYSIHVTKESTHPVKPLAQIAGNRYASGPVGKALSDACMGTIASFLSKYQDIIIEHQKVVKGNQKRLESLRELAGKENLEYPSVTLPPQPHTKEGVDAYNEVIARVRMWVNLNLWQKLKLSRDDAKPLLRLKGFPSFPLVERQANEVDWWDMVCNVKKLINEKKEDGKVFWQNLAGYKRQEALRPYLSSEEDREKGKKFARYQLGDLLLHLEKKHGEDWGKVYDEAWERIDKKVEGLSKHIKLEEERRSEDAQSKAALTDWLRAKASFVIEGLKEADKDEFCRCDLKLQKWYGDLRGKPFAIEAENSILDISGFSKQYNCAFIWQKDGVKKLNLYLIINYFKGGKLRFKKIKPEAFEANRFYTVINKKSGEIVPMEVNFNFDDPNLIILPLAFGKRQGREFIWNDLLSLETGSLKLANGRVIEKTLYNRRTRQDEPALFVALTFERREVLDSSNIKPMNLIGVDRGENIPAVIALTDPEGCPLSRFKDSLGNPTHILRIGESYKEKQRTIQAKKEVEQRRAGGYSRKYASKAKNLADDMVRNTARDLLYYAVTQDAMLIFENLSRGFGRQGKRTFMAERQYTRMEDWLTAKLAYEGLPSKTYLSKTLAQYTSKTCSNCGFTITSADYDRVLEKLKKTATGWMTTINGKELKVEGQITYYNRYKRQNVVKDLSVELDRLSEESVNNDISSWTKGRSGEALSLLKKRFSHRPVQEKFVCLNCGFETHADEQAALNIARSWLFLRSQEYKKYQTNKTTGNTDKRAFVETWQSFYRKKLKEVWKPAV

SEQ ID NO: 44895 - protein, 977 aa, synthetic construct
  REGION 1..977: note = engineered CasX variant
QEIKRINKIRRRLVKDSNTKKAGKTGPMKTLLVRVMTPDLRERLENLRKKPENIPQPISNTSRANLNKLLTDYTEMKKAILHVYWEEFQKDPVGLMSRVAQPASKKIDQNKLKPEMDEKGNLTTAGFACSQCGQPLFVYKLEQVSEKGKAYTNYFGRCNVAEHEKLILLAQLKPEKDSDEAVTYSLGKFGQRALDFYSIHVTKESTHPVKPLAQIAGNRYASPVGKALSDACMGTIASFLSKYQDIIIEHQKVVKGNQKRLESLRELAGKENLEYPSVTLPPQPHTKEGVDAYNEVIARVRMWVNLNLWQKLKLSRDDAKPLLRLKGFPSFPLVERQANEVDWWDMVCNVKKLINEKKEDGKVFWQNLAGYKRQEALRPYLSSEEDREKGKKFARYQLGDLLLHLEKKHGEDWGKVYDEAWERIDKKVEGLSKHIKLEEERRSEDAQSKAALTDWLRAKASFVIEGLKEADKDEFCRCDLKLQKWYGDLRGKPFAIEAENSILDISGFSKQYNCAFIWQKDGVKKLNLYLIINYFKGGKLRFKKIKPEAFEANRFYTVINKKSGEIVPMEVNFNFDDPNLIILPLAFGKRQGREFIWNDLLSLETGSLKLANGRVIEKTLYNRRTRQDEPALFVALTFERREVLDSSNIKPMNLIGVDRGENIPAVIALTDPEGCPLSRFKDSLGNPTHILRIGESYKEKQRTIQAKKEVEQRRAGGYSRKYASKAKNLADDMVRNTARDLLYYAVTQDAMLIFENLSRGFGRQGKRTFMAERQYTRMEDWLTAKLAYEGLPSKTYLSKTLAQYTSKTCSNCGFTITSADYDRVLEKLKKTATGWMTTINGKELKVEGQITYYNRYKRQNVVKDLSVELDRLSEESVNNDISSWTKGRSGEALSLLKKRFSHRPVQEKFVCLNCGFETHADEQAALNIARSWLFLRSQEYKKYQTNKTTGNTDKRAFVETWQSFYRKKLKEVWKPAV

SEQ ID NO: 44896 - protein, 978 aa, synthetic construct
  REGION 1..978: note = engineered CasX variant
QEIKRINKIRRRLVKDSNTKKAGKTGPMKTLLVRVMTPDLRERLENLRKKPENIPQPISNTSRANLNKLLTDYTEMKKAILHVYWEEFQKDPVGLMSRVAQPASKKIDQNKLKPEMDEKGNLTTAGFACSQCGQPLFVYKLEQVSEKGKAYTNYFGRCNVAEHEKLILLAQLKPEKDSDEAVTYSLGKFGQRALDFYSIHVTKESTHPVKPLAQIAGNRYASYPVGKALSDACMGTIASFLSKYQDIIIEHQKVVKGNQKRLESLRELAGKENLEYPSVTLPPQPHTKEGVDAYNEVIARVRMWVNLNLWQKLKLSRDDAKPLLRLKGFPSFPLVERQANEVDWWDMVCNVKKLINEKKEDGKVFWQNLAGYKRQEALRPYLSSEEDRKKGKKFARYQLGDLLLHLEKKHGEDWGKVYDEAWERIDKKVEGLSKHIKLEEERRSEDAQSKAALTDWLRAKASFVIEGLKEADKDEFCRCDLKLQKWYGDLRGKPFAIEAENSILDISGFSKQYNCAFIWQKDGVKKLNLYLIINYFKGGKLRFKKIKPEAFEANRFYTVINKKSGEIVIMEVNFNFDDPNLIILPLAFGKRQGREFIWNDLLSLETGSLKLANGRVIEKTLYNRRTRQDEPALFVALTFERREVLDSSNIKPMNLIGVDRGENIPAVIALTDPEGCPLSRFKDSLGNPTHILRIGESYKEKQRTIQAKKEVEQRRAGGYSRKYASKAKNLADDMVRNTARDLLYYAVTQDAMLIFENLSRGFGRQGKRTFMAERQYTRMEDWLTAKLAYEGLPSKTYLSKTLAQYTSKTCSNCGFTITSADYDRVLEKLKKTATGWMTTINGKELKVEGQITYYNRYKRQNVVKDLSVELDRLSEESVNNDISSWTKGRSGEALSLLKKRFSHRPVQEKFVCLNCGFETHADEQAALNIARSWLFLRSQEYKKYQTNKTTGNTDKRAFVETWQSFYRKKLKEVWKPAV

SEQ ID NO: 44897 - protein, 978 aa, synthetic construct
  REGION 1..978: note = engineered CasX variant
QEIKRINKIRRRLVKDSNTKKAGKTGPMKTLLVRVMTPDLRERLENLRKKPENIPQPISNTSRANLNKLLTDYTEMKKAILHVYWEEFQKDPVGLMSRVAQPASKKIDQNKLKPEMDEKGNLTTAGFACSQCGQPLFVYKLEQVSEKGKAYTNYFGRCNVAEHEKLILLAQLKPEKDSDEAVTYSLGKFGQRALDFYSIHVTKESTHPVKPLAQIAGNRYASHPVGKALSDACMGTIASFLSKYQDIIIEHQKVVKGNQKRLESLRELAGKENLEYPSVTLPPQPHTKEGVDAYNEVIARVRMWVNLNLWQKLKLSRDDAKPLLRLKGFPSFPLVERQANEVDWWDMVCNVKKLINEKKEDGKVFWQNLAGYKRQEALRPYLSSEEDRKKGKKFARYQLGDLLLHLEKKHGEDWGKVYDEAWERIDKKVEGLSKHIKLEEERRSEDAQSKAALTDWLRAKASFVIEGLKEADKDEFCRCDLKLQKWYGDLRGKPFAIEAENSILDISGFSKQYNCAFIWQKDGVKKLNLYLIINYFKGGKLRFKKIKPEAFEANRFYTVINKKSGEIVIMEVNFNFDDPNLIILPLAFGKRQGREFIWNDLLSLETGSLKLANGRVIEKTLYNRRTRQDEPALFVALTFERREVLDSSNIKPMNLIGVDRGENIPAVIALTDPEGCPLSRFKDSLGNPTHILRIGESYKEKQRTIQAKKEVEQRRAGGYSRKYASKAKNLADDMVRNTARDLLYYAVTQDAMLIFENLSRGFGRQGKRTFMAERQYTRMEDWLTAKLAYEGLPSKTYLSKTLAQYTSKTCSNCGFTITSADYDRVLEKLKKTATGWMTTINGKELKVEGQITYYNRYKRQNVVKDLSVELDRLSEESVNNDISSWTKGRSGEALSLLKKRFSHRPVQEKFVCLNCGFETHADEQAALNIARSWLFLRSQEYKKYQTNKTTGNTDKRAFVETWQSFYRKKLKEVWKPAV

SEQ ID NO: 44898 - protein, 978 aa, synthetic construct
  REGION 1..978: note = engineered CasX variant
QEIKRINKIRRRLVKDSNTKKAGKTGPMKTLLVRVMTPDLRERLENLRKKPENIPQPISNTSRANLNKLLTDYTEMKKAILHVYWEEFQKDPVGLMSRVAQPASKKIDQNKLKPEMDEKGNLTTAGFACSQCGQPLFVYKLEQVSEKGKAYTNYFGRCNVAEHEKLILLAQLKPEKDSDEAVTYSLGKFGQRALDFYSIHVTKESTHPVKPLAQIAGNRYASSPVGKALSDACMGTIASFLSKYQDIIIEHQKVVKGNQKRLESLRELAGKENLEYPSVTLPPQPHTKEGVDAYNEVIARVRMWVNLNLWQKLKLSRDDAKPLLRLKGFPSFPLVERQANEVDWWDMVCNVKKLINEKKEDGKVFWQNLAGYKRQEALRPYLSSEEDRKKGKKFARYQLGDLLLHLEKKHGEDWGKVYDEAWERIDKKVEGLSKHIKLEEERRSEDAQSKAALTDWLRAKASFVIEGLKEADKDEFCRCDLKLQKWYGDLRGKPFAIEAENSILDISGFSKQYNCAFIWQKDGVKKLNLYLIINYFKGGKLRFKKIKPEAFEANRFYTVINKKSGEIVIMEVNFNFDDPNLIILPLAFGKRQGREFIWNDLLSLETGSLKLANGRVIEKTLYNRRTRQDEPALFVALTFERREVLDSSNIKPMNLIGVDRGENIPAVIALTDPEGCPLSRFKDSLGNPTHILRIGESYKEKQRTIQAKKEVEQRRAGGYSRKYASKAKNLADDMVRNTARDLLYYAVTQDAMLIFENLSRGFGRQGKRTFMAERQYTRMEDWLTAKLAYEGLPSKTYLSKTLAQYTSKTCSNCGFTITSADYDRVLEKLKKTATGWMTTINGKELKVEGQITYYNRYKRQNVVKDLSVELDRLSEESVNNDISSWTKGRSGEALSLLKKRFSHRPVQEKFVCLNCGFETHADEQAALNIARSWLFLRSQEYKKYQTNKTTGNTDKRAFVETWQSFYRKKLKEVWKPAV

SEQ ID NO: 44899 - protein, 978 aa, synthetic construct
  REGION 1..978: note = engineered CasX variant
QEIKRINKIRRRLVKDSNTKKAGKTGPMKTLLVRVMTPDLRERLENLRKKPENIPQPISNTSRANLNKLLTDYTEMKKAILHVYWEEFQKDPVGLMSRVAQPASKKIDQNKLKPEMDEKGNLTTAGFACSQCGQPLFVYKLEQVSEKGKAYTNYFGRCNVAEHEKLILLAQLKPEKDSDEAVTYSLGKFGQRALDFYSIHVTKESTHPVKPLAQIAGNRYASTPVGKALSDACMGTIASFLSKYQDIIIEHQKVVKGNQKRLESLRELAGKENLEYPSVTLPPQPHTKEGVDAYNEVIARVRMWVNLNLWQKLKLSRDDAKPLLRLKGFPSFPLVERQANEVDWWDMVCNVKKLINEKKEDGKVFWQNLAGYKRQEALRPYLSSEEDRKKGKKFARYQLGDLLLHLEKKHGEDWGKVYDEAWERIDKKVEGLSKHIKLEEERRSEDAQSKAALTDWLRAKASFVIEGLKEADKDEFCRCDLKLQKWYGDLRGKPFAIEAENSILDISGFSKQYNCAFIWQKDGVKKLNLYLIINYFKGGKLRFKKIKPEAFEANRFYTVINKKSGEIVIMEVNFNFDDPNLIILPLAFGKRQGREFIWNDLLSLETGSLKLANGRVIEKTLYNRRTRQDEPALFVALTFERREVLDSSNIKPMNLIGVDRGENIPAVIALTDPEGCPLSRFKDSLGNPTHILRIGESYKEKQRTIQAKKEVEQRRAGGYSRKYASKAKNLADDMVRNTARDLLYYAVTQDAMLIFENLSRGFGRQGKRTFMAERQYTRMEDWLTAKLAYEGLPSKTYLSKTLAQYTSKTCSNCGFTITSADYDRVLEKLKKTATGWMTTINGKELKVEGQITYYNRYKRQNVVKDLSVELDRLSEESVNNDISSWTKGRSGEALSLLKKRFSHRPVQEKFVCLNCGFETHADEQAALNIARSWLFLRSQEYKKYQTNKTTGNTDKRAFVETWQSFYRKKLKEVWKPAV

SEQ ID NO: 44900 - protein, 978 aa, synthetic construct
  REGION 1..978: note = engineered CasX variant
QEIKRINKIRRRLVKDSNTKKAGKTGPMKTLLVRVMTPDLRERLENLRKKPENIPQPISNTSRANLNKLLTDYTEMKKAILHVYWEEFQKDPVGLMSRVAQPASKKIDQNKLKPEMDEKGNLTTAGFACSQCGQPLFVYKLEQVSEKGKAYTNYFGRCNVAEHEKLILLAQLKPEKDSDEAVTYSLGKFGQRALDFYSIHVTKESTHPVKPLAQIAGNRYASAPVGKALSDACMGTIASFLSKYQDIIIEHQKVVKGNQKRLESLRELAGKENLEYPSVTLPPQPHTKEGVDAYNEVIARVRMWVNLNLWQKLKLSRDDAKPLLRLKGFPSFPLVERQANEVDWWDMVCNVKKLINEKKEDGKVFWQNLAGYKRQEALRPYLSSEEDRKKGKKFARYQLGDLLLHLEKKHGEDWGKVYDEAWERIDKKVEGLSKHIKLEEERRSEDAQSKAALTDWLRAKASFVIEGLKEADKDEFCRCDLKLQKWYGDLRGKPFAIEAENSILDISGFSKQYNCAFIWQKDGVKKLNLYLIINYFKGGKLRFKKIKPEAFEANRFYTVINKKSGEIVIMEVNFNFDDPNLIILPLAFGKRQGREFIWNDLLSLETGSLKLANGRVIEKTLYNRRTRQDEPALFVALTFERREVLDSSNIKPMNLIGVDRGENIPAVIALTDPEGCPLSRFKDSLGNPTHILRIGESYKEKQRTIQAKKEVEQRRAGGYSRKYASKAKNLADDMVRNTARDLLYYAVTQDAMLIFENLSRGFGRQGKRTFMAERQYTRMEDWLTAKLAYEGLPSKTYLSKTLAQYTSKTCSNCGFTITSADYDRVLEKLKKTATGWMTTINGKELKVEGQITYYNRYKRQNVVKDLSVELDRLSEESVNNDISSWTKGRSGEALSLLKKRFSHRPVQEKFVCLNCGFETHADEQAALNIARSWLFLRSQEYKKYQTNKTTGNTDKRAFVETWQSFYRKKLKEVWKPAV

SEQ ID NO: 44901 - protein, 978 aa, synthetic construct
  REGION 1..978: note = engineered CasX variant
QEIKRINKIRRRLVKDSNTKKAGKTGPMKTLLVRVMTPDLRERLENLRKKPENIPQPISNTSRANLNKLLTDYTEMKKAILHVYWEEFQKDPVGLMSRVAQPASKKIDQNKLKPEMDEKGNLTTAGFACSQCGQPLFVYKLEQVSEKGKAYTNYFGRCNVAEHEKLILLAQLKPEKDSDEAVTYSLGKFGQRALDFYSIHVTKESTHPVKPLAQIAGNRYASVPVGKALSDACMGTIASFLSKYQDIIIEHQKVVKGNQKRLESLRELAGKENLEYPSVTLPPQPHTKEGVDAYNEVIARVRMWVNLNLWQKLKLSRDDAKPLLRLKGFPSFPLVERQANEVDWWDMVCNVKKLINEKKEDGKVFWQNLAGYKRQEALRPYLSSEEDRKKGKKFARYQLGDLLLHLEKKHGEDWGKVYDEAWERIDKKVEGLSKHIKLEEERRSEDAQSKAALTDWLRAKASFVIEGLKEADKDEFCRCDLKLQKWYGDLRGKPFAIEAENSILDISGFSKQYNCAFIWQKDGVKKLNLYLIINYFKGGKLRFKKIKPEAFEANRFYTVINKKSGEIVIMEVNFNFDDPNLIILPLAFGKRQGREFIWNDLLSLETGSLKLANGRVIEKTLYNRRTRQDEPALFVALTFERREVLDSSNIKPMNLIGVDRGENIPAVIALTDPEGCPLSRFKDSLGNPTHILRIGESYKEKQRTIQAKKEVEQRRAGGYSRKYASKAKNLADDMVRNTARDLLYYAVTQDAMLIFENLSRGFGRQGKRTFMAERQYTRMEDWLTAKLAYEGLPSKTYLSKTLAQYTSKTCSNCGFTITSADYDRVLEKLKKTATGWMTTINGKELKVEGQITYYNRYKRQNVVKDLSVELDRLSEESVNNDISSWTKGRSGEALSLLKKRFSHRPVQEKFVCLNCGFETHADEQAALNIARSWLFLRSQEYKKYQTNKTTGNTDKRAFVETWQSFYRKKLKEVWKPAV

SEQ ID NO: 44902 - protein, 978 aa, synthetic construct
  REGION 1..978: note = engineered CasX variant
QEIKRINKIRRRLVKDSNTKKAGKTGPMKTLLVRVMTPDLRERLENLRKKPENIPQPISNTSRANLNKLLTDYTEMKKAILHVYWEEFQKDPVGLMSRVAQPASKKIDQNKLKPEMDEKGNLTTAGFACSQCGQPLFVYKLEQVSEKGKAYTNYFGRCNVAEHEKLIKLAQLKPEKDSDEAVTYSLGKFGQRALDFYSIHVTKESTHPVKPLAQIAGNRYASGPVGKALSDACMGTIASFLSKYQDIIIEHQKVVKGNQKRLESLRELAGKENLEYPSVTLPPQPHTKEGVDAYNEVIARVRMWVNLNLWQKLKLSRDDAKPLLRLKGFPSFPLVERQANEVDWWDMVCNVKKLINEKKEDGKVFWQNLAGYKRQEALRPYLSSEEDRKKGKKFARYQLGDLLLHLEKKHGEDWGKVYDEAWERIDKKVEGLSKHIKLEEERRSEDAQSKAALTDWLRAKASFVIEGLKEADKDEFCRCDLKLQKWYGDLRGKPFAIEAENSILDISGFSKQYNCAFIWQKDGVKKLNLYLIINYFKGGKLRFKKIKPEAFEANRFYTVINKKSGEIVIMEVNFNFDDPNLIILPLAFGKRQGREFIWNDLLSLETGSLKLANGRVIEKTLYNRRTRQDEPALFVALTFERREVLDSSNIKPMNLIGVDRGENIPAVIALTDPEGCPLSRFKDSLGNPTHILRIGESYKEKQRTIQAKKEVEQRRAGGYSRKYASKAKNLADDMVRNTARDLLYYAVTQDAMLIFENLSRGFGRQGKRTFMAERQYTRMEDWLTAKLAYEGLPSKTYLSKTLAQYTSKTCSNCGFTITSADYDRVLEKLKKTATGWMTTINGKELKVEGQITYYNRYKRQNVVKDLSVELDRLSEESVNNDISSWTKGRSGEALSLLKKRFSHRPVQEKFVCLNCGFETHADEQAALNIARSWLFLRSQEYKKYQTNKTTGNTDKRAFVETWQSFYRKKLKEVWKPAV

SEQ ID NO: 44903 - protein, 977 aa, synthetic construct
  REGION 1..977: note = engineered CasX variant
QEIKRINKIRRRLVKDSNTKKAGKTGPMKTLLVRVMTPDLRERLENLRKKPENIPQPISNTSRANLNKLLTDYTEMKKAILHVYWEEFQKDPVGLMSRVAQPASKKIDQNKLKPEMDEKGNLTTAGFACSQCGQPLFVYKLEQVSEKGKAYTNYFGRCNVAEHEKLILLAQLKPEKDSDEAVTYSLGKFGQRALDFYSIHVTKESTHPVKPLAQIAGNRYASPVGKALSDACMGTIASFLSKYQDIIIEHQKVVKGNQKRLESLRELAGKENLEYPSVTLPPQPHTKEGVDAYNEVIARVRMWVNLNLWQKLKLSRDDAKPLLRLKGFPSFPLVERQANEVDWWDMVCNVKKLINEKKEDGKVFWQNLAGYKRQEALRPYLSSEEDRKKGKKFARYQLGDLLLHLEKKHGEDWGKVYDEAWERIDKKVEGLSKHIKLEEERRSEDAQSKAALTDWLRAKASFVIEGLKEADKDEFCRCDLKLQKWYGDLRGKPFAIEAENSILDISGFSKQYNCAFIWQKDGVKKLNLYLIINYFKGGKLRFKKIKPEAFEANRFYTVINKKSGEIVIMEVNFNFDDPNLIILPLAFGKRQGREFIWNDLLSLETGSLKLANGRVIEKTLYNRRTRQDEPALFVALTFERREVLDSSNIKPMNLIGVDRGENIPAVIALTDPEGCPLSRFKDSLGNPTHILRIGESYKEKQRTIQAKKEVEQRRAGGYSRKYASKAKNLADDMVRNTARDLLYYAVTQDAMLIFENLSRGFGRQGKRTFMAERQYTRMEDWLTAKLAYEGLPSKTYLSKTLAQYTSKTCSNCGFTITSADYDRVLEKLKKTATGWMTTINGKELKVEGQITYYNRYKRQNVVKDLSVELDRLSEESVNNDISSWTKGRSGEALSLLKKRFSHRPVQEKFVCLNCGFETHADEQAALNIARSWLFLRSQEYKKYQTNKTTGNTDKRAFVETWQSFYRKKLKEVWKPAV

SEQ ID NO: 44904 - protein, 978 aa, synthetic construct
  REGION 1..978: note = engineered CasX variant
QEIKRINKIRRRLVKDSNTKKAGKTGPMKTLLVRVMTPDLRERLENLRKKPENIPQPISNTSRANLNKLLTDYTEMKKAILHVYWEEFQKDPVGLMSRVAQPASKKIDQNKLKPEMDEKGNLTTAGFACSQCGQPLFVYKLEQVSEKGKAYTNYFGRCNVAEHEKLILLAQLKPEKDSDEAVTYSLGKFGQRALDFYSIHVTKESTHPVKPLAQIAGNRYASYPVGKALSGACMGTIASFLSKYQDIIIEHQKVVKGNQKRLESLRELAGKENLEYPSVTLPPQPHTKEGVDAYNEVIARVRMWVNLNLWQKLKLSRDDAKPLLRLKGFPSFPLVERQANEVDWWDMVCNVKKLINEKKEDGKVFWQNLAGYKRQEALRPYLSSEEDRKKGKKFARYQLGDLLLHLEKKHGEDWGKVYDEAWERIDKKVEGLSKHIKLEEERRSEDAQSKAALTDWLRAKASFVIEGLKEADKDEFCRCELKLQKWYGDLRGKPFAIEAENSILDISGFSKQYNCAFIWQKDGVKKLNLYLIINYFKGGKLRFKKIKPEAFEANRFYTVINKKSGEIVPMEVNFNFDDPNLIILPLAFGKRFGREFIWNDLLSLETGSLKLANGRVIEKTLYNRRTRQDEPALFVALTFERREVLDSSNIKPMNLIGVDRGENIPAVIALTDPEGCPLSRFKDSLGNPTHILRIGESYKEKQRTIQAKKEVEQRRAGGYSRKYASKAKNLADDMVRNTARDLLYYAVTQDAMLIFENLSRGFGRQGKRTFMAERQYTRMEDWLTAKLAYEGLPSKTYLSKTLAQYTSKTCSNCGFTITSADYDRVLEKLKKTATGWMTTINGKELKVEGQITYYNRYKRQNVVKDLSVELDRLSEESVNNDISSWTKGRSGEALSLLKKRFSHRPVQEKFVCLNCGFETHADEQAALNIARSWLFLRSQEYKKYQTNKTTGNTDKRAFVETWQSFYRKKLKEVWKPAV

SEQ ID NO: 44905 - protein, 978 aa, synthetic construct
  REGION 1..978: note = engineered CasX variant
QEIKRINKIRRRLVKDSNTKKAGKTGPMKTLLVRVMTPDLRERLENLRKKPENIPQPISNTSRANLNKLLTDYTEMKKAILHVYWEEFQKDPVGLMSRVAQPASKKIDQNKLKPEMDEKGNLTTAGFACSQCGQPLFVYKLEQVSEKGKAYTNYFGRCNVAEHEKLILLAQLKPEKDSDEAVTYSLGKFGQRALDFYSIHVTKESTHPVKPLAQIAGNRYASHPVGKALSGACMGTIASFLSKYQDIIIEHQKVVKGNQKRLESLRELAGKENLEYPSVTLPPQPHTKEGVDAYNEVIARVRMWVNLNLWQKLKLSRDDAKPLLRLKGFPSFPLVERQANEVDWWDMVCNVKKLINEKKEDGKVFWQNLAGYKRQEALRPYLSSEEDRKKGKKFARYQLGDLLLHLEKKHGEDWGKVYDEAWERIDKKVEGLSKHIKLEEERRSEDAQSKAALTDWLRAKASFVIEGLKEADKDEFCRCELKLQKWYGDLRGKPFAIEAENSILDISGFSKQYNCAFIWQKDGVKKLNLYLIINYFKGGKLRFKKIKPEAFEANRFYTVINKKSGEIVPMEVNFNFDDPNLIILPLAFGKRFGREFIWNDLLSLETGSLKLANGRVIEKTLYNRRTRQDEPALFVALTFERREVLDSSNIKPMNLIGVDRGENIPAVIALTDPEGCPLSRFKDSLGNPTHILRIGESYKEKQRTIQAKKEVEQRRAGGYSRKYASKAKNLADDMVRNTARDLLYYAVTQDAMLIFENLSRGFGRQGKRTFMAERQYTRMEDWLTAKLAYEGLPSKTYLSKTLAQYTSKTCSNCGFTITSADYDRVLEKLKKTATGWMTTINGKELKVEGQITYYNRYKRQNVVKDLSVELDRLSEESVNNDISSWTKGRSGEALSLLKKRFSHRPVQEKFVCLNCGFETHADEQAALNIARSWLFLRSQEYKKYQTNKTTGNTDKRAFVETWQSFYRKKLKEVWKPAV

SEQ ID NO: 44906 - protein, 978 aa, synthetic construct
  REGION 1..978: note = engineered CasX variant
QEIKRINKIRRRLVKDSNTKKAGKTGPMKTLLVRVMTPDLRERLENLRKKPENIPQPISNTSRANLNKLLTDYTEMKKAILHVYWEEFQKDPVGLMSRVAQPASKKIDQNKLKPEMDEKGNLTTAGFACSQCGQPLFVYKLEQVSEKGKAYTNYFGRCNVAEHEKLILLAQLKPEKDSDEAVTYSLGKFGQRALDFYSIHVTKESTHPVKPLAQIAGNRYASSPVGKALSGACMGTIASFLSKYQDIIIEHQKVVKGNQKRLESLRELAGKENLEYPSVTLPPQPHTKEGVDAYNEVIARVRMWVNLNLWQKLKLSRDDAKPLLRLKGFPSFPLVERQANEVDWWDMVCNVKKLINEKKEDGKVFWQNLAGYKRQEALRPYLSSEEDRKKGKKFARYQLGDLLLHLEKKHGEDWGKVYDEAWERIDKKVEGLSKHIKLEEERRSEDAQSKAALTDWLRAKASFVIEGLKEADKDEFCRCELKLQKWYGDLRGKPFAIEAENSILDISGFSKQYNCAFIWQKDGVKKLNLYLIINYFKGGKLRFKKIKPEAFEANRFYTVINKKSGEIVPMEVNFNFDDPNLIILPLAFGKRFGREFIWNDLLSLETGSLKLANGRVIEKTLYNRRTRQDEPALFVALTFERREVLDSSNIKPMNLIGVDRGENIPAVIALTDPEGCPLSRFKDSLGNPTHILRIGESYKEKQRTIQAKKEVEQRRAGGYSRKYASKAKNLADDMVRNTARDLLYYAVTQDAMLIFENLSRGFGRQGKRTFMAERQYTRMEDWLTAKLAYEGLPSKTYLSKTLAQYTSKTCSNCGFTITSADYDRVLEKLKKTATGWMTTINGKELKVEGQITYYNRYKRQNVVKDLSVELDRLSEESVNNDISSWTKGRSGEALSLLKKRFSHRPVQEKFVCLNCGFETHADEQAALNIARSWLFLRSQEYKKYQTNKTTGNTDKRAFVETWQSFYRKKLKEVWKPAV

SEQ ID NO: 44907 - protein, 978 aa, synthetic construct
  REGION 1..978: note = engineered CasX variant
QEIKRINKIRRRLVKDSNTKKAGKTGPMKTLLVRVMTPDLRERLENLRKKPENIPQPISNTSRANLNKLLTDYTEMKKAILHVYWEEFQKDPVGLMSRVAQPASKKIDQNKLKPEMDEKGNLTTAGFACSQCGQPLFVYKLEQVSEKGKAYTNYFGRCNVAEHEKLILLAQLKPEKDSDEAVTYSLGKFGQRALDFYSIHVTKESTHPVKPLAQIAGNRYASTPVGKALSGACMGTIASFLSKYQDIIIEHQKVVKGNQKRLESLRELAGKENLEYPSVTLPPQPHTKEGVDAYNEVIARVRMWVNLNLWQKLKLSRDDAKPLLRLKGFPSFPLVERQANEVDWWDMVCNVKKLINEKKEDGKVFWQNLAGYKRQEALRPYLSSEEDRKKGKKFARYQLGDLLLHLEKKHGEDWGKVYDEAWERIDKKVEGLSKHIKLEEERRSEDAQSKAALTDWLRAKASFVIEGLKEADKDEFCRCELKLQKWYGDLRGKPFAIEAENSILDISGFSKQYNCAFIWQKDGVKKLNLYLIINYFKGGKLRFKKIKPEAFEANRFYTVINKKSGEIVPMEVNFNFDDPNLIILPLAFGKRFGREFIWNDLLSLETGSLKLANGRVIEKTLYNRRTRQDEPALFVALTFERREVLDSSNIKPMNLIGVDRGENIPAVIALTDPEGCPLSRFKDSLGNPTHILRIGESYKEKQRTIQAKKEVEQRRAGGYSRKYASKAKNLADDMVRNTARDLLYYAVTQDAMLIFENLSRGFGRQGKRTFMAERQYTRMEDWLTAKLAYEGLPSKTYLSKTLAQYTSKTCSNCGFTITSADYDRVLEKLKKTATGWMTTINGKELKVEGQITYYNRYKRQNVVKDLSVELDRLSEESVNNDISSWTKGRSGEALSLLKKRFSHRPVQEKFVCLNCGFETHADEQAALNIARSWLFLRSQEYKKYQTNKTTGNTDKRAFVETWQSFYRKKLKEVWKPAV

SEQ ID NO: 44908 - protein, 978 aa, synthetic construct
  REGION 1..978: note = engineered CasX variant
QEIKRINKIRRRLVKDSNTKKAGKTGPMKTLLVRVMTPDLRERLENLRKKPENIPQPISNTSRANLNKLLTDYTEMKKAILHVYWEEFQKDPVGLMSRVAQPASKKIDQNKLKPEMDEKGNLTTAGFACSQCGQPLFVYKLEQVSEKGKAYTNYFGRCNVAEHEKLILLAQLKPEKDSDEAVTYSLGKFGQRALDFYSIHVTKESTHPVKPLAQIAGNRYASAPVGKALSGACMGTIASFLSKYQDIIIEHQKVVKGNQKRLESLRELAGKENLEYPSVTLPPQPHTKEGVDAYNEVIARVRMWVNLNLWQKLKLSRDDAKPLLRLKGFPSFPLVERQANEVDWWDMVCNVKKLINEKKEDGKVFWQNLAGYKRQEALRPYLSSEEDRKKGKKFARYQLGDLLLHLEKKHGEDWGKVYDEAWERIDKKVEGLSKHIKLEEERRSEDAQSKAALTDWLRAKASFVIEGLKEADKDEFCRCELKLQKWYGDLRGKPFAIEAENSILDISGFSKQYNCAFIWQKDGVKKLNLYLIINYFKGGKLRFKKIKPEAFEANRFYTVINKKSGEIVPMEVNFNFDDPNLIILPLAFGKRFGREFIWNDLLSLETGSLKLANGRVIEKTLYNRRTRQDEPALFVALTFERREVLDSSNIKPMNLIGVDRGENIPAVIALTDPEGCPLSRFKDSLGNPTHILRIGESYKEKQRTIQAKKEVEQRRAGGYSRKYASKAKNLADDMVRNTARDLLYYAVTQDAMLIFENLSRGFGRQGKRTFMAERQYTRMEDWLTAKLAYEGLPSKTYLSKTLAQYTSKTCSNCGFTITSADYDRVLEKLKKTATGWMTTINGKELKVEGQITYYNRYKRQNVVKDLSVELDRLSEESVNNDISSWTKGRSGEALSLLKKRFSHRPVQEKFVCLNCGFETHADEQAALNIARSWLFLRSQEYKKYQTNKTTGNTDKRAFVETWQSFYRKKLKEVWKPAV

SEQ ID NO: 44909 - protein, 978 aa, synthetic construct
  REGION 1..978: note = engineered CasX variant
QEIKRINKIRRRLVKDSNTKKAGKTGPMKTLLVRVMTPDLRERLENLRKKPENIPQPISNTSRANLNKLLTDYTEMKKAILHVYWEEFQKDPVGLMSRVAQPASKKIDQNKLKPEMDEKGNLTTAGFACSQCGQPLFVYKLEQVSEKGKAYTNYFGRCNVAEHEKLILLAQLKPEKDSDEAVTYSLGKFGQRALDFYSIHVTKESTHPVKPLAQIAGNRYASVPVGKALSGACMGTIASFLSKYQDIIIEHQKVVKGNQKRLESLRELAGKENLEYPSVTLPPQPHTKEGVDAYNEVIARVRMWVNLNLWQKLKLSRDDAKPLLRLKGFPSFPLVERQANEVDWWDMVCNVKKLINEKKEDGKVFWQNLAGYKRQEALRPYLSSEEDRKKGKKFARYQLGDLLLHLEKKHGEDWGKVYDEAWERIDKKVEGLSKHIKLEEERRSEDAQSKAALTDWLRAKASFVIEGLKEADKDEFCRCELKLQKWYGDLRGKPFAIEAENSILDISGFSKQYNCAFIWQKDGVKKLNLYLIINYFKGGKLRFKKIKPEAFEANRFYTVINKKSGEIVPMEVNFNFDDPNLIILPLAFGKRFGREFIWNDLLSLETGSLKLANGRVIEKTLYNRRTRQDEPALFVALTFERREVLDSSNIKPMNLIGVDRGENIPAVIALTDPEGCPLSRFKDSLGNPTHILRIGESYKEKQRTIQAKKEVEQRRAGGYSRKYASKAKNLADDMVRNTARDLLYYAVTQDAMLIFENLSRGFGRQGKRTFMAERQYTRMEDWLTAKLAYEGLPSKTYLSKTLAQYTSKTCSNCGFTITSADYDRVLEKLKKTATGWMTTINGKELKVEGQITYYNRYKRQNVVKDLSVELDRLSEESVNNDISSWTKGRSGEALSLLKKRFSHRPVQEKFVCLNCGFETHADEQAALNIARSWLFLRSQEYKKYQTNKTTGNTDKRAFVETWQSFYRKKLKEVWKPAV

SEQ ID NO: 44910 - protein, 978 aa, synthetic construct
  REGION 1..978: note = engineered CasX variant
QEIKRINKIRRRLVKDSNTKKAGKTGPMKTLLVRVMTPDLRERLENLRKKPENIPQPISNTSRANLNKLLTDYTEMKKAILHVYWEEFQKDPVGLMSRVAQPASKKIDQNKLKPEMDEKGNLTTAGFACSQCGQPLFVYKLEQVSEKGKAYTNYFGRCNVAEHEKLIKLAQLKPEKDSDEAVTYSLGKFGQRALDFYSIHVTKESTHPVKPLAQIAGNRYASGPVGKALSGACMGTIASFLSKYQDIIIEHQKVVKGNQKRLESLRELAGKENLEYPSVTLPPQPHTKEGVDAYNEVIARVRMWVNLNLWQKLKLSRDDAKPLLRLKGFPSFPLVERQANEVDWWDMVCNVKKLINEKKEDGKVFWQNLAGYKRQEALRPYLSSEEDRKKGKKFARYQLGDLLLHLEKKHGEDWGKVYDEAWERIDKKVEGLSKHIKLEEERRSEDAQSKAALTDWLRAKASFVIEGLKEADKDEFCRCELKLQKWYGDLRGKPFAIEAENSILDISGFSKQYNCAFIWQKDGVKKLNLYLIINYFKGGKLRFKKIKPEAFEANRFYTVINKKSGEIVPMEVNFNFDDPNLIILPLAFGKRFGREFIWNDLLSLETGSLKLANGRVIEKTLYNRRTRQDEPALFVALTFERREVLDSSNIKPMNLIGVDRGENIPAVIALTDPEGCPLSRFKDSLGNPTHILRIGESYKEKQRTIQAKKEVEQRRAGGYSRKYASKAKNLADDMVRNTARDLLYYAVTQDAMLIFENLSRGFGRQGKRTFMAERQYTRMEDWLTAKLAYEGLPSKTYLSKTLAQYTSKTCSNCGFTITSADYDRVLEKLKKTATGWMTTINGKELKVEGQITYYNRYKRQNVVKDLSVELDRLSEESVNNDISSWTKGRSGEALSLLKKRFSHRPVQEKFVCLNCGFETHADEQAALNIARSWLFLRSQEYKKYQTNKTTGNTDKRAFVETWQSFYRKKLKEVWKPAV

SEQ ID NO: 44911 - protein, 977 aa, synthetic construct
  REGION 1..977: note = engineered CasX variant
QEIKRINKIRRRLVKDSNTKKAGKTGPMKTLLVRVMTPDLRERLENLRKKPENIPQPISNTSRANLNKLLTDYTEMKKAILHVYWEEFQKDPVGLMSRVAQPASKKIDQNKLKPEMDEKGNLTTAGFACSQCGQPLFVYKLEQVSEKGKAYTNYFGRCNVAEHEKLILLAQLKPEKDSDEAVTYSLGKFGQRALDFYSIHVTKESTHPVKPLAQIAGNRYASPVGKALSGACMGTIASFLSKYQDIIIEHQKVVKGNQKRLESLRELAGKENLEYPSVTLPPQPHTKEGVDAYNEVIARVRMWVNLNLWQKLKLSRDDAKPLLRLKGFPSFPLVERQANEVDWWDMVCNVKKLINEKKEDGKVFWQNLAGYKRQEALRPYLSSEEDRKKGKKFARYQLGDLLLHLEKKHGEDWGKVYDEAWERIDKKVEGLSKHIKLEEERRSEDAQSKAALTDWLRAKASFVIEGLKEADKDEFCRCELKLQKWYGDLRGKPFAIEAENSILDISGFSKQYNCAFIWQKDGVKKLNLYLIINYFKGGKLRFKKIKPEAFEANRFYTVINKKSGEIVPMEVNFNFDDPNLIILPLAFGKRFGREFIWNDLLSLETGSLKLANGRVIEKTLYNRRTRQDEPALFVALTFERREVLDSSNIKPMNLIGVDRGENIPAVIALTDPEGCPLSRFKDSLGNPTHILRIGESYKEKQRTIQAKKEVEQRRAGGYSRKYASKAKNLADDMVRNTARDLLYYAVTQDAMLIFENLSRGFGRQGKRTFMAERQYTRMEDWLTAKLAYEGLPSKTYLSKTLAQYTSKTCSNCGFTITSADYDRVLEKLKKTATGWMTTINGKELKVEGQITYYNRYKRQNVVKDLSVELDRLSEESVNNDISSWTKGRSGEALSLLKKRFSHRPVQEKFVCLNCGFETHADEQAALNIARSWLFLRSQEYKKYQTNKTTGNTDKRAFVETWQSFYRKKLKEVWKPAV

SEQ ID NO: 44912 - protein, 978 aa, synthetic construct
  REGION 1..978: note = engineered CasX variant
QEIKRINKIRRRLVKDSNTKKAGKTGPMKTLLVRVMTPDLRERLENLRKKPENIPQPISNTSRANLNKLLTDYTEMKKAILHVYWEEFQKDPVGLMSRVAQPASKKIDQNKLKPEMDEKGNLTTAGFACSQCGQPLFVYKLEQVSEKGKAYTNYFGRCNVAEHEKLILLAQLKPEKDSDEAVTYSLGKFGQRALDFYSIHVTKESTHPVKPLAQIAGNRYASYPVGKALSDACMGTIASFLSKYQDIIIEHQKVVKGNQKRLESLRELAGKENLEYPSVTLPPQPHTKEGVDAYNEVIARVRMWVNLNLWQKLKLSRDDAKPLLRLKNFPSFPLVERQANEVDWWDMVCNVKKLINEKKEDGKVFWQNLAGYKRQEALRPYLSSEEDRKKGKKFARYQLGDLLLHLEKKHGEDWGKVYDEAWERIDKKVEGLSKHIKLEEERRSEDAQSKAALTDWLRAKASFVIEGLKEADKDEFCRCELKLQKWYGDLRGKPFAIEAENSILDISGFSKQYNCAFIWQKDGVKKLNLYLIINYFKGGKLRFKKIKPEAFEANRFYTVINKKSGEIVPMEVNFNFDDPNLIILPLAFGKRFGREFIWNDLLSLETGSLKLANGRVIEKTLYNRRTRQDEPALFVALTFERREVLDSSNIKPMNLIGVDRGENIPAVIALTDPEGCPLSRFKDSLGNPTHILRIGESYKEKQRTIQAKKEVEQRRAGGYSRKYASKAKNLADDMVRNTARDLLYYAVTQDAMLIFENLSRGFGRQGKRTFMAERQYTRMEDWLTAKLAYEGLPSKTYLSKTLAQYTSKTCSNCGFTITSADYDRVLEKLKKTATGWMTTINGKELKVEGQITYYNRYKRQNVVKDLSVELDRLSEESVNNDISSWTKGRSGEALSLLKKRFSHRPVQEKFVCLNCGFETHADEQAALNIARSWLFLRSQEYKKYQTNKTTGNTDKRAFVETWQSFYRKKLKEVWKPAV

SEQ ID NO: 44913 - protein, 978 aa, synthetic construct
  REGION 1..978: note = engineered CasX variant
QEIKRINKIRRRLVKDSNTKKAGKTGPMKTLLVRVMTPDLRERLENLRKKPENIPQPISNTSRANLNKLLTDYTEMKKAILHVYWEEFQKDPVGLMSRVAQPASKKIDQNKLKPEMDEKGNLTTAGFACSQCGQPLFVYKLEQVSEKGKAYTNYFGRCNVAEHEKLILLAQLKPEKDSDEAVTYSLGKFGQRALDFYSIHVTKESTHPVKPLAQIAGNRYASHPVGKALSDACMGTIASFLSKYQDIIIEHQKVVKGNQKRLESLRELAGKENLEYPSVTLPPQPHTKEGVDAYNEVIARVRMWVNLNLWQKLKLSRDDAKPLLRLKNFPSFPLVERQANEVDWWDMVCNVKKLINEKKEDGKVFWQNLAGYKRQEALRPYLSSEEDRKKGKKFARYQLGDLLLHLEKKHGEDWGKVYDEAWERIDKKVEGLSKHIKLEEERRSEDAQSKAALTDWLRAKASFVIEGLKEADKDEFCRCELKLQKWYGDLRGKPFAIEAENSILDISGFSKQYNCAFIWQKDGVKKLNLYLIINYFKGGKLRFKKIKPEAFEANRFYTVINKKSGEIVPMEVNFNFDDPNLIILPLAFGKRFGREFIWNDLLSLETGSLKLANGRVIEKTLYNRRTRQDEPALFVALTFERREVLDSSNIKPMNLIGVDRGENIPAVIALTDPEGCPLSRFKDSLGNPTHILRIGESYKEKQRTIQAKKEVEQRRAGGYSRKYASKAKNLADDMVRNTARDLLYYAVTQDAMLIFENLSRGFGRQGKRTFMAERQYTRMEDWLTAKLAYEGLPSKTYLSKTLAQYTSKTCSNCGFTITSADYDRVLEKLKKTATGWMTTINGKELKVEGQITYYNRYKRQNVVKDLSVELDRLSEESVNNDISSWTKGRSGEALSLLKKRFSHRPVQEKFVCLNCGFETHADEQAALNIARSWLFLRSQEYKKYQTNKTTGNTDKRAFVETWQSFYRKKLKEVWKPAV

SEQ ID NO: 44914 - protein, 978 aa, synthetic construct
  REGION 1..978: note = engineered CasX variant
QEIKRINKIRRRLVKDSNTKKAGKTGPMKTLLVRVMTPDLRERLENLRKKPENIPQPISNTSRANLNKLLTDYTEMKKAILHVYWEEFQKDPVGLMSRVAQPASKKIDQNKLKPEMDEKGNLTTAGFACSQCGQPLFVYKLEQVSEKGKAYTNYFGRCNVAEHEKLILLAQLKPEKDSDEAVTYSLGKFGQRALDFYSIHVTKESTHPVKPLAQIAGNRYASSPVGKALSDACMGTIASFLSKYQDIIIEHQKVVKGNQKRLESLRELAGKENLEYPSVTLPPQPHTKEGVDAYNEVIARVRMWVNLNLWQKLKLSRDDAKPLLRLKNFPSFPLVERQANEVDWWDMVCNVKKLINEKKEDGKVFWQNLAGYKRQEALRPYLSSEEDRKKGKKFARYQLGDLLLHLEKKHGEDWGKVYDEAWERIDKKVEGLSKHIKLEEERRSEDAQSKAALTDWLRAKASFVIEGLKEADKDEFCRCELKLQKWYGDLRGKPFAIEAENSILDISGFSKQYNCAFIWQKDGVKKLNLYLIINYFKGGKLRFKKIKPEAFEANRFYTVINKKSGEIVPMEVNFNFDDPNLIILPLAFGKRFGREFIWNDLLSLETGSLKLANGRVIEKTLYNRRTRQDEPALFVALTFERREVLDSSNIKPMNLIGVDRGENIPAVIALTDPEGCPLSRFKDSLGNPTHILRIGESYKEKQRTIQAKKEVEQRRAGGYSRKYASKAKNLADDMVRNTARDLLYYAVTQDAMLIFENLSRGFGRQGKRTFMAERQYTRMEDWLTAKLAYEGLPSKTYLSKTLAQYTSKTCSNCGFTITSADYDRVLEKLKKTATGWMTTINGKELKVEGQITYYNRYKRQNVVKDLSVELDRLSEESVNNDISSWTKGRSGEALSLLKKRFSHRPVQEKFVCLNCGFETHADEQAALNIARSWLFLRSQEYKKYQTNKTTGNTDKRAFVETWQSFYRKKLKEVWKPAV

SEQ ID NO: 44915 - protein, 978 aa, synthetic construct
  REGION 1..978: note = engineered CasX variant
QEIKRINKIRRRLVKDSNTKKAGKTGPMKTLLVRVMTPDLRERLENLRKKPENIPQPISNTSRANLNKLLTDYTEMKKAILHVYWEEFQKDPVGLMSRVAQPASKKIDQNKLKPEMDEKGNLTTAGFACSQCGQPLFVYKLEQVSEKGKAYTNYFGRCNVAEHEKLILLAQLKPEKDSDEAVTYSLGKFGQRALDFYSIHVTKESTHPVKPLAQIAGNRYASTPVGKALSDACMGTIASFLSKYQDIIIEHQKVVKGNQKRLESLRELAGKENLEYPSVTLPPQPHTKEGVDAYNEVIARVRMWVNLNLWQKLKLSRDDAKPLLRLKNFPSFPLVERQANEVDWWDMVCNVKKLINEKKEDGKVFWQNLAGYKRQEALRPYLSSEEDRKKGKKFARYQLGDLLLHLEKKHGEDWGKVYDEAWERIDKKVEGLSKHIKLEEERRSEDAQSKAALTDWLRAKASFVIEGLKEADKDEFCRCELKLQKWYGDLRGKPFAIEAENSILDISGFSKQYNCAFIWQKDGVKKLNLYLIINYFKGGKLRFKKIKPEAFEANRFYTVINKKSGEIVPMEVNFNFDDPNLIILPLAFGKRFGREFIWNDLLSLETGSLKLANGRVIEKTLYNRRTRQDEPALFVALTFERREVLDSSNIKPMNLIGVDRGENIPAVIALTDPEGCPLSRFKDSLGNPTHILRIGESYKEKQRTIQAKKEVEQRRAGGYSRKYASKAKNLADDMVRNTARDLLYYAVTQDAMLIFENLSRGFGRQGKRTFMAERQYTRMEDWLTAKLAYEGLPSKTYLSKTLAQYTSKTCSNCGFTITSADYDRVLEKLKKTATGWMTTINGKELKVEGQITYYNRYKRQNVVKDLSVELDRLSEESVNNDISSWTKGRSGEALSLLKKRFSHRPVQEKFVCLNCGFETHADEQAALNIARSWLFLRSQEYKKYQTNKTTGNTDKRAFVETWQSFYRKKLKEVWKPAV

SEQ ID NO: 44916 - protein, 978 aa, synthetic construct
  REGION 1..978: note = engineered CasX variant
QEIKRINKIRRRLVKDSNTKKAGKTGPMKTLLVRVMTPDLRERLENLRKKPENIPQPISNTSRANLNKLLTDYTEMKKAILHVYWEEFQKDPVGLMSRVAQPASKKIDQNKLKPEMDEKGNLTTAGFACSQCGQPLFVYKLEQVSEKGKAYTNYFGRCNVAEHEKLILLAQLKPEKDSDEAVTYSLGKFGQRALDFYSIHVTKESTHPVKPLAQIAGNRYASAPVGKALSDACMGTIASFLSKYQDIIIEHQKVVKGNQKRLESLRELAGKENLEYPSVTLPPQPHTKEGVDAYNEVIARVRMWVNLNLWQKLKLSRDDAKPLLRLKNFPSFPLVERQANEVDWWDMVCNVKKLINEKKEDGKVFWQNLAGYKRQEALRPYLSSEEDRKKGKKFARYQLGDLLLHLEKKHGEDWGKVYDEAWERIDKKVEGLSKHIKLEEERRSEDAQSKAALTDWLRAKASFVIEGLKEADKDEFCRCELKLQKWYGDLRGKPFAIEAENSILDISGFSKQYNCAFIWQKDGVKKLNLYLIINYFKGGKLRFKKIKPEAFEANRFYTVINKKSGEIVPMEVNFNFDDPNLIILPLAFGKRFGREFIWNDLLSLETGSLKLANGRVIEKTLYNRRTRQDEPALFVALTFERREVLDSSNIKPMNLIGVDRGENIPAVIALTDPEGCPLSRFKDSLGNPTHILRIGESYKEKQRTIQAKKEVEQRRAGGYSRKYASKAKNLADDMVRNTARDLLYYAVTQDAMLIFENLSRGFGRQGKRTFMAERQYTRMEDWLTAKLAYEGLPSKTYLSKTLAQYTSKTCSNCGFTITSADYDRVLEKLKKTATGWMTTINGKELKVEGQITYYNRYKRQNVVKDLSVELDRLSEESVNNDISSWTKGRSGEALSLLKKRFSHRPVQEKFVCLNCGFETHADEQAALNIARSWLFLRSQEYKKYQTNKTTGNTDKRAFVETWQSFYRKKLKEVWKPAV

SEQ ID NO: 44917 - protein, 978 aa, synthetic construct
  REGION 1..978: note = engineered CasX variant
QEIKRINKIRRRLVKDSNTKKAGKTGPMKTLLVRVMTPDLRERLENLRKKPENIPQPISNTSRANLNKLLTDYTEMKKAILHVYWEEFQKDPVGLMSRVAQPASKKIDQNKLKPEMDEKGNLTTAGFACSQCGQPLFVYKLEQVSEKGKAYTNYFGRCNVAEHEKLILLAQLKPEKDSDEAVTYSLGKFGQRALDFYSIHVTKESTHPVKPLAQIAGNRYASVPVGKALSDACMGTIASFLSKYQDIIIEHQKVVKGNQKRLESLRELAGKENLEYPSVTLPPQPHTKEGVDAYNEVIARVRMWVNLNLWQKLKLSRDDAKPLLRLKNFPSFPLVERQANEVDWWDMVCNVKKLINEKKEDGKVFWQNLAGYKRQEALRPYLSSEEDRKKGKKFARYQLGDLLLHLEKKHGEDWGKVYDEAWERIDKKVEGLSKHIKLEEERRSEDAQSKAALTDWLRAKASFVIEGLKEADKDEFCRCELKLQKWYGDLRGKPFAIEAENSILDISGFSKQYNCAFIWQKDGVKKLNLYLIINYFKGGKLRFKKIKPEAFEANRFYTVINKKSGEIVPMEVNFNFDDPNLIILPLAFGKRFGREFIWNDLLSLETGSLKLANGRVIEKTLYNRRTRQDEPALFVALTFERREVLDSSNIKPMNLIGVDRGENIPAVIALTDPEGCPLSRFKDSLGNPTHILRIGESYKEKQRTIQAKKEVEQRRAGGYSRKYASKAKNLADDMVRNTARDLLYYAVTQDAMLIFENLSRGFGRQGKRTFMAERQYTRMEDWLTAKLAYEGLPSKTYLSKTLAQYTSKTCSNCGFTITSADYDRVLEKLKKTATGWMTTINGKELKVEGQITYYNRYKRQNVVKDLSVELDRLSEESVNNDISSWTKGRSGEALSLLKKRFSHRPVQEKFVCLNCGFETHADEQAALNIARSWLFLRSQEYKKYQTNKTTGNTDKRAFVETWQSFYRKKLKEVWKPAV

SEQ ID NO: 44918 - protein, 978 aa, synthetic construct
  REGION 1..978: note = engineered CasX variant
QEIKRINKIRRRLVKDSNTKKAGKTGPMKTLLVRVMTPDLRERLENLRKKPENIPQPISNTSRANLNKLLTDYTEMKKAILHVYWEEFQKDPVGLMSRVAQPASKKIDQNKLKPEMDEKGNLTTAGFACSQCGQPLFVYKLEQVSEKGKAYTNYFGRCNVAEHEKLIKLAQLKPEKDSDEAVTYSLGKFGQRALDFYSIHVTKESTHPVKPLAQIAGNRYASGPVGKALSDACMGTIASFLSKYQDIIIEHQKVVKGNQKRLESLRELAGKENLEYPSVTLPPQPHTKEGVDAYNEVIARVRMWVNLNLWQKLKLSRDDAKPLLRLKNFPSFPLVERQANEVDWWDMVCNVKKLINEKKEDGKVFWQNLAGYKRQEALRPYLSSEEDRKKGKKFARYQLGDLLLHLEKKHGEDWGKVYDEAWERIDKKVEGLSKHIKLEEERRSEDAQSKAALTDWLRAKASFVIEGLKEADKDEFCRCELKLQKWYGDLRGKPFAIEAENSILDISGFSKQYNCAFIWQKDGVKKLNLYLIINYFKGGKLRFKKIKPEAFEANRFYTVINKKSGEIVPMEVNFNFDDPNLIILPLAFGKRFGREFIWNDLLSLETGSLKLANGRVIEKTLYNRRTRQDEPALFVALTFERREVLDSSNIKPMNLIGVDRGENIPAVIALTDPEGCPLSRFKDSLGNPTHILRIGESYKEKQRTIQAKKEVEQRRAGGYSRKYASKAKNLADDMVRNTARDLLYYAVTQDAMLIFENLSRGFGRQGKRTFMAERQYTRMEDWLTAKLAYEGLPSKTYLSKTLAQYTSKTCSNCGFTITSADYDRVLEKLKKTATGWMTTINGKELKVEGQITYYNRYKRQNVVKDLSVELDRLSEESVNNDISSWTKGRSGEALSLLKKRFSHRPVQEKFVCLNCGFETHADEQAALNIARSWLFLRSQEYKKYQTNKTTGNTDKRAFVETWQSFYRKKLKEVWKPAV

SEQ ID NO: 44919 - protein, 977 aa, synthetic construct
  REGION 1..977: note = engineered CasX variant
QEIKRINKIRRRLVKDSNTKKAGKTGPMKTLLVRVMTPDLRERLENLRKKPENIPQPISNTSRANLNKLLTDYTEMKKAILHVYWEEFQKDPVGLMSRVAQPASKKIDQNKLKPEMDEKGNLTTAGFACSQCGQPLFVYKLEQVSEKGKAYTNYFGRCNVAEHEKLILLAQLKPEKDSDEAVTYSLGKFGQRALDFYSIHVTKESTHPVKPLAQIAGNRYASPVGKALSDACMGTIASFLSKYQDIIIEHQKVVKGNQKRLESLRELAGKENLEYPSVTLPPQPHTKEGVDAYNEVIARVRMWVNLNLWQKLKLSRDDAKPLLRLKNFPSFPLVERQANEVDWWDMVCNVKKLINEKKEDGKVFWQNLAGYKRQEALRPYLSSEEDRKKGKKFARYQLGDLLLHLEKKHGEDWGKVYDEAWERIDKKVEGLSKHIKLEEERRSEDAQSKAALTDWLRAKASFVIEGLKEADKDEFCRCELKLQKWYGDLRGKPFAIEAENSILDISGFSKQYNCAFIWQKDGVKKLNLYLIINYFKGGKLRFKKIKPEAFEANRFYTVINKKSGEIVPMEVNFNFDDPNLIILPLAFGKRFGREFIWNDLLSLETGSLKLANGRVIEKTLYNRRTRQDEPALFVALTFERREVLDSSNIKPMNLIGVDRGENIPAVIALTDPEGCPLSRFKDSLGNPTHILRIGESYKEKQRTIQAKKEVEQRRAGGYSRKYASKAKNLADDMVRNTARDLLYYAVTQDAMLIFENLSRGFGRQGKRTFMAERQYTRMEDWLTAKLAYEGLPSKTYLSKTLAQYTSKTCSNCGFTITSADYDRVLEKLKKTATGWMTTINGKELKVEGQITYYNRYKRQNVVKDLSVELDRLSEESVNNDISSWTKGRSGEALSLLKKRFSHRPVQEKFVCLNCGFETHADEQAALNIARSWLFLRSQEYKKYQTNKTTGNTDKRAFVETWQSFYRKKLKEVWKPAV

SEQ ID NO: 44920 - protein, 978 aa, synthetic construct
  REGION 1..978: note = engineered CasX variant
QEIKRINKIRRRLVKDSNTKKAGKTGPMKTLLVRVMTPDLRERLENLRKKPENIPQPISNTSRANLNKLLTDYTEMKKAILHVYWEEFQKDPVGLMSRVAQPASKKIDQNKLKPEMDEKGNLTTAGFACSQCGQPLFVYKLEQVSEKGKAYTNYFGRCNVAEHEKLILLAQLKPEKDSDEAVTYSLGKFGQRALDFYSIHVTKESTHPVKPLAQIAGNRYASYPVGKALSDACMGTIASFLSKYQDIIIEHQKVVKGNQKRLESLRELAGKENLEYPSVTLPPQPHTKEGVDAYNEVIARVRMWVNLNLWQKLKLSRDDAKPLLRLKGFPSFPLVERQANEVDWWDMVCNVKKLINEKKEDGKVFWQNLAGYKRQEALRPYLSSEEDRKKGKKFARYQLGDLLNHLEKKHGEDWGKVYDEAWERIDKKVEGLSKHIKLEEERRSEDAQSKAALTDWLRAKASFVIEGLKEADKDEFCRCELKLQKWYGDLRGKPFAIEAENSILDISGFSKQYNCAFIWQKDGVKKLNLYLIINYFKGGKLRFKKIKPEAFEANRFYTVINKKSGEIVPMEVNFNFDDPNLIILPLAFGKRFGREFIWNDLLSLETGSLKLANGRVIEKTLYNRRTRQDEPALFVALTFERREVLDSSNIKPMNLIGVDRGENIPAVIALTDPEGCPLSRFKDSLGNPTHILRIGESYKEKQRTIQAKKEVEQRRAGGYSRKYASKAKNLADDMVRNTARDLLYYAVTQDAMLIFENLSRGFGRQGKRTFMAERQYTRMEDWLTAKLAYEGLPSKTYLSKTLAQYTSKTCSNCGFTITSADYDRVLEKLKKTATGWMTTINGKELKVEGQITYYNRYKRQNVVKDLSVELDRLSEESVNNDISSWTKGRSGEALSLLKKRFSHRPVQEKFVCLNCGFETHADEQAALNIARSWLFLRSQEYKKYQTNKTTGNTDKRAFVETWQSFYRKKLKEVWKPAV

SEQ ID NO: 44921 - protein, 978 aa, synthetic construct
  REGION 1..978: note = engineered CasX variant
QEIKRINKIRRRLVKDSNTKKAGKTGPMKTLLVRVMTPDLRERLENLRKKPENIPQPISNTSRANLNKLLTDYTEMKKAILHVYWEEFQKDPVGLMSRVAQPASKKIDQNKLKPEMDEKGNLTTAGFACSQCGQPLFVYKLEQVSEKGKAYTNYFGRCNVAEHEKLILLAQLKPEKDSDEAVTYSLGKFGQRALDFYSIHVTKESTHPVKPLAQIAGNRYASHPVGKALSDACMGTIASFLSKYQDIIIEHQKVVKGNQKRLESLRELAGKENLEYPSVTLPPQPHTKEGVDAYNEVIARVRMWVNLNLWQKLKLSRDDAKPLLRLKGFPSFPLVERQANEVDWWDMVCNVKKLINEKKEDGKVFWQNLAGYKRQEALRPYLSSEEDRKKGKKFARYQLGDLLNHLEKKHGEDWGKVYDEAWERIDKKVEGLSKHIKLEEERRSEDAQSKAALTDWLRAKASFVIEGLKEADKDEFCRCELKLQKWYGDLRGKPFAIEAENSILDISGFSKQYNCAFIWQKDGVKKLNLYLIINYFKGGKLRFKKIKPEAFEANRFYTVINKKSGEIVPMEVNFNFDDPNLIILPLAFGKRFGREFIWNDLLSLETGSLKLANGRVIEKTLYNRRTRQDEPALFVALTFERREVLDSSNIKPMNLIGVDRGENIPAVIALTDPEGCPLSRFKDSLGNPTHILRIGESYKEKQRTIQAKKEVEQRRAGGYSRKYASKAKNLADDMVRNTARDLLYYAVTQDAMLIFENLSRGFGRQGKRTFMAERQYTRMEDWLTAKLAYEGLPSKTYLSKTLAQYTSKTCSNCGFTITSADYDRVLEKLKKTATGWMTTINGKELKVEGQITYYNRYKRQNVVKDLSVELDRLSEESVNNDISSWTKGRSGEALSLLKKRFSHRPVQEKFVCLNCGFETHADEQAALNIARSWLFLRSQEYKKYQTNKTTGNTDKRAFVETWQSFYRKKLKEVWKPAV

SEQ ID NO: 44922 - protein, 978 aa, synthetic construct
  REGION 1..978: note = engineered CasX variant
QEIKRINKIRRRLVKDSNTKKAGKTGPMKTLLVRVMTPDLRERLENLRKKPENIPQPISNTSRANLNKLLTDYTEMKKAILHVYWEEFQKDPVGLMSRVAQPASKKIDQNKLKPEMDEKGNLTTAGFACSQCGQPLFVYKLEQVSEKGKAYTNYFGRCNVAEHEKLILLAQLKPEKDSDEAVTYSLGKFGQRALDFYSIHVTKESTHPVKPLAQIAGNRYASSPVGKALSDACMGTIASFLSKYQDIIIEHQKVVKGNQKRLESLRELAGKENLEYPSVTLPPQPHTKEGVDAYNEVIARVRMWVNLNLWQKLKLSRDDAKPLLRLKGFPSFPLVERQANEVDWWDMVCNVKKLINEKKEDGKVFWQNLAGYKRQEALRPYLSSEEDRKKGKKFARYQLGDLLNHLEKKHGEDWGKVYDEAWERIDKKVEGLSKHIKLEEERRSEDAQSKAALTDWLRAKASFVIEGLKEADKDEFCRCELKLQKWYGDLRGKPFAIEAENSILDISGFSKQYNCAFIWQKDGVKKLNLYLIINYFKGGKLRFKKIKPEAFEANRFYTVINKKSGEIVPMEVNFNFDDPNLIILPLAFGKRFGREFIWNDLLSLETGSLKLANGRVIEKTLYNRRTRQDEPALFVALTFERREVLDSSNIKPMNLIGVDRGENIPAVIALTDPEGCPLSRFKDSLGNPTHILRIGESYKEKQRTIQAKKEVEQRRAGGYSRKYASKAKNLADDMVRNTARDLLYYAVTQDAMLIFENLSRGFGRQGKRTFMAERQYTRMEDWLTAKLAYEGLPSKTYLSKTLAQYTSKTCSNCGFTITSADYDRVLEKLKKTATGWMTTINGKELKVEGQITYYNRYKRQNVVKDLSVELDRLSEESVNNDISSWTKGRSGEALSLLKKRFSHRPVQEKFVCLNCGFETHADEQAALNIARSWLFLRSQEYKKYQTNKTTGNTDKRAFVETWQSFYRKKLKEVWKPAV

SEQ ID NO: 44923 - protein, 978 aa, synthetic construct
  REGION 1..978: note = engineered CasX variant
QEIKRINKIRRRLVKDSNTKKAGKTGPMKTLLVRVMTPDLRERLENLRKKPENIPQPISNTSRANLNKLLTDYTEMKKAILHVYWEEFQKDPVGLMSRVAQPASKKIDQNKLKPEMDEKGNLTTAGFACSQCGQPLFVYKLEQVSEKGKAYTNYFGRCNVAEHEKLILLAQLKPEKDSDEAVTYSLGKFGQRALDFYSIHVTKESTHPVKPLAQIAGNRYASTPVGKALSDACMGTIASFLSKYQDIIIEHQKVVKGNQKRLESLRELAGKENLEYPSVTLPPQPHTKEGVDAYNEVIARVRMWVNLNLWQKLKLSRDDAKPLLRLKGFPSFPLVERQANEVDWWDMVCNVKKLINEKKEDGKVFWQNLAGYKRQEALRPYLSSEEDRKKGKKFARYQLGDLLNHLEKKHGEDWGKVYDEAWERIDKKVEGLSKHIKLEEERRSEDAQSKAALTDWLRAKASFVIEGLKEADKDEFCRCELKLQKWYGDLRGKPFAIEAENSILDISGFSKQYNCAFIWQKDGVKKLNLYLIINYFKGGKLRFKKIKPEAFEANRFYTVINKKSGEIVPMEVNFNFDDPNLIILPLAFGKRFGREFIWNDLLSLETGSLKLANGRVIEKTLYNRRTRQDEPALFVALTFERREVLDSSNIKPMNLIGVDRGENIPAVIALTDPEGCPLSRFKDSLGNPTHILRIGESYKEKQRTIQAKKEVEQRRAGGYSRKYASKAKNLADDMVRNTARDLLYYAVTQDAMLIFENLSRGFGRQGKRTFMAERQYTRMEDWLTAKLAYEGLPSKTYLSKTLAQYTSKTCSNCGFTITSADYDRVLEKLKKTATGWMTTINGKELKVEGQITYYNRYKRQNVVKDLSVELDRLSEESVNNDISSWTKGRSGEALSLLKKRFSHRPVQEKFVCLNCGFETHADEQAALNIARSWLFLRSQEYKKYQTNKTTGNTDKRAFVETWQSFYRKKLKEVWKPAV

SEQ ID NO: 44924 - protein, 978 aa, synthetic construct
  REGION 1..978: note = engineered CasX variant
QEIKRINKIRRRLVKDSNTKKAGKTGPMKTLLVRVMTPDLRERLENLRKKPENIPQPISNTSRANLNKLLTDYTEMKKAILHVYWEEFQKDPVGLMSRVAQPASKKIDQNKLKPEMDEKGNLTTAGFACSQCGQPLFVYKLEQVSEKGKAYTNYFGRCNVAEHEKLILLAQLKPEKDSDEAVTYSLGKFGQRALDFYSIHVTKESTHPVKPLAQIAGNRYASAPVGKALSDACMGTIASFLSKYQDIIIEHQKVVKGNQKRLESLRELAGKENLEYPSVTLPPQPHTKEGVDAYNEVIARVRMWVNLNLWQKLKLSRDDAKPLLRLKGFPSFPLVERQANEVDWWDMVCNVKKLINEKKEDGKVFWQNLAGYKRQEALRPYLSSEEDRKKGKKFARYQLGDLLNHLEKKHGEDWGKVYDEAWERIDKKVEGLSKHIKLEEERRSEDAQSKAALTDWLRAKASFVIEGLKEADKDEFCRCELKLQKWYGDLRGKPFAIEAENSILDISGFSKQYNCAFIWQKDGVKKLNLYLIINYFKGGKLRFKKIKPEAFEANRFYTVINKKSGEIVPMEVNFNFDDPNLIILPLAFGKRFGREFIWNDLLSLETGSLKLANGRVIEKTLYNRRTRQDEPALFVALTFERREVLDSSNIKPMNLIGVDRGENIPAVIALTDPEGCPLSRFKDSLGNPTHILRIGESYKEKQRTIQAKKEVEQRRAGGYSRKYASKAKNLADDMVRNTARDLLYYAVTQDAMLIFENLSRGFGRQGKRTFMAERQYTRMEDWLTAKLAYEGLPSKTYLSKTLAQYTSKTCSNCGFTITSADYDRVLEKLKKTATGWMTTINGKELKVEGQITYYNRYKRQNVVKDLSVELDRLSEESVNNDISSWTKGRSGEALSLLKKRFSHRPVQEKFVCLNCGFETHADEQAALNIARSWLFLRSQEYKKYQTNKTTGNTDKRAFVETWQSFYRKKLKEVWKPAV

SEQ ID NO: 44925 - protein, 978 aa, synthetic construct
  REGION 1..978: note = engineered CasX variant
QEIKRINKIRRRLVKDSNTKKAGKTGPMKTLLVRVMTPDLRERLENLRKKPENIPQPISNTSRANLNKLLTDYTEMKKAILHVYWEEFQKDPVGLMSRVAQPASKKIDQNKLKPEMDEKGNLTTAGFACSQCGQPLFVYKLEQVSEKGKAYTNYFGRCNVAEHEKLILLAQLKPEKDSDEAVTYSLGKFGQRALDFYSIHVTKESTHPVKPLAQIAGNRYASVPVGKALSDACMGTIASFLSKYQDIIIEHQKVVKGNQKRLESLRELAGKENLEYPSVTLPPQPHTKEGVDAYNEVIARVRMWVNLNLWQKLKLSRDDAKPLLRLKGFPSFPLVERQANEVDWWDMVCNVKKLINEKKEDGKVFWQNLAGYKRQEALRPYLSSEEDRKKGKKFARYQLGDLLNHLEKKHGEDWGKVYDEAWERIDKKVEGLSKHIKLEEERRSEDAQSKAALTDWLRAKASFVIEGLKEADKDEFCRCELKLQKWYGDLRGKPFAIEAENSILDISGFSKQYNCAFIWQKDGVKKLNLYLIINYFKGGKLRFKKIKPEAFEANRFYTVINKKSGEIVPMEVNFNFDDPNLIILPLAFGKRFGREFIWNDLLSLETGSLKLANGRVIEKTLYNRRTRQDEPALFVALTFERREVLDSSNIKPMNLIGVDRGENIPAVIALTDPEGCPLSRFKDSLGNPTHILRIGESYKEKQRTIQAKKEVEQRRAGGYSRKYASKAKNLADDMVRNTARDLLYYAVTQDAMLIFENLSRGFGRQGKRTFMAERQYTRMEDWLTAKLAYEGLPSKTYLSKTLAQYTSKTCSNCGFTITSADYDRVLEKLKKTATGWMTTINGKELKVEGQITYYNRYKRQNVVKDLSVELDRLSEESVNNDISSWTKGRSGEALSLLKKRFSHRPVQEKFVCLNCGFETHADEQAALNIARSWLFLRSQEYKKYQTNKTTGNTDKRAFVETWQSFYRKKLKEVWKPAV

SEQ ID NO: 44926 - protein, 978 aa, synthetic construct
  REGION 1..978: note = engineered CasX variant
QEIKRINKIRRRLVKDSNTKKAGKTGPMKTLLVRVMTPDLRERLENLRKKPENIPQPISNTSRANLNKLLTDYTEMKKAILHVYWEEFQKDPVGLMSRVAQPASKKIDQNKLKPEMDEKGNLTTAGFACSQCGQPLFVYKLEQVSEKGKAYTNYFGRCNVAEHEKLIKLAQLKPEKDSDEAVTYSLGKFGQRALDFYSIHVTKESTHPVKPLAQIAGNRYASGPVGKALSDACMGTIASFLSKYQDIIIEHQKVVKGNQKRLESLRELAGKENLEYPSVTLPPQPHTKEGVDAYNEVIARVRMWVNLNLWQKLKLSRDDAKPLLRLKGFPSFPLVERQANEVDWWDMVCNVKKLINEKKEDGKVFWQNLAGYKRQEALRPYLSSEEDRKKGKKFARYQLGDLLNHLEKKHGEDWGKVYDEAWERIDKKVEGLSKHIKLEEERRSEDAQSKAALTDWLRAKASFVIEGLKEADKDEFCRCELKLQKWYGDLRGKPFAIEAENSILDISGFSKQYNCAFIWQKDGVKKLNLYLIINYFKGGKLRFKKIKPEAFEANRFYTVINKKSGEIVPMEVNFNFDDPNLIILPLAFGKRFGREFIWNDLLSLETGSLKLANGRVIEKTLYNRRTRQDEPALFVALTFERREVLDSSNIKPMNLIGVDRGENIPAVIALTDPEGCPLSRFKDSLGNPTHILRIGESYKEKQRTIQAKKEVEQRRAGGYSRKYASKAKNLADDMVRNTARDLLYYAVTQDAMLIFENLSRGFGRQGKRTFMAERQYTRMEDWLTAKLAYEGLPSKTYLSKTLAQYTSKTCSNCGFTITSADYDRVLEKLKKTATGWMTTINGKELKVEGQITYYNRYKRQNVVKDLSVELDRLSEESVNNDISSWTKGRSGEALSLLKKRFSHRPVQEKFVCLNCGFETHADEQAALNIARSWLFLRSQEYKKYQTNKTTGNTDKRAFVETWQSFYRKKLKEVWKPAV

SEQ ID NO: 44927 - protein, 977 aa, synthetic construct
  REGION 1..977: note = engineered CasX variant
QEIKRINKIRRRLVKDSNTKKAGKTGPMKTLLVRVMTPDLRERLENLRKKPENIPQPISNTSRANLNKLLTDYTEMKKAILHVYWEEFQKDPVGLMSRVAQPASKKIDQNKLKPEMDEKGNLTTAGFACSQCGQPLFVYKLEQVSEKGKAYTNYFGRCNVAEHEKLILLAQLKPEKDSDEAVTYSLGKFGQRALDFYSIHVTKESTHPVKPLAQIAGNRYASPVGKALSDACMGTIASFLSKYQDIIIEHQKVVKGNQKRLESLRELAGKENLEYPSVTLPPQPHTKEGVDAYNEVIARVRMWVNLNLWQKLKLSRDDAKPLLRLKGFPSFPLVERQANEVDWWDMVCNVKKLINEKKEDGKVFWQNLAGYKRQEALRPYLSSEEDRKKGKKFARYQLGDLLNHLEKKHGEDWGKVYDEAWERIDKKVEGLSKHIKLEEERRSEDAQSKAALTDWLRAKASFVIEGLKEADKDEFCRCELKLQKWYGDLRGKPFAIEAENSILDISGFSKQYNCAFIWQKDGVKKLNLYLIINYFKGGKLRFKKIKPEAFEANRFYTVINKKSGEIVPMEVNFNFDDPNLIILPLAFGKRFGREFIWNDLLSLETGSLKLANGRVIEKTLYNRRTRQDEPALFVALTFERREVLDSSNIKPMNLIGVDRGENIPAVIALTDPEGCPLSRFKDSLGNPTHILRIGESYKEKQRTIQAKKEVEQRRAGGYSRKYASKAKNLADDMVRNTARDLLYYAVTQDAMLIFENLSRGFGRQGKRTFMAERQYTRMEDWLTAKLAYEGLPSKTYLSKTLAQYTSKTCSNCGFTITSADYDRVLEKLKKTATGWMTTINGKELKVEGQITYYNRYKRQNVVKDLSVELDRLSEESVNNDISSWTKGRSGEALSLLKKRFSHRPVQEKFVCLNCGFETHADEQAALNIARSWLFLRSQEYKKYQTNKTTGNTDKRAFVETWQSFYRKKLKEVWKPAV

SEQ ID NO: 44928 - protein, 978 aa, synthetic construct
  REGION 1..978: note = engineered CasX variant
QEIKRINKIRRRLVKDSNTKKAGKTGPMKTLLVRVMTPDLRERLENLRKKPENIPQPISNTSRANLNKLLTDYTEMKKAILHVYWEEFQKDPVGLMSRVAQPASKKIDQNKLKPEMDEKGNLTTAGFACSQCGQPLFVYKLEQVSEKGKAYTNYFGRCNVAEHEKLILLAQLKPEKDSDEAVTYSLGKFGQRALDFYSIHVTKESTHPVKPLAQIAGNRYASYPVGKALSDACMGTIASFLSKYQDIIIEHQKVVKGNQKRLESLRELAGKENLEYPSVTLPPQPHTKEGVDAYNEVIARVRMWVNLNLWQKLKLSRDDAKPLLRLKGFPSFPLVERQANEVDWWDMVCNVKKLINEKKEDGKVFWQNLAGYKRQEALRPYLSSEEDRKKGKKFARYQLGDLLWHLEKKHGEDWGKVYDEAWERIDKKVEGLSKHIKLEEERRSEDAQSKAALTDWLRAKASFVIEGLKEADKDEFCRCELKLQKWYGDLRGKPFAIEAENSILDISGFSKQYNCAFIWQKDGVKKLNLYLIINYFKGGKLRFKKIKPEAFEANRFYTVINKKSGEIVPMEVNFNFDDPNLIILPLAFGKRFGREFIWNDLLSLETGSLKLANGRVIEKTLYNRRTRQDEPALFVALTFERREVLDSSNIKPMNLIGVDRGENIPAVIALTDPEGCPLSRFKDSLGNPTHILRIGESYKEKQRTIQAKKEVEQRRAGGYSRKYASKAKNLADDMVRNTARDLLYYAVTQDAMLIFENLSRGFGRQGKRTFMAERQYTRMEDWLTAKLAYEGLPSKTYLSKTLAQYTSKTCSNCGFTITSADYDRVLEKLKKTATGWMTTINGKELKVEGQITYYNRYKRQNVVKDLSVELDRLSEESVNNDISSWTKGRSGEALSLLKKRFSHRPVQEKFVCLNCGFETHADEQAALNIARSWLFLRSQEYKKYQTNKTTGNTDKRAFVETWQSFYRKKLKEVWKPAV

SEQ ID NO: 44929 - protein, 978 aa, synthetic construct
  REGION 1..978: note = engineered CasX variant
QEIKRINKIRRRLVKDSNTKKAGKTGPMKTLLVRVMTPDLRERLENLRKKPENIPQPISNTSRANLNKLLTDYTEMKKAILHVYWEEFQKDPVGLMSRVAQPASKKIDQNKLKPEMDEKGNLTTAGFACSQCGQPLFVYKLEQVSEKGKAYTNYFGRCNVAEHEKLILLAQLKPEKDSDEAVTYSLGKFGQRALDFYSIHVTKESTHPVKPLAQIAGNRYASHPVGKALSDACMGTIASFLSKYQDIIIEHQKVVKGNQKRLESLRELAGKENLEYPSVTLPPQPHTKEGVDAYNEVIARVRMWVNLNLWQKLKLSRDDAKPLLRLKGFPSFPLVERQANEVDWWDMVCNVKKLINEKKEDGKVFWQNLAGYKRQEALRPYLSSEEDRKKGKKFARYQLGDLLWHLEKKHGEDWGKVYDEAWERIDKKVEGLSKHIKLEEERRSEDAQSKAALTDWLRAKASFVIEGLKEADKDEFCRCELKLQKWYGDLRGKPFAIEAENSILDISGFSKQYNCAFIWQKDGVKKLNLYLIINYFKGGKLRFKKIKPEAFEANRFYTVINKKSGEIVPMEVNFNFDDPNLIILPLAFGKRFGREFIWNDLLSLETGSLKLANGRVIEKTLYNRRTRQDEPALFVALTFERREVLDSSNIKPMNLIGVDRGENIPAVIALTDPEGCPLSRFKDSLGNPTHILRIGESYKEKQRTIQAKKEVEQRRAGGYSRKYASKAKNLADDMVRNTARDLLYYAVTQDAMLIFENLSRGFGRQGKRTFMAERQYTRMEDWLTAKLAYEGLPSKTYLSKTLAQYTSKTCSNCGFTITSADYDRVLEKLKKTATGWMTTINGKELKVEGQITYYNRYKRQNVVKDLSVELDRLSEESVNNDISSWTKGRSGEALSLLKKRFSHRPVQEKFVCLNCGFETHADEQAALNIARSWLFLRSQEYKKYQTNKTTGNTDKRAFVETWQSFYRKKLKEVWKPAV

SEQ ID NO: 44930 - protein, 978 aa, synthetic construct
  REGION 1..978: note = engineered CasX variant
QEIKRINKIRRRLVKDSNTKKAGKTGPMKTLLVRVMTPDLRERLENLRKKPENIPQPISNTSRANLNKLLTDYTEMKKAILHVYWEEFQKDPVGLMSRVAQPASKKIDQNKLKPEMDEKGNLTTAGFACSQCGQPLFVYKLEQVSEKGKAYTNYFGRCNVAEHEKLILLAQLKPEKDSDEAVTYSLGKFGQRALDFYSIHVTKESTHPVKPLAQIAGNRYASSPVGKALSDACMGTIASFLSKYQDIIIEHQKVVKGNQKRLESLRELAGKENLEYPSVTLPPQPHTKEGVDAYNEVIARVRMWVNLNLWQKLKLSRDDAKPLLRLKGFPSFPLVERQANEVDWWDMVCNVKKLINEKKEDGKVFWQNLAGYKRQEALRPYLSSEEDRKKGKKFARYQLGDLLWHLEKKHGEDWGKVYDEAWERIDKKVEGLSKHIKLEEERRSEDAQSKAALTDWLRAKASFVIEGLKEADKDEFCRCELKLQKWYGDLRGKPFAIEAENSILDISGFSKQYNCAFIWQKDGVKKLNLYLIINYFKGGKLRFKKIKPEAFEANRFYTVINKKSGEIVPMEVNFNFDDPNLIILPLAFGKRFGREFIWNDLLSLETGSLKLANGRVIEKTLYNRRTRQDEPALFVALTFERREVLDSSNIKPMNLIGVDRGENIPAVIALTDPEGCPLSRFKDSLGNPTHILRIGESYKEKQRTIQAKKEVEQRRAGGYSRKYASKAKNLADDMVRNTARDLLYYAVTQDAMLIFENLSRGFGRQGKRTFMAERQYTRMEDWLTAKLAYEGLPSKTYLSKTLAQYTSKTCSNCGFTITSADYDRVLEKLKKTATGWMTTINGKELKVEGQITYYNRYKRQNVVKDLSVELDRLSEESVNNDISSWTKGRSGEALSLLKKRFSHRPVQEKFVCLNCGFETHADEQAALNIARSWLFLRSQEYKKYQTNKTTGNTDKRAFVETWQSFYRKKLKEVWKPAV

SEQ ID NO: 44931 - protein, 978 aa, synthetic construct
  REGION 1..978: note = engineered CasX variant
QEIKRINKIRRRLVKDSNTKKAGKTGPMKTLLVRVMTPDLRERLENLRKKPENIPQPISNTSRANLNKLLTDYTEMKKAILHVYWEEFQKDPVGLMSRVAQPASKKIDQNKLKPEMDEKGNLTTAGFACSQCGQPLFVYKLEQVSEKGKAYTNYFGRCNVAEHEKLILLAQLKPEKDSDEAVTYSLGKFGQRALDFYSIHVTKESTHPVKPLAQIAGNRYASTPVGKALSDACMGTIASFLSKYQDIIIEHQKVVKGNQKRLESLRELAGKENLEYPSVTLPPQPHTKEGVDAYNEVIARVRMWVNLNLWQKLKLSRDDAKPLLRLKGFPSFPLVERQANEVDWWDMVCNVKKLINEKKEDGKVFWQNLAGYKRQEALRPYLSSEEDRKKGKKFARYQLGDLLWHLEKKHGEDWGKVYDEAWERIDKKVEGLSKHIKLEEERRSEDAQSKAALTDWLRAKASFVIEGLKEADKDEFCRCELKLQKWYGDLRGKPFAIEAENSILDISGFSKQYNCAFIWQKDGVKKLNLYLIINYFKGGKLRFKKIKPEAFEANRFYTVINKKSGEIVPMEVNFNFDDPNLIILPLAFGKRFGREFIWNDLLSLETGSLKLANGRVIEKTLYNRRTRQDEPALFVALTFERREVLDSSNIKPMNLIGVDRGENIPAVIALTDPEGCPLSRFKDSLGNPTHILRIGESYKEKQRTIQAKKEVEQRRAGGYSRKYASKAKNLADDMVRNTARDLLYYAVTQDAMLIFENLSRGFGRQGKRTFMAERQYTRMEDWLTAKLAYEGLPSKTYLSKTLAQYTSKTCSNCGFTITSADYDRVLEKLKKTATGWMTTINGKELKVEGQITYYNRYKRQNVVKDLSVELDRLSEESVNNDISSWTKGRSGEALSLLKKRFSHRPVQEKFVCLNCGFETHADEQAALNIARSWLFLRSQEYKKYQTNKTTGNTDKRAFVETWQSFYRKKLKEVWKPAV

SEQ ID NO: 44932 - protein, 978 aa, synthetic construct
  REGION 1..978: note = engineered CasX variant
QEIKRINKIRRRLVKDSNTKKAGKTGPMKTLLVRVMTPDLRERLENLRKKPENIPQPISNTSRANLNKLLTDYTEMKKAILHVYWEEFQKDPVGLMSRVAQPASKKIDQNKLKPEMDEKGNLTTAGFACSQCGQPLFVYKLEQVSEKGKAYTNYFGRCNVAEHEKLILLAQLKPEKDSDEAVTYSLGKFGQRALDFYSIHVTKESTHPVKPLAQIAGNRYASAPVGKALSDACMGTIASFLSKYQDIIIEHQKVVKGNQKRLESLRELAGKENLEYPSVTLPPQPHTKEGVDAYNEVIARVRMWVNLNLWQKLKLSRDDAKPLLRLKGFPSFPLVERQANEVDWWDMVCNVKKLINEKKEDGKVFWQNLAGYKRQEALRPYLSSEEDRKKGKKFARYQLGDLLWHLEKKHGEDWGKVYDEAWERIDKKVEGLSKHIKLEEERRSEDAQSKAALTDWLRAKASFVIEGLKEADKDEFCRCELKLQKWYGDLRGKPFAIEAENSILDISGFSKQYNCAFIWQKDGVKKLNLYLIINYFKGGKLRFKKIKPEAFEANRFYTVINKKSGEIVPMEVNFNFDDPNLIILPLAFGKRFGREFIWNDLLSLETGSLKLANGRVIEKTLYNRRTRQDEPALFVALTFERREVLDSSNIKPMNLIGVDRGENIPAVIALTDPEGCPLSRFKDSLGNPTHILRIGESYKEKQRTIQAKKEVEQRRAGGYSRKYASKAKNLADDMVRNTARDLLYYAVTQDAMLIFENLSRGFGRQGKRTFMAERQYTRMEDWLTAKLAYEGLPSKTYLSKTLAQYTSKTCSNCGFTITSADYDRVLEKLKKTATGWMTTINGKELKVEGQITYYNRYKRQNVVKDLSVELDRLSEESVNNDISSWTKGRSGEALSLLKKRFSHRPVQEKFVCLNCGFETHADEQAALNIARSWLFLRSQEYKKYQTNKTTGNTDKRAFVETWQSFYRKKLKEVWKPAV

SEQ ID NO: 44933 - protein, 978 aa, synthetic construct
  REGION 1..978: note = engineered CasX variant
QEIKRINKIRRRLVKDSNTKKAGKTGPMKTLLVRVMTPDLRERLENLRKKPENIPQPISNTSRANLNKLLTDYTEMKKAILHVYWEEFQKDPVGLMSRVAQPASKKIDQNKLKPEMDEKGNLTTAGFACSQCGQPLFVYKLEQVSEKGKAYTNYFGRCNVAEHEKLILLAQLKPEKDSDEAVTYSLGKFGQRALDFYSIHVTKESTHPVKPLAQIAGNRYASVPVGKALSDACMGTIASFLSKYQDIIIEHQKVVKGNQKRLESLRELAGKENLEYPSVTLPPQPHTKEGVDAYNEVIARVRMWVNLNLWQKLKLSRDDAKPLLRLKGFPSFPLVERQANEVDWWDMVCNVKKLINEKKEDGKVFWQNLAGYKRQEALRPYLSSEEDRKKGKKFARYQLGDLLWHLEKKHGEDWGKVYDEAWERIDKKVEGLSKHIKLEEERRSEDAQSKAALTDWLRAKASFVIEGLKEADKDEFCRCELKLQKWYGDLRGKPFAIEAENSILDISGFSKQYNCAFIWQKDGVKKLNLYLIINYFKGGKLRFKKIKPEAFEANRFYTVINKKSGEIVPMEVNFNFDDPNLIILPLAFGKRFGREFIWNDLLSLETGSLKLANGRVIEKTLYNRRTRQDEPALFVALTFERREVLDSSNIKPMNLIGVDRGENIPAVIALTDPEGCPLSRFKDSLGNPTHILRIGESYKEKQRTIQAKKEVEQRRAGGYSRKYASKAKNLADDMVRNTARDLLYYAVTQDAMLIFENLSRGFGRQGKRTFMAERQYTRMEDWLTAKLAYEGLPSKTYLSKTLAQYTSKTCSNCGFTITSADYDRVLEKLKKTATGWMTTINGKELKVEGQITYYNRYKRQNVVKDLSVELDRLSEESVNNDISSWTKGRSGEALSLLKKRFSHRPVQEKFVCLNCGFETHADEQAALNIARSWLFLRSQEYKKYQTNKTTGNTDKRAFVETWQSFYRKKLKEVWKPAV

SEQ ID NO: 44934 - protein, 978 aa, synthetic construct
  REGION 1..978: note = engineered CasX variant
QEIKRINKIRRRLVKDSNTKKAGKTGPMKTLLVRVMTPDLRERLENLRKKPENIPQPISNTSRANLNKLLTDYTEMKKAILHVYWEEFQKDPVGLMSRVAQPASKKIDQNKLKPEMDEKGNLTTAGFACSQCGQPLFVYKLEQVSEKGKAYTNYFGRCNVAEHEKLIKLAQLKPEKDSDEAVTYSLGKFGQRALDFYSIHVTKESTHPVKPLAQIAGNRYASGPVGKALSDACMGTIASFLSKYQDIIIEHQKVVKGNQKRLESLRELAGKENLEYPSVTLPPQPHTKEGVDAYNEVIARVRMWVNLNLWQKLKLSRDDAKPLLRLKGFPSFPLVERQANEVDWWDMVCNVKKLINEKKEDGKVFWQNLAGYKRQEALRPYLSSEEDRKKGKKFARYQLGDLLWHLEKKHGEDWGKVYDEAWERIDKKVEGLSKHIKLEEERRSEDAQSKAALTDWLRAKASFVIEGLKEADKDEFCRCELKLQKWYGDLRGKPFAIEAENSILDISGFSKQYNCAFIWQKDGVKKLNLYLIINYFKGGKLRFKKIKPEAFEANRFYTVINKKSGEIVPMEVNFNFDDPNLIILPLAFGKRFGREFIWNDLLSLETGSLKLANGRVIEKTLYNRRTRQDEPALFVALTFERREVLDSSNIKPMNLIGVDRGENIPAVIALTDPEGCPLSRFKDSLGNPTHILRIGESYKEKQRTIQAKKEVEQRRAGGYSRKYASKAKNLADDMVRNTARDLLYYAVTQDAMLIFENLSRGFGRQGKRTFMAERQYTRMEDWLTAKLAYEGLPSKTYLSKTLAQYTSKTCSNCGFTITSADYDRVLEKLKKTATGWMTTINGKELKVEGQITYYNRYKRQNVVKDLSVELDRLSEESVNNDISSWTKGRSGEALSLLKKRFSHRPVQEKFVCLNCGFETHADEQAALNIARSWLFLRSQEYKKYQTNKTTGNTDKRAFVETWQSFYRKKLKEVWKPAV

SEQ ID NO: 44935 - protein, 977 aa, synthetic construct
  REGION 1..977: note = engineered CasX variant
QEIKRINKIRRRLVKDSNTKKAGKTGPMKTLLVRVMTPDLRERLENLRKKPENIPQPISNTSRANLNKLLTDYTEMKKAILHVYWEEFQKDPVGLMSRVAQPASKKIDQNKLKPEMDEKGNLTTAGFACSQCGQPLFVYKLEQVSEKGKAYTNYFGRCNVAEHEKLILLAQLKPEKDSDEAVTYSLGKFGQRALDFYSIHVTKESTHPVKPLAQIAGNRYASPVGKALSDACMGTIASFLSKYQDIIIEHQKVVKGNQKRLESLRELAGKENLEYPSVTLPPQPHTKEGVDAYNEVIARVRMWVNLNLWQKLKLSRDDAKPLLRLKGFPSFPLVERQANEVDWWDMVCNVKKLINEKKEDGKVFWQNLAGYKRQEALRPYLSSEEDRKKGKKFARYQLGDLLWHLEKKHGEDWGKVYDEAWERIDKKVEGLSKHIKLEEERRSEDAQSKAALTDWLRAKASFVIEGLKEADKDEFCRCELKLQKWYGDLRGKPFAIEAENSILDISGFSKQYNCAFIWQKDGVKKLNLYLIINYFKGGKLRFKKIKPEAFEANRFYTVINKKSGEIVPMEVNFNFDDPNLIILPLAFGKRFGREFIWNDLLSLETGSLKLANGRVIEKTLYNRRTRQDEPALFVALTFERREVLDSSNIKPMNLIGVDRGENIPAVIALTDPEGCPLSRFKDSLGNPTHILRIGESYKEKQRTIQAKKEVEQRRAGGYSRKYASKAKNLADDMVRNTARDLLYYAVTQDAMLIFENLSRGFGRQGKRTFMAERQYTRMEDWLTAKLAYEGLPSKTYLSKTLAQYTSKTCSNCGFTITSADYDRVLEKLKKTATGWMTTINGKELKVEGQITYYNRYKRQNVVKDLSVELDRLSEESVNNDISSWTKGRSGEALSLLKKRFSHRPVQEKFVCLNCGFETHADEQAALNIARSWLFLRSQEYKKYQTNKTTGNTDKRAFVETWQSFYRKKLKEVWKPAV

SEQ ID NO: 44936 - protein, 978 aa, synthetic construct
  REGION 1..978: note = engineered CasX variant
QEIKRINKIRRRLVKDSNTKKAGKTGPMKTLLVRVMTPDLRERLENLRKKPENIPQPISNTSRANLNKLLTDYTEMKKAILHVYWEEFQKDPVGLMSRVAQPASKKIDQNKLKPEMDEKGNLTTAGFACSQCGQPLFVYKLEQVSEKGKAYTNYFGRCNVAEHEKLILLAQLKPEKDSDEAVTYSLGKFGQRALDFYSIHVTKESTHPVKPLAQIAGNRYASYPVGKALSDACMGTIASFLSKYQDIIIEHQKVVKGNQKRLESLRELAGKENLEYPSVTLPPQPHTKEGVDAYNEVIARVRMWVNLNLWQKLKLSRDDAKPLLRLKGFPSFPLVERQANEVDWWDMVCNVKKLINEKKEDGKVFWQNLAGYKRQEALRPYLSSEEDRKKGKKFARYQLGDLLLHLYKKHGEDWGKVYDEAWERIDKKVEGLSKHIKLEEERRSEDAQSKAALTDWLRAKASFVIEGLKEADKDEFCRCELKLQKWYGDLRGKPFAIEAENSILDISGFSKQYNCAFIWQKDGVKKLNLYLIINYFKGGKLRFKKIKPEAFEANRFYTVINKKSGEIVPMEVNFNFDDPNLIILPLAFGKRFGREFIWNDLLSLETGSLKLANGRVIEKTLYNRRTRQDEPALFVALTFERREVLDSSNIKPMNLIGVDRGENIPAVIALTDPEGCPLSRFKDSLGNPTHILRIGESYKEKQRTIQAKKEVEQRRAGGYSRKYASKAKNLADDMVRNTARDLLYYAVTQDAMLIFENLSRGFGRQGKRTFMAERQYTRMEDWLTAKLAYEGLPSKTYLSKTLAQYTSKTCSNCGFTITSADYDRVLEKLKKTATGWMTTINGKELKVEGQITYYNRYKRQNVVKDLSVELDRLSEESVNNDISSWTKGRSGEALSLLKKRFSHRPVQEKFVCLNCGFETHADEQAALNIARSWLFLRSQEYKKYQTNKTTGNTDKRAFVETWQSFYRKKLKEVWKPAV

SEQ ID NO: 44937 - protein, 978 aa, synthetic construct
  REGION 1..978: note = engineered CasX variant
QEIKRINKIRRRLVKDSNTKKAGKTGPMKTLLVRVMTPDLRERLENLRKKPENIPQPISNTSRANLNKLLTDYTEMKKAILHVYWEEFQKDPVGLMSRVAQPASKKIDQNKLKPEMDEKGNLTTAGFACSQCGQPLFVYKLEQVSEKGKAYTNYFGRCNVAEHEKLILLAQLKPEKDSDEAVTYSLGKFGQRALDFYSIHVTKESTHPVKPLAQIAGNRYASHPVGKALSDACMGTIASFLSKYQDIIIEHQKVVKGNQKRLESLRELAGKENLEYPSVTLPPQPHTKEGVDAYNEVIARVRMWVNLNLWQKLKLSRDDAKPLLRLKGFPSFPLVERQANEVDWWDMVCNVKKLINEKKEDGKVFWQNLAGYKRQEALRPYLSSEEDRKKGKKFARYQLGDLLLHLYKKHGEDWGKVYDEAWERIDKKVEGLSKHIKLEEERRSEDAQSKAALTDWLRAKASFVIEGLKEADKDEFCRCELKLQKWYGDLRGKPFAIEAENSILDISGFSKQYNCAFIWQKDGVKKLNLYLIINYFKGGKLRFKKIKPEAFEANRFYTVINKKSGEIVPMEVNFNFDDPNLIILPLAFGKRFGREFIWNDLLSLETGSLKLANGRVIEKTLYNRRTRQDEPALFVALTFERREVLDSSNIKPMNLIGVDRGENIPAVIALTDPEGCPLSRFKDSLGNPTHILRIGESYKEKQRTIQAKKEVEQRRAGGYSRKYASKAKNLADDMVRNTARDLLYYAVTQDAMLIFENLSRGFGRQGKRTFMAERQYTRMEDWLTAKLAYEGLPSKTYLSKTLAQYTSKTCSNCGFTITSADYDRVLEKLKKTATGWMTTINGKELKVEGQITYYNRYKRQNVVKDLSVELDRLSEESVNNDISSWTKGRSGEALSLLKKRFSHRPVQEKFVCLNCGFETHADEQAALNIARSWLFLRSQEYKKYQTNKTTGNTDKRAFVETWQSFYRKKLKEVWKPAV

SEQ ID NO: 44938 - protein, 978 aa, synthetic construct
  REGION 1..978: note = engineered CasX variant
QEIKRINKIRRRLVKDSNTKKAGKTGPMKTLLVRVMTPDLRERLENLRKKPENIPQPISNTSRANLNKLLTDYTEMKKAILHVYWEEFQKDPVGLMSRVAQPASKKIDQNKLKPEMDEKGNLTTAGFACSQCGQPLFVYKLEQVSEKGKAYTNYFGRCNVAEHEKLILLAQLKPEKDSDEAVTYSLGKFGQRALDFYSIHVTKESTHPVKPLAQIAGNRYASSPVGKALSDACMGTIASFLSKYQDIIIEHQKVVKGNQKRLESLRELAGKENLEYPSVTLPPQPHTKEGVDAYNEVIARVRMWVNLNLWQKLKLSRDDAKPLLRLKGFPSFPLVERQANEVDWWDMVCNVKKLINEKKEDGKVFWQNLAGYKRQEALRPYLSSEEDRKKGKKFARYQLGDLLLHLYKKHGEDWGKVYDEAWERIDKKVEGLSKHIKLEEERRSEDAQSKAALTDWLRAKASFVIEGLKEADKDEFCRCELKLQKWYGDLRGKPFAIEAENSILDISGFSKQYNCAFIWQKDGVKKLNLYLIINYFKGGKLRFKKIKPEAFEANRFYTVINKKSGEIVPMEVNFNFDDPNLIILPLAFGKRFGREFIWNDLLSLETGSLKLANGRVIEKTLYNRRTRQDEPALFVALTFERREVLDSSNIKPMNLIGVDRGENIPAVIALTDPEGCPLSRFKDSLGNPTHILRIGESYKEKQRTIQAKKEVEQRRAGGYSRKYASKAKNLADDMVRNTARDLLYYAVTQDAMLIFENLSRGFGRQGKRTFMAERQYTRMEDWLTAKLAYEGLPSKTYLSKTLAQYTSKTCSNCGFTITSADYDRVLEKLKKTATGWMTTINGKELKVEGQITYYNRYKRQNVVKDLSVELDRLSEESVNNDISSWTKGRSGEALSLLKKRFSHRPVQEKFVCLNCGFETHADEQAALNIARSWLFLRSQEYKKYQTNKTTGNTDKRAFVETWQSFYRKKLKEVWKPAV

SEQ ID NO: 44939 - protein, 978 aa, synthetic construct
  REGION 1..978: note = engineered CasX variant
QEIKRINKIRRRLVKDSNTKKAGKTGPMKTLLVRVMTPDLRERLENLRKKPENIPQPISNTSRANLNKLLTDYTEMKKAILHVYWEEFQKDPVGLMSRVAQPASKKIDQNKLKPEMDEKGNLTTAGFACSQCGQPLFVYKLEQVSEKGKAYTNYFGRCNVAEHEKLILLAQLKPEKDSDEAVTYSLGKFGQRALDFYSIHVTKESTHPVKPLAQIAGNRYASTPVGKALSDACMGTIASFLSKYQDIIIEHQKVVKGNQKRLESLRELAGKENLEYPSVTLPPQPHTKEGVDAYNEVIARVRMWVNLNLWQKLKLSRDDAKPLLRLKGFPSFPLVERQANEVDWWDMVCNVKKLINEKKEDGKVFWQNLAGYKRQEALRPYLSSEEDRKKGKKFARYQLGDLLLHLYKKHGEDWGKVYDEAWERIDKKVEGLSKHIKLEEERRSEDAQSKAALTDWLRAKASFVIEGLKEADKDEFCRCELKLQKWYGDLRGKPFAIEAENSILDISGFSKQYNCAFIWQKDGVKKLNLYLIINYFKGGKLRFKKIKPEAFEANRFYTVINKKSGEIVPMEVNFNFDDPNLIILPLAFGKRFGREFIWNDLLSLETGSLKLANGRVIEKTLYNRRTRQDEPALFVALTFERREVLDSSNIKPMNLIGVDRGENIPAVIALTDPEGCPLSRFKDSLGNPTHILRIGESYKEKQRTIQAKKEVEQRRAGGYSRKYASKAKNLADDMVRNTARDLLYYAVTQDAMLIFENLSRGFGRQGKRTFMAERQYTRMEDWLTAKLAYEGLPSKTYLSKTLAQYTSKTCSNCGFTITSADYDRVLEKLKKTATGWMTTINGKELKVEGQITYYNRYKRQNVVKDLSVELDRLSEESVNNDISSWTKGRSGEALSLLKKRFSHRPVQEKFVCLNCGFETHADEQAALNIARSWLFLRSQEYKKYQTNKTTGNTDKRAFVETWQSFYRKKLKEVWKPAV

SEQ ID NO: 44940 - protein, 978 aa, synthetic construct
  REGION 1..978: note = engineered CasX variant
QEIKRINKIRRRLVKDSNTKKAGKTGPMKTLLVRVMTPDLRERLENLRKKPENIPQPISNTSRANLNKLLTDYTEMKKAILHVYWEEFQKDPVGLMSRVAQPASKKIDQNKLKPEMDEKGNLTTAGFACSQCGQPLFVYKLEQVSEKGKAYTNYFGRCNVAEHEKLILLAQLKPEKDSDEAVTYSLGKFGQRALDFYSIHVTKESTHPVKPLAQIAGNRYASAPVGKALSDACMGTIASFLSKYQDIIIEHQKVVKGNQKRLESLRELAGKENLEYPSVTLPPQPHTKEGVDAYNEVIARVRMWVNLNLWQKLKLSRDDAKPLLRLKGFPSFPLVERQANEVDWWDMVCNVKKLINEKKEDGKVFWQNLAGYKRQEALRPYLSSEEDRKKGKKFARYQLGDLLLHLYKKHGEDWGKVYDEAWERIDKKVEGLSKHIKLEEERRSEDAQSKAALTDWLRAKASFVIEGLKEADKDEFCRCELKLQKWYGDLRGKPFAIEAENSILDISGFSKQYNCAFIWQKDGVKKLNLYLIINYFKGGKLRFKKIKPEAFEANRFYTVINKKSGEIVPMEVNFNFDDPNLIILPLAFGKRFGREFIWNDLLSLETGSLKLANGRVIEKTLYNRRTRQDEPALFVALTFERREVLDSSNIKPMNLIGVDRGENIPAVIALTDPEGCPLSRFKDSLGNPTHILRIGESYKEKQRTIQAKKEVEQRRAGGYSRKYASKAKNLADDMVRNTARDLLYYAVTQDAMLIFENLSRGFGRQGKRTFMAERQYTRMEDWLTAKLAYEGLPSKTYLSKTLAQYTSKTCSNCGFTITSADYDRVLEKLKKTATGWMTTINGKELKVEGQITYYNRYKRQNVVKDLSVELDRLSEESVNNDISSWTKGRSGEALSLLKKRFSHRPVQEKFVCLNCGFETHADEQAALNIARSWLFLRSQEYKKYQTNKTTGNTDKRAFVETWQSFYRKKLKEVWKPAV

SEQ ID NO: 44941 - protein, 978 aa, synthetic construct
  REGION 1..978: note = engineered CasX variant
QEIKRINKIRRRLVKDSNTKKAGKTGPMKTLLVRVMTPDLRERLENLRKKPENIPQPISNTSRANLNKLLTDYTEMKKAILHVYWEEFQKDPVGLMSRVAQPASKKIDQNKLKPEMDEKGNLTTAGFACSQCGQPLFVYKLEQVSEKGKAYTNYFGRCNVAEHEKLILLAQLKPEKDSDEAVTYSLGKFGQRALDFYSIHVTKESTHPVKPLAQIAGNRYASVPVGKALSDACMGTIASFLSKYQDIIIEHQKVVKGNQKRLESLRELAGKENLEYPSVTLPPQPHTKEGVDAYNEVIARVRMWVNLNLWQKLKLSRDDAKPLLRLKGFPSFPLVERQANEVDWWDMVCNVKKLINEKKEDGKVFWQNLAGYKRQEALRPYLSSEEDRKKGKKFARYQLGDLLLHLYKKHGEDWGKVYDEAWERIDKKVEGLSKHIKLEEERRSEDAQSKAALTDWLRAKASFVIEGLKEADKDEFCRCELKLQKWYGDLRGKPFAIEAENSILDISGFSKQYNCAFIWQKDGVKKLNLYLIINYFKGGKLRFKKIKPEAFEANRFYTVINKKSGEIVPMEVNFNFDDPNLIILPLAFGKRFGREFIWNDLLSLETGSLKLANGRVIEKTLYNRRTRQDEPALFVALTFERREVLDSSNIKPMNLIGVDRGENIPAVIALTDPEGCPLSRFKDSLGNPTHILRIGESYKEKQRTIQAKKEVEQRRAGGYSRKYASKAKNLADDMVRNTARDLLYYAVTQDAMLIFENLSRGFGRQGKRTFMAERQYTRMEDWLTAKLAYEGLPSKTYLSKTLAQYTSKTCSNCGFTITSADYDRVLEKLKKTATGWMTTINGKELKVEGQITYYNRYKRQNVVKDLSVELDRLSEESVNNDISSWTKGRSGEALSLLKKRFSHRPVQEKFVCLNCGFETHADEQAALNIARSWLFLRSQEYKKYQTNKTTGNTDKRAFVETWQSFYRKKLKEVWKPAV

SEQ ID NO: 44942 - protein, 978 aa, synthetic construct
  REGION 1..978: note = engineered CasX variant
QEIKRINKIRRRLVKDSNTKKAGKTGPMKTLLVRVMTPDLRERLENLRKKPENIPQPISNTSRANLNKLLTDYTEMKKAILHVYWEEFQKDPVGLMSRVAQPASKKIDQNKLKPEMDEKGNLTTAGFACSQCGQPLFVYKLEQVSEKGKAYTNYFGRCNVAEHEKLIKLAQLKPEKDSDEAVTYSLGKFGQRALDFYSIHVTKESTHPVKPLAQIAGNRYASGPVGKALSDACMGTIASFLSKYQDIIIEHQKVVKGNQKRLESLRELAGKENLEYPSVTLPPQPHTKEGVDAYNEVIARVRMWVNLNLWQKLKLSRDDAKPLLRLKGFPSFPLVERQANEVDWWDMVCNVKKLINEKKEDGKVFWQNLAGYKRQEALRPYLSSEEDRKKGKKFARYQLGDLLLHLYKKHGEDWGKVYDEAWERIDKKVEGLSKHIKLEEERRSEDAQSKAALTDWLRAKASFVIEGLKEADKDEFCRCELKLQKWYGDLRGKPFAIEAENSILDISGFSKQYNCAFIWQKDGVKKLNLYLIINYFKGGKLRFKKIKPEAFEANRFYTVINKKSGEIVPMEVNFNFDDPNLIILPLAFGKRFGREFIWNDLLSLETGSLKLANGRVIEKTLYNRRTRQDEPALFVALTFERREVLDSSNIKPMNLIGVDRGENIPAVIALTDPEGCPLSRFKDSLGNPTHILRIGESYKEKQRTIQAKKEVEQRRAGGYSRKYASKAKNLADDMVRNTARDLLYYAVTQDAMLIFENLSRGFGRQGKRTFMAERQYTRMEDWLTAKLAYEGLPSKTYLSKTLAQYTSKTCSNCGFTITSADYDRVLEKLKKTATGWMTTINGKELKVEGQITYYNRYKRQNVVKDLSVELDRLSEESVNNDISSWTKGRSGEALSLLKKRFSHRPVQEKFVCLNCGFETHADEQAALNIARSWLFLRSQEYKKYQTNKTTGNTDKRAFVETWQSFYRKKLKEVWKPAV

SEQ ID NO: 44943 - protein, 977 aa, synthetic construct
  REGION 1..977: note = engineered CasX variant
QEIKRINKIRRRLVKDSNTKKAGKTGPMKTLLVRVMTPDLRERLENLRKKPENIPQPISNTSRANLNKLLTDYTEMKKAILHVYWEEFQKDPVGLMSRVAQPASKKIDQNKLKPEMDEKGNLTTAGFACSQCGQPLFVYKLEQVSEKGKAYTNYFGRCNVAEHEKLILLAQLKPEKDSDEAVTYSLGKFGQRALDFYSIHVTKESTHPVKPLAQIAGNRYASPVGKALSDACMGTIASFLSKYQDIIIEHQKVVKGNQKRLESLRELAGKENLEYPSVTLPPQPHTKEGVDAYNEVIARVRMWVNLNLWQKLKLSRDDAKPLLRLKGFPSFPLVERQANEVDWWDMVCNVKKLINEKKEDGKVFWQNLAGYKRQEALRPYLSSEEDRKKGKKFARYQLGDLLLHLYKKHGEDWGKVYDEAWERIDKKVEGLSKHIKLEEERRSEDAQSKAALTDWLRAKASFVIEGLKEADKDEFCRCELKLQKWYGDLRGKPFAIEAENSILDISGFSKQYNCAFIWQKDGVKKLNLYLIINYFKGGKLRFKKIKPEAFEANRFYTVINKKSGEIVPMEVNFNFDDPNLIILPLAFGKRFGREFIWNDLLSLETGSLKLANGRVIEKTLYNRRTRQDEPALFVALTFERREVLDSSNIKPMNLIGVDRGENIPAVIALTDPEGCPLSRFKDSLGNPTHILRIGESYKEKQRTIQAKKEVEQRRAGGYSRKYASKAKNLADDMVRNTARDLLYYAVTQDAMLIFENLSRGFGRQGKRTFMAERQYTRMEDWLTAKLAYEGLPSKTYLSKTLAQYTSKTCSNCGFTITSADYDRVLEKLKKTATGWMTTINGKELKVEGQITYYNRYKRQNVVKDLSVELDRLSEESVNNDISSWTKGRSGEALSLLKKRFSHRPVQEKFVCLNCGFETHADEQAALNIARSWLFLRSQEYKKYQTNKTTGNTDKRAFVETWQSFYRKKLKEVWKPAV

SEQ ID NO: 44944 - protein, 978 aa, synthetic construct
  REGION 1..978: note = engineered CasX variant
QEIKRINKIRRRLVKDSNTKKAGKTGPMKTLLVRVMTPDLRERLENLRKKPENIPQPISNTSRANLNKLLTDYTEMKKAILHVYWEEFQKDPVGLMSRVAQPASKKIDQNKLKPEMDEKGNLTTAGFACSQCGQPLFVYKLEQVSEKGKAYTNYFGRCNVAEHEKLILLAQLKPEKDSDEAVTYSLGKFGQRALDFYSIHVTKESTHPVKPLAQIAGNRYASYPVGKALSDACMGTIASFLSKYQDIIIEHQKVVKGNQKRLESLRELAGKENLEYPSVTLPPQPHTKEGVDAYNEVIARVRMWVNLNLWQKLKLSRDDAKPLLRLKGFPSFPLVERQANEVDWWDMVCNVKKLINEKKEDGKVFWQNLAGYKRQEALRPYLSSEEDRKKGKKFARYQLGDLLLHLEKKHPEDWGKVYDEAWERIDKKVEGLSKHIKLEEERRSEDAQSKAALTDWLRAKASFVIEGLKEADKDEFCRCELKLQKWYGDLRGKPFAIEAENSILDISGFSKQYNCAFIWQKDGVKKLNLYLIINYFKGGKLRFKKIKPEAFEANRFYTVINKKSGEIVPMEVNFNFDDPNLIILPLAFGKRFGREFIWNDLLSLETGSLKLANGRVIEKTLYNRRTRQDEPALFVALTFERREVLDSSNIKPMNLIGVDRGENIPAVIALTDPEGCPLSRFKDSLGNPTHILRIGESYKEKQRTIQAKKEVEQRRAGGYSRKYASKAKNLADDMVRNTARDLLYYAVTQDAMLIFENLSRGFGRQGKRTFMAERQYTRMEDWLTAKLAYEGLPSKTYLSKTLAQYTSKTCSNCGFTITSADYDRVLEKLKKTATGWMTTINGKELKVEGQITYYNRYKRQNVVKDLSVELDRLSEESVNNDISSWTKGRSGEALSLLKKRFSHRPVQEKFVCLNCGFETHADEQAALNIARSWLFLRSQEYKKYQTNKTTGNTDKRAFVETWQSFYRKKLKEVWKPAV

SEQ ID NO: 44945 - protein, 978 aa, synthetic construct
  REGION 1..978: note = engineered CasX variant
QEIKRINKIRRRLVKDSNTKKAGKTGPMKTLLVRVMTPDLRERLENLRKKPENIPQPISNTSRANLNKLLTDYTEMKKAILHVYWEEFQKDPVGLMSRVAQPASKKIDQNKLKPEMDEKGNLTTAGFACSQCGQPLFVYKLEQVSEKGKAYTNYFGRCNVAEHEKLILLAQLKPEKDSDEAVTYSLGKFGQRALDFYSIHVTKESTHPVKPLAQIAGNRYASHPVGKALSDACMGTIASFLSKYQDIIIEHQKVVKGNQKRLESLRELAGKENLEYPSVTLPPQPHTKEGVDAYNEVIARVRMWVNLNLWQKLKLSRDDAKPLLRLKGFPSFPLVERQANEVDWWDMVCNVKKLINEKKEDGKVFWQNLAGYKRQEALRPYLSSEEDRKKGKKFARYQLGDLLLHLEKKHPEDWGKVYDEAWERIDKKVEGLSKHIKLEEERRSEDAQSKAALTDWLRAKASFVIEGLKEADKDEFCRCELKLQKWYGDLRGKPFAIEAENSILDISGFSKQYNCAFIWQKDGVKKLNLYLIINYFKGGKLRFKKIKPEAFEANRFYTVINKKSGEIVPMEVNFNFDDPNLIILPLAFGKRFGREFIWNDLLSLETGSLKLANGRVIEKTLYNRRTRQDEPALFVALTFERREVLDSSNIKPMNLIGVDRGENIPAVIALTDPEGCPLSRFKDSLGNPTHILRIGESYKEKQRTIQAKKEVEQRRAGGYSRKYASKAKNLADDMVRNTARDLLYYAVTQDAMLIFENLSRGFGRQGKRTFMAERQYTRMEDWLTAKLAYEGLPSKTYLSKTLAQYTSKTCSNCGFTITSADYDRVLEKLKKTATGWMTTINGKELKVEGQITYYNRYKRQNVVKDLSVELDRLSEESVNNDISSWTKGRSGEALSLLKKRFSHRPVQEKFVCLNCGFETHADEQAALNIARSWLFLRSQEYKKYQTNKTTGNTDKRAFVETWQSFYRKKLKEVWKPAV

SEQ ID NO: 44946 - protein, 978 aa, synthetic construct
  REGION 1..978: note = engineered CasX variant
QEIKRINKIRRRLVKDSNTKKAGKTGPMKTLLVRVMTPDLRERLENLRKKPENIPQPISNTSRANLNKLLTDYTEMKKAILHVYWEEFQKDPVGLMSRVAQPASKKIDQNKLKPEMDEKGNLTTAGFACSQCGQPLFVYKLEQVSEKGKAYTNYFGRCNVAEHEKLILLAQLKPEKDSDEAVTYSLGKFGQRALDFYSIHVTKESTHPVKPLAQIAGNRYASSPVGKALSDACMGTIASFLSKYQDIIIEHQKVVKGNQKRLESLRELAGKENLEYPSVTLPPQPHTKEGVDAYNEVIARVRMWVNLNLWQKLKLSRDDAKPLLRLKGFPSFPLVERQANEVDWWDMVCNVKKLINEKKEDGKVFWQNLAGYKRQEALRPYLSSEEDRKKGKKFARYQLGDLLLHLEKKHPEDWGKVYDEAWERIDKKVEGLSKHIKLEEERRSEDAQSKAALTDWLRAKASFVIEGLKEADKDEFCRCELKLQKWYGDLRGKPFAIEAENSILDISGFSKQYNCAFIWQKDGVKKLNLYLIINYFKGGKLRFKKIKPEAFEANRFYTVINKKSGEIVPMEVNFNFDDPNLIILPLAFGKRFGREFIWNDLLSLETGSLKLANGRVIEKTLYNRRTRQDEPALFVALTFERREVLDSSNIKPMNLIGVDRGENIPAVIALTDPEGCPLSRFKDSLGNPTHILRIGESYKEKQRTIQAKKEVEQRRAGGYSRKYASKAKNLADDMVRNTARDLLYYAVTQDAMLIFENLSRGFGRQGKRTFMAERQYTRMEDWLTAKLAYEGLPSKTYLSKTLAQYTSKTCSNCGFTITSADYDRVLEKLKKTATGWMTTINGKELKVEGQITYYNRYKRQNVVKDLSVELDRLSEESVNNDISSWTKGRSGEALSLLKKRFSHRPVQEKFVCLNCGFETHADEQAALNIARSWLFLRSQEYKKYQTNKTTGNTDKRAFVETWQSFYRKKLKEVWKPAV

SEQ ID NO: 44947 - protein, 978 aa, synthetic construct
  REGION 1..978: note = engineered CasX variant
QEIKRINKIRRRLVKDSNTKKAGKTGPMKTLLVRVMTPDLRERLENLRKKPENIPQPISNTSRANLNKLLTDYTEMKKAILHVYWEEFQKDPVGLMSRVAQPASKKIDQNKLKPEMDEKGNLTTAGFACSQCGQPLFVYKLEQVSEKGKAYTNYFGRCNVAEHEKLILLAQLKPEKDSDEAVTYSLGKFGQRALDFYSIHVTKESTHPVKPLAQIAGNRYASTPVGKALSDACMGTIASFLSKYQDIIIEHQKVVKGNQKRLESLRELAGKENLEYPSVTLPPQPHTKEGVDAYNEVIARVRMWVNLNLWQKLKLSRDDAKPLLRLKGFPSFPLVERQANEVDWWDMVCNVKKLINEKKEDGKVFWQNLAGYKRQEALRPYLSSEEDRKKGKKFARYQLGDLLLHLEKKHPEDWGKVYDEAWERIDKKVEGLSKHIKLEEERRSEDAQSKAALTDWLRAKASFVIEGLKEADKDEFCRCELKLQKWYGDLRGKPFAIEAENSILDISGFSKQYNCAFIWQKDGVKKLNLYLIINYFKGGKLRFKKIKPEAFEANRFYTVINKKSGEIVPMEVNFNFDDPNLIILPLAFGKRFGREFIWNDLLSLETGSLKLANGRVIEKTLYNRRTRQDEPALFVALTFERREVLDSSNIKPMNLIGVDRGENIPAVIALTDPEGCPLSRFKDSLGNPTHILRIGESYKEKQRTIQAKKEVEQRRAGGYSRKYASKAKNLADDMVRNTARDLLYYAVTQDAMLIFENLSRGFGRQGKRTFMAERQYTRMEDWLTAKLAYEGLPSKTYLSKTLAQYTSKTCSNCGFTITSADYDRVLEKLKKTATGWMTTINGKELKVEGQITYYNRYKRQNVVKDLSVELDRLSEESVNNDISSWTKGRSGEALSLLKKRFSHRPVQEKFVCLNCGFETHADEQAALNIARSWLFLRSQEYKKYQTNKTTGNTDKRAFVETWQSFYRKKLKEVWKPAV

SEQ ID NO: 44948 - protein, 978 aa, synthetic construct
  REGION 1..978: note = engineered CasX variant
QEIKRINKIRRRLVKDSNTKKAGKTGPMKTLLVRVMTPDLRERLENLRKKPENIPQPISNTSRANLNKLLTDYTEMKKAILHVYWEEFQKDPVGLMSRVAQPASKKIDQNKLKPEMDEKGNLTTAGFACSQCGQPLFVYKLEQVSEKGKAYTNYFGRCNVAEHEKLILLAQLKPEKDSDEAVTYSLGKFGQRALDFYSIHVTKESTHPVKPLAQIAGNRYASAPVGKALSDACMGTIASFLSKYQDIIIEHQKVVKGNQKRLESLRELAGKENLEYPSVTLPPQPHTKEGVDAYNEVIARVRMWVNLNLWQKLKLSRDDAKPLLRLKGFPSFPLVERQANEVDWWDMVCNVKKLINEKKEDGKVFWQNLAGYKRQEALRPYLSSEEDRKKGKKFARYQLGDLLLHLEKKHPEDWGKVYDEAWERIDKKVEGLSKHIKLEEERRSEDAQSKAALTDWLRAKASFVIEGLKEADKDEFCRCELKLQKWYGDLRGKPFAIEAENSILDISGFSKQYNCAFIWQKDGVKKLNLYLIINYFKGGKLRFKKIKPEAFEANRFYTVINKKSGEIVPMEVNFNFDDPNLIILPLAFGKRFGREFIWNDLLSLETGSLKLANGRVIEKTLYNRRTRQDEPALFVALTFERREVLDSSNIKPMNLIGVDRGENIPAVIALTDPEGCPLSRFKDSLGNPTHILRIGESYKEKQRTIQAKKEVEQRRAGGYSRKYASKAKNLADDMVRNTARDLLYYAVTQDAMLIFENLSRGFGRQGKRTFMAERQYTRMEDWLTAKLAYEGLPSKTYLSKTLAQYTSKTCSNCGFTITSADYDRVLEKLKKTATGWMTTINGKELKVEGQITYYNRYKRQNVVKDLSVELDRLSEESVNNDISSWTKGRSGEALSLLKKRFSHRPVQEKFVCLNCGFETHADEQAALNIARSWLFLRSQEYKKYQTNKTTGNTDKRAFVETWQSFYRKKLKEVWKPAV

SEQ ID NO: 44949 - protein, 978 aa, synthetic construct
  REGION 1..978: note = engineered CasX variant
QEIKRINKIRRRLVKDSNTKKAGKTGPMKTLLVRVMTPDLRERLENLRKKPENIPQPISNTSRANLNKLLTDYTEMKKAILHVYWEEFQKDPVGLMSRVAQPASKKIDQNKLKPEMDEKGNLTTAGFACSQCGQPLFVYKLEQVSEKGKAYTNYFGRCNVAEHEKLILLAQLKPEKDSDEAVTYSLGKFGQRALDFYSIHVTKESTHPVKPLAQIAGNRYASVPVGKALSDACMGTIASFLSKYQDIIIEHQKVVKGNQKRLESLRELAGKENLEYPSVTLPPQPHTKEGVDAYNEVIARVRMWVNLNLWQKLKLSRDDAKPLLRLKGFPSFPLVERQANEVDWWDMVCNVKKLINEKKEDGKVFWQNLAGYKRQEALRPYLSSEEDRKKGKKFARYQLGDLLLHLEKKHPEDWGKVYDEAWERIDKKVEGLSKHIKLEEERRSEDAQSKAALTDWLRAKASFVIEGLKEADKDEFCRCELKLQKWYGDLRGKPFAIEAENSILDISGFSKQYNCAFIWQKDGVKKLNLYLIINYFKGGKLRFKKIKPEAFEANRFYTVINKKSGEIVPMEVNFNFDDPNLIILPLAFGKRFGREFIWNDLLSLETGSLKLANGRVIEKTLYNRRTRQDEPALFVALTFERREVLDSSNIKPMNLIGVDRGENIPAVIALTDPEGCPLSRFKDSLGNPTHILRIGESYKEKQRTIQAKKEVEQRRAGGYSRKYASKAKNLADDMVRNTARDLLYYAVTQDAMLIFENLSRGFGRQGKRTFMAERQYTRMEDWLTAKLAYEGLPSKTYLSKTLAQYTSKTCSNCGFTITSADYDRVLEKLKKTATGWMTTINGKELKVEGQITYYNRYKRQNVVKDLSVELDRLSEESVNNDISSWTKGRSGEALSLLKKRFSHRPVQEKFVCLNCGFETHADEQAALNIARSWLFLRSQEYKKYQTNKTTGNTDKRAFVETWQSFYRKKLKEVWKPAV

SEQ ID NO: 44950 - protein, 978 aa, synthetic construct
  REGION 1..978: note = engineered CasX variant
QEIKRINKIRRRLVKDSNTKKAGKTGPMKTLLVRVMTPDLRERLENLRKKPENIPQPISNTSRANLNKLLTDYTEMKKAILHVYWEEFQKDPVGLMSRVAQPASKKIDQNKLKPEMDEKGNLTTAGFACSQCGQPLFVYKLEQVSEKGKAYTNYFGRCNVAEHEKLIKLAQLKPEKDSDEAVTYSLGKFGQRALDFYSIHVTKESTHPVKPLAQIAGNRYASGPVGKALSDACMGTIASFLSKYQDIIIEHQKVVKGNQKRLESLRELAGKENLEYPSVTLPPQPHTKEGVDAYNEVIARVRMWVNLNLWQKLKLSRDDAKPLLRLKGFPSFPLVERQANEVDWWDMVCNVKKLINEKKEDGKVFWQNLAGYKRQEALRPYLSSEEDRKKGKKFARYQLGDLLLHLEKKHPEDWGKVYDEAWERIDKKVEGLSKHIKLEEERRSEDAQSKAALTDWLRAKASFVIEGLKEADKDEFCRCELKLQKWYGDLRGKPFAIEAENSILDISGFSKQYNCAFIWQKDGVKKLNLYLIINYFKGGKLRFKKIKPEAFEANRFYTVINKKSGEIVPMEVNFNFDDPNLIILPLAFGKRFGREFIWNDLLSLETGSLKLANGRVIEKTLYNRRTRQDEPALFVALTFERREVLDSSNIKPMNLIGVDRGENIPAVIALTDPEGCPLSRFKDSLGNPTHILRIGESYKEKQRTIQAKKEVEQRRAGGYSRKYASKAKNLADDMVRNTARDLLYYAVTQDAMLIFENLSRGFGRQGKRTFMAERQYTRMEDWLTAKLAYEGLPSKTYLSKTLAQYTSKTCSNCGFTITSADYDRVLEKLKKTATGWMTTINGKELKVEGQITYYNRYKRQNVVKDLSVELDRLSEESVNNDISSWTKGRSGEALSLLKKRFSHRPVQEKFVCLNCGFETHADEQAALNIARSWLFLRSQEYKKYQTNKTTGNTDKRAFVETWQSFYRKKLKEVWKPAV

SEQ ID NO: 44951 - protein, 977 aa, synthetic construct
  REGION 1..977: note = engineered CasX variant
QEIKRINKIRRRLVKDSNTKKAGKTGPMKTLLVRVMTPDLRERLENLRKKPENIPQPISNTSRANLNKLLTDYTEMKKAILHVYWEEFQKDPVGLMSRVAQPASKKIDQNKLKPEMDEKGNLTTAGFACSQCGQPLFVYKLEQVSEKGKAYTNYFGRCNVAEHEKLILLAQLKPEKDSDEAVTYSLGKFGQRALDFYSIHVTKESTHPVKPLAQIAGNRYASPVGKALSDACMGTIASFLSKYQDIIIEHQKVVKGNQKRLESLRELAGKENLEYPSVTLPPQPHTKEGVDAYNEVIARVRMWVNLNLWQKLKLSRDDAKPLLRLKGFPSFPLVERQANEVDWWDMVCNVKKLINEKKEDGKVFWQNLAGYKRQEALRPYLSSEEDRKKGKKFARYQLGDLLLHLEKKHPEDWGKVYDEAWERIDKKVEGLSKHIKLEEERRSEDAQSKAALTDWLRAKASFVIEGLKEADKDEFCRCELKLQKWYGDLRGKPFAIEAENSILDISGFSKQYNCAFIWQKDGVKKLNLYLIINYFKGGKLRFKKIKPEAFEANRFYTVINKKSGEIVPMEVNFNFDDPNLIILPLAFGKRFGREFIWNDLLSLETGSLKLANGRVIEKTLYNRRTRQDEPALFVALTFERREVLDSSNIKPMNLIGVDRGENIPAVIALTDPEGCPLSRFKDSLGNPTHILRIGESYKEKQRTIQAKKEVEQRRAGGYSRKYASKAKNLADDMVRNTARDLLYYAVTQDAMLIFENLSRGFGRQGKRTFMAERQYTRMEDWLTAKLAYEGLPSKTYLSKTLAQYTSKTCSNCGFTITSADYDRVLEKLKKTATGWMTTINGKELKVEGQITYYNRYKRQNVVKDLSVELDRLSEESVNNDISSWTKGRSGEALSLLKKRFSHRPVQEKFVCLNCGFETHADEQAALNIARSWLFLRSQEYKKYQTNKTTGNTDKRAFVETWQSFYRKKLKEVWKPAV

SEQ ID NO: 44952 - protein, 979 aa, synthetic construct
  REGION 1..979: note = engineered CasX variant
QEIKRINKIRRRLVKDSNTKKAGKTGPMKTLLVRVMTPDLRERLENLRKKPENIPQPISNTSRANLNKLLTDYTEMKKAILHVYWEEFQKDPVGLMSRVAQPASKKIDQNKLKPEMDEKGNLTTAGFACSQCGQPLFVYKLEQVSEKGKAYTNYFGRCNVAEHEKLILLAQLKPEKDSDEAVTYSLGKFGQRALDFYSIHVTKESTHPVKPLAQIAGNRYASYPVGKALSDACMGTIASFLSKYQDIIIEHQKVVKGNQKRLESLRELAGKENLEYPSVTLPPQPHTKEGVDAYNEVIARVRMWVNLNLWQKLKLSRDDAKPLLRLKGFPSFPLVERQANEVDWWDMVCNVKKLINEKKEDGKVFWQNLAGYKRQEALRPYLSSEEDRKKGKKFARYQLGDLLLHLEKKHGERDWGKVYDEAWERIDKKVEGLSKHIKLEEERRSEDAQSKAALTDWLRAKASFVIEGLKEADKDEFCRCELKLQKWYGDLRGKPFAIEAENSILDISGFSKQYNCAFIWQKDGVKKLNLYLIINYFKGGKLRFKKIKPEAFEANRFYTVINKKSGEIVPMEVNFNFDDPNLIILPLAFGKRFGREFIWNDLLSLETGSLKLANGRVIEKTLYNRRTRQDEPALFVALTFERREVLDSSNIKPMNLIGVDRGENIPAVIALTDPEGCPLSRFKDSLGNPTHILRIGESYKEKQRTIQAKKEVEQRRAGGYSRKYASKAKNLADDMVRNTARDLLYYAVTQDAMLIFENLSRGFGRQGKRTFMAERQYTRMEDWLTAKLAYEGLPSKTYLSKTLAQYTSKTCSNCGFTITSADYDRVLEKLKKTATGWMTTINGKELKVEGQITYYNRYKRQNVVKDLSVELDRLSEESVNNDISSWTKGRSGEALSLLKKRFSHRPVQEKFVCLNCGFETHADEQAALNIARSWLFLRSQEYKKYQTNKTTGNTDKRAFVETWQSFYRKKLKEVWKPAV

SEQ ID NO: 44953 - protein, 979 aa, synthetic construct
  REGION 1..979: note = engineered CasX variant
QEIKRINKIRRRLVKDSNTKKAGKTGPMKTLLVRVMTPDLRERLENLRKKPENIPQPISNTSRANLNKLLTDYTEMKKAILHVYWEEFQKDPVGLMSRVAQPASKKIDQNKLKPEMDEKGNLTTAGFACSQCGQPLFVYKLEQVSEKGKAYTNYFGRCNVAEHEKLILLAQLKPEKDSDEAVTYSLGKFGQRALDFYSIHVTKESTHPVKPLAQIAGNRYASHPVGKALSDACMGTIASFLSKYQDIIIEHQKVVKGNQKRLESLRELAGKENLEYPSVTLPPQPHTKEGVDAYNEVIARVRMWVNLNLWQKLKLSRDDAKPLLRLKGFPSFPLVERQANEVDWWDMVCNVKKLINEKKEDGKVFWQNLAGYKRQEALRPYLSSEEDRKKGKKFARYQLGDLLLHLEKKHGERDWGKVYDEAWERIDKKVEGLSKHIKLEEERRSEDAQSKAALTDWLRAKASFVIEGLKEADKDEFCRCELKLQKWYGDLRGKPFAIEAENSILDISGFSKQYNCAFIWQKDGVKKLNLYLIINYFKGGKLRFKKIKPEAFEANRFYTVINKKSGEIVPMEVNFNFDDPNLIILPLAFGKRFGREFIWNDLLSLETGSLKLANGRVIEKTLYNRRTRQDEPALFVALTFERREVLDSSNIKPMNLIGVDRGENIPAVIALTDPEGCPLSRFKDSLGNPTHILRIGESYKEKQRTIQAKKEVEQRRAGGYSRKYASKAKNLADDMVRNTARDLLYYAVTQDAMLIFENLSRGFGRQGKRTFMAERQYTRMEDWLTAKLAYEGLPSKTYLSKTLAQYTSKTCSNCGFTITSADYDRVLEKLKKTATGWMTTINGKELKVEGQITYYNRYKRQNVVKDLSVELDRLSEESVNNDISSWTKGRSGEALSLLKKRFSHRPVQEKFVCLNCGFETHADEQAALNIARSWLFLRSQEYKKYQTNKTTGNTDKRAFVETWQSFYRKKLKEVWKPAV

SEQ ID NO: 44954 - protein, 979 aa, synthetic construct
  REGION 1..979: note = engineered CasX variant
QEIKRINKIRRRLVKDSNTKKAGKTGPMKTLLVRVMTPDLRERLENLRKKPENIPQPISNTSRANLNKLLTDYTEMKKAILHVYWEEFQKDPVGLMSRVAQPASKKIDQNKLKPEMDEKGNLTTAGFACSQCGQPLFVYKLEQVSEKGKAYTNYFGRCNVAEHEKLILLAQLKPEKDSDEAVTYSLGKFGQRALDFYSIHVTKESTHPVKPLAQIAGNRYASSPVGKALSDACMGTIASFLSKYQDIIIEHQKVVKGNQKRLESLRELAGKENLEYPSVTLPPQPHTKEGVDAYNEVIARVRMWVNLNLWQKLKLSRDDAKPLLRLKGFPSFPLVERQANEVDWWDMVCNVKKLINEKKEDGKVFWQNLAGYKRQEALRPYLSSEEDRKKGKKFARYQLGDLLLHLEKKHGERDWGKVYDEAWERIDKKVEGLSKHIKLEEERRSEDAQSKAALTDWLRAKASFVIEGLKEADKDEFCRCELKLQKWYGDLRGKPFAIEAENSILDISGFSKQYNCAFIWQKDGVKKLNLYLIINYFKGGKLRFKKIKPEAFEANRFYTVINKKSGEIVPMEVNFNFDDPNLIILPLAFGKRFGREFIWNDLLSLETGSLKLANGRVIEKTLYNRRTRQDEPALFVALTFERREVLDSSNIKPMNLIGVDRGENIPAVIALTDPEGCPLSRFKDSLGNPTHILRIGESYKEKQRTIQAKKEVEQRRAGGYSRKYASKAKNLADDMVRNTARDLLYYAVTQDAMLIFENLSRGFGRQGKRTFMAERQYTRMEDWLTAKLAYEGLPSKTYLSKTLAQYTSKTCSNCGFTITSADYDRVLEKLKKTATGWMTTINGKELKVEGQITYYNRYKRQNVVKDLSVELDRLSEESVNNDISSWTKGRSGEALSLLKKRFSHRPVQEKFVCLNCGFETHADEQAALNIARSWLFLRSQEYKKYQTNKTTGNTDKRAFVETWQSFYRKKLKEVWKPAV

SEQ ID NO: 44955 - protein, 979 aa, synthetic construct
  REGION 1..979: note = engineered CasX variant
QEIKRINKIRRRLVKDSNTKKAGKTGPMKTLLVRVMTPDLRERLENLRKKPENIPQPISNTSRANLNKLLTDYTEMKKAILHVYWEEFQKDPVGLMSRVAQPASKKIDQNKLKPEMDEKGNLTTAGFACSQCGQPLFVYKLEQVSEKGKAYTNYFGRCNVAEHEKLILLAQLKPEKDSDEAVTYSLGKFGQRALDFYSIHVTKESTHPVKPLAQIAGNRYASTPVGKALSDACMGTIASFLSKYQDIIIEHQKVVKGNQKRLESLRELAGKENLEYPSVTLPPQPHTKEGVDAYNEVIARVRMWVNLNLWQKLKLSRDDAKPLLRLKGFPSFPLVERQANEVDWWDMVCNVKKLINEKKEDGKVFWQNLAGYKRQEALRPYLSSEEDRKKGKKFARYQLGDLLLHLEKKHGERDWGKVYDEAWERIDKKVEGLSKHIKLEEERRSEDAQSKAALTDWLRAKASFVIEGLKEADKDEFCRCELKLQKWYGDLRGKPFAIEAENSILDISGFSKQYNCAFIWQKDGVKKLNLYLIINYFKGGKLRFKKIKPEAFEANRFYTVINKKSGEIVPMEVNFNFDDPNLIILPLAFGKRFGREFIWNDLLSLETGSLKLANGRVIEKTLYNRRTRQDEPALFVALTFERREVLDSSNIKPMNLIGVDRGENIPAVIALTDPEGCPLSRFKDSLGNPTHILRIGESYKEKQRTIQAKKEVEQRRAGGYSRKYASKAKNLADDMVRNTARDLLYYAVTQDAMLIFENLSRGFGRQGKRTFMAERQYTRMEDWLTAKLAYEGLPSKTYLSKTLAQYTSKTCSNCGFTITSADYDRVLEKLKKTATGWMTTINGKELKVEGQITYYNRYKRQNVVKDLSVELDRLSEESVNNDISSWTKGRSGEALSLLKKRFSHRPVQEKFVCLNCGFETHADEQAALNIARSWLFLRSQEYKKYQTNKTTGNTDKRAFVETWQSFYRKKLKEVWKPAV

SEQ ID NO: 44956 - protein, 979 aa, synthetic construct
  REGION 1..979: note = engineered CasX variant
QEIKRINKIRRRLVKDSNTKKAGKTGPMKTLLVRVMTPDLRERLENLRKKPENIPQPISNTSRANLNKLLTDYTEMKKAILHVYWEEFQKDPVGLMSRVAQPASKKIDQNKLKPEMDEKGNLTTAGFACSQCGQPLFVYKLEQVSEKGKAYTNYFGRCNVAEHEKLILLAQLKPEKDSDEAVTYSLGKFGQRALDFYSIHVTKESTHPVKPLAQIAGNRYASAPVGKALSDACMGTIASFLSKYQDIIIEHQKVVKGNQKRLESLRELAGKENLEYPSVTLPPQPHTKEGVDAYNEVIARVRMWVNLNLWQKLKLSRDDAKPLLRLKGFPSFPLVERQANEVDWWDMVCNVKKLINEKKEDGKVFWQNLAGYKRQEALRPYLSSEEDRKKGKKFARYQLGDLLLHLEKKHGERDWGKVYDEAWERIDKKVEGLSKHIKLEEERRSEDAQSKAALTDWLRAKASFVIEGLKEADKDEFCRCELKLQKWYGDLRGKPFAIEAENSILDISGFSKQYNCAFIWQKDGVKKLNLYLIINYFKGGKLRFKKIKPEAFEANRFYTVINKKSGEIVPMEVNFNFDDPNLIILPLAFGKRFGREFIWNDLLSLETGSLKLANGRVIEKTLYNRRTRQDEPALFVALTFERREVLDSSNIKPMNLIGVDRGENIPAVIALTDPEGCPLSRFKDSLGNPTHILRIGESYKEKQRTIQAKKEVEQRRAGGYSRKYASKAKNLADDMVRNTARDLLYYAVTQDAMLIFENLSRGFGRQGKRTFMAERQYTRMEDWLTAKLAYEGLPSKTYLSKTLAQYTSKTCSNCGFTITSADYDRVLEKLKKTATGWMTTINGKELKVEGQITYYNRYKRQNVVKDLSVELDRLSEESVNNDISSWTKGRSGEALSLLKKRFSHRPVQEKFVCLNCGFETHADEQAALNIARSWLFLRSQEYKKYQTNKTTGNTDKRAFVETWQSFYRKKLKEVWKPAV
